(19) United States
(12) Patent Application Publication
(10) Pub. No.: US 2025/0236852 A1
(43) Pub. Date: Jul. 24, 2025

(54) LARGE SERINE RECOMBINASES, SYSTEMS AND USES THEREOF

(71) Applicant: Beam Therapeutics Inc., Cambridge, MA (US)

(72) Inventors: Zharko DANILOSKI, Cambridge, MA (US); David BORN, Cambridge, MA (US); Yi YU, Cambridge, MA (US)

(21) Appl. No.: 19/079,568

(22) Filed: Mar. 14, 2025

Related U.S. Application Data
(63) Continuation of application No. PCT/US2023/074298, filed on Sep. 15, 2023.
(60) Provisional application No. 63/407,487, filed on Sep. 16, 2022.

(51) Int. Cl. C12N 9/12; C12N 15/86

(52) U.S. Cl. CPC C12N 9/1241; C12N 15/86; C12N 2740/15043; C12N 2750/14143

(57) ABSTRACT

The present invention provides novel serine recombinases, recombinase based systems and compositions, and methods for genomic targeting and modification. In some aspects, the large serine recombinases, and systems thereof are used to treat human diseases.

### CROSS-REFERENCE TO RELATED APPLICATIONS

[0001] This application is a Continuation Application of International Application No. PCT/US2023/074298, filed on Sep. 15, 2023, which claims priority to U.S. Provisional Patent Application Ser. No. 63/407,487, filed on Sep. 16, 2022, the contents of each of which are incorporated by reference herein in entirety for all purposes.

### SEQUENCE LISTING

[0002] The instant application contains a Sequence Listing which has been submitted electronically in XML file format and is hereby incorporated by reference in its entirety. Said XML copy, created on Dec. 8, 2022, is named BEM-017USP1_SL.xml and is 4,968,123 bytes in size.

### BACKGROUND

[0003] Recombinases, e.g. large serine recombinases (LSRs) catalyze the insertion and integration of DNA elements into genomes using site-specific recombination between short DNA “attachment sites”. For example, LSRs carry out integration between attachment sites in the phage (attP) and in the host bacteria (attB). LSRs are highly site-specific and highly directional. Excision between the product attL and attR sites does not occur in the absence of a phage-encoded recombination directionality factor.

[0004] Large serine recombinases that recognize and target specific sequences, can be used to repair genetic mutations, integrate functional genes, or localize enzymes or transcription factors to specific sites on the genome, allowing genetic and epigenetic regulation and transcriptional modulation through a variety of mechanisms. Precise genomic modification is a challenge in a wide variety of target genes. The simplicity, site-selectivity and strong directionality of the LSRs provide precise genomic modifications, advancing genetic engineering applications and gene therapy in a wide variety of organisms.

### SUMMARY OF THE INVENTION

[0005] The present invention provides novel large serine recombinases, among other things, systems and compositions comprising one or more large serine recombinases, and methods of use thereof for LSR mediated genome modifications. The enzymes, systems, cells and compositions of the present invention can be used as therapeutic agents for treatment of diseases, as well as research tools to study precise genomic modifications in a host cell, tissue or subject, in vivo or in vitro.

[0006] In one aspect, the present invention provides a system for modifying DNA, the system comprising: (a) a large serine recombinase having at least 70% identity to any one of the amino acid sequences of SEQ ID NOs: 1-774; (b) a DNA recognition sequence comprising an attP or an attB site; and/or (c) a heterologous nucleic acid sequence.

[0007] In some embodiments, the large serine recombinase comprises an amino acid sequence having at least 80%, 85%, 90%, 95%, 96%, 97%, 98% or 99% identity to any one of the amino acid sequences of SEQ ID NOs: 1-774.

[0008] In some embodiments, the large serine recombinase comprises an amino acid sequence having at least 90% identity to any one of the amino acid sequences of SEQ ID NOs: 1-774. In some embodiments, the large serine recombinase comprises an amino acid sequence having at least 95% identity to any one of the amino acid sequences of SEQ ID NOs: 1-774. In some embodiments, the large serine recombinase comprises an amino acid sequence having at least 99% identity to any one of the amino acid sequences of SEQ ID NOs: 1-774.

[0009] In some embodiments, the large serine recombinase comprises an amino acid sequence selected from the amino acid sequences of SEQ ID NOs: 1-774.

[0010] In some embodiments, the large serine recombinase is encoded by a polynucleotide having at least 70% identity to any one of polynucleotide sequences of SEQ ID NOs: 775-1548.

[0011] In some embodiments, the large serine recombinase is encoded by a polynucleotide having at least 80%, 85%, 90%, 95%, 96%, 97%, 98% or 99% identity to any one of the polynucleotide sequences of SEQ ID NOs: 775-1548.

[0012] In some embodiments, the large serine recombinase is encoded by a polynucleotide having at least 90% identity to any one of the polynucleotide sequences of SEQ ID NOs: 775-1548. In some embodiments, the large serine recombinase is encoded by a polynucleotide having at least 95% identity to any one of the polynucleotide sequences of SEQ ID NOs: 775-1548. In some embodiments, the large serine recombinase is encoded by a polynucleotide having at least 99% identity to any one of the polynucleotide sequences of SEQ ID NOs: 775-1548.

[0013] In some embodiments, the large serine recombinase is encoded by a polynucleotide selected from any one of the polynucleotide sequences of SEQ ID NOs: 775-1548.

[0014] In some embodiments, the large serine recombinase is derived from a phage, bacterial genome, a virus, an archaea, a fungi, a eukaryotic genome (e g., human microbiome). In some embodiments, the large serine recombinase is derived from a phage genome. In some embodiments, the large serine recombinase is derived from a bacterial genome. In some embodiments, an engineered, non-naturally occurring serine recombinase modified from a phage, bacterial genome, a virus, a fungi, a eukaryotic genome (e g., human microbiome), is provided herein. In some embodiments, the serine recombinase is codon-optimized.

[0015] In some embodiments, the system comprises an attP site that recognizes a cognate attB site in the genome and causes recombination integrating the heterologous DNA in the genome.

[0016] In some embodiments, the system comprises an attB site that recognizes a cognate attP site in the genome and causes recombination integrating the heterologous DNA in the genome.

[0017] In some embodiments, the interaction of the attP site and the attB site mediates integration of the heterologous DNA sequence into the genome.

[0018] In some embodiments, the attP or attB site comprises a parapalindromic sequence.

[0019] In some embodiments, the attP or attB sites are naturally occurring, i.e., pseudo attP or pseudo attB sites.

[0020] In some embodiments, the attP or attB sites are engineered or optimized for expression in a target cell.

[0021] In some embodiments, the heterologous DNA sequence is recombined or inserted into the target genome at one or more attP or attB sites.

[0022] In some embodiments, the heterologous DNA sequence is recombined or inserted into the target genome at a single attP or attB site.

[0023] In some embodiments, the system is comprised in one or more integrative vectors.

[0024] In some embodiments, the system is comprised in a single integrative vector.

[0025] In one embodiment, a vector comprising the system described herein is provided.

[0026] In one embodiment, the vector is a plasmid vector or a viral vector.

[0027] In some embodiments, the vector is an adenoviral vector, an adeno associated viral (AAV) vector, a lentiviral vector, a retroviral vector or a rabies virus vector. In some embodiments, the vector is an adenoviral vector. In some embodiments, the vector is an AAV vector. In some embodiments, the vector is a lentiviral vector. In some embodiments, the vector is a retroviral vector. In some embodiments, the vector is a rabies virus vector. In some embodiments, more than one vector is used for packaging the system. In some embodiments, more than one AAV vector is used for packaging the system.

[0028] In some embodiments, the vector is non-viral vector. In some embodiments, non-viral delivery is using a lipid nanoparticle (LNP).

[0029] In some embodiments, the system comprises mRNA encoding a large serine recombinase. In some embodiments, the system further comprises a heterologous donor sequence. In some embodiments, the heterologous donor sequence is DNA. In some embodiments, the DNA is double-stranded. In some embodiments, the donor sequence is a circular double-stranded DNA. In some embodiments, the donor sequence is a linear double-stranded DNA. In some embodiments, the linear dsDNA is converted to circular double-stranded DNA in cells. In some embodiments, the heterologous donor sequence is single-stranded DNA. In some embodiments, the heterologous donor sequence is mRNA. In some embodiments, the single-stranded donor sequence is converted to circular double-stranded DNA in cells. In some embodiments, the RNA donor sequence is converted to circular double-stranded DNA in cells.

[0030] In some aspects, provided herein is a method for modifying a genome in a cell, the method comprising: contacting the cell with a polynucleotide encoding a serine recombinase enzyme having at least 70% identity to any one of the amino acid sequences of SEQ ID NOs: 1-774, a DNA recognition sequence comprising a first and a second attachment site; and a heterologous DNA sequence; wherein the serine recombinase enzyme mediates site-specific recombination between the first and the second attachment site causing integration of heterologous DNA, thereby modifying the genome.

[0031] In some embodiments, at least one DNA recognition site is a pseudo attachment site. In some embodiments, one or more DNA recognition sites is an engineered site. In some embodiments, the first and second attachment sites are attP or attB sites. In some embodiments, the attB site is in a target genome and the attP site sequence is in an integrative vector. In some embodiments, the attP site sequence is in a target genome and the attB site sequence is in an integrative vector.

[0032] In some embodiments, the site-specific recombination occurs at one or more sites in the cell.

[0033] In some embodiments, the site-specific recombination occurs at a single site in the cell.

[0034] In some embodiments, the site-specific recombination results in expression of a heterologous gene.

[0035] In some embodiments, the recombination is carried out in a mammalian cell. In some embodiments, the recombination is carried out in a human cell.

[0036] In some embodiments, the recombination is carried out in a cell line. In some embodiments, the recombination is carried out in a primary cell.

[0037] In some embodiments, the recombination is carried out in a non-dividing cell.

[0038] In some embodiments, the recombination is carried out in a dividing cell.

[0039] In some embodiments, the recombination is carried out in immune cells, such as T cells, B cells, macrophages, NK cells, etc., stem cells, progenitor cells, or cancer cells.

[0040] In some embodiments, the recombination is carried out in vivo. In some embodiments, the in vivo recombination treats a genetic disease by repairing a genetic deficiency and/or restoring a functional gene. In some embodiments, the in vivo recombination treats a cancer by delivering a lethal or conditional lethal gene. In some embodiments, the in vivo recombination results in genome editing by introducing one or more enzymes selected from a group consisting of a Cas enzyme, a base editor, deaminase and a reverse transcriptase.

[0041] In some embodiments, the serine recombinase directs stable integration of the heterologous DNA. In some embodiments, the serine recombinase directs reversible integration of the heterologous DNA. In some embodiments, the heterologous DNA further comprises a Recombinase Directionality Factor (RDF) leading to excision of integrated DNA from the genome.

[0042] In some embodiments, the expression of large serine recombinase in the present system is regulated by a promoter. In some embodiments; the promoter is constitutive or inducible. In some embodiments; the promoter is constitutive. In some embodiments, the promoter is inducible. In some embodiments, the promoter sequence is a eukaryotic or viral promoter.

[0043] In some embodiments, the heterologous DNA integrated is between about 100 bp to about 20 kb in length, 1 kb to 10 kb in length, or 2 kb to 10 kb in length, or 2 kb to 40 kb in length.

[0044] In some embodiments, the present invention provides an engineered cell produced by the methods described herein.

[0045] In some embodiments, provided herein is a method of treating a genetic disease or cancer, wherein the engineered cell is administered to a patient in need thereof.

[0046] In some embodiments, the attP attachment site comprises between 30 to 75 contiguous nucleotides from any one of SEQ ID NOs: 1549-2322, corresponding to its cognate LSR sequence as described in Table 3.

### BRIEF DESCRIPTION OF THE DRAWING

[0047] Drawings are for illustration purposes only; not for limitation.

[0048] FIG. 1A is a graph that shows recombination or integration activity of exemplary large serine recombinases by relative GFP expression.

[0049] FIG. 1B is a graph that shows identification of exemplary pseudo attB sites in the human genome.

[0050] FIG. 2 is a graph that shows percent integration as GFP positive cells, in cells treated with varying amounts of plasmid donor (e.g., 50 ng or 200 ng) and varying amounts of LSR mRNA (e.g., 0, 10, 25, 50, 100 or 200 ng).

[0051] FIG. 3 is a graph that shows percent integration as GFP positive cells, in cells treated with varying amounts of LSR mRNA (0, 100, 250, 500, 1000 or 2000 ng) and DNA donor (e.g., 1 μg, 2 μg or 3 μg).

[0052] FIG. 4 is a graph that shows percent integration as GFP positive cells, in cells treated with varying amounts of LSR mRNA (2 μg) and donor DNA (e.g. 0.25 μg, 0.5 μg, 1 μg, 2 μg).

### DETAILED DESCRIPTION

### Definitions

[0053] In order for the present invention to be more readily understood, certain terms are first defined below. Additional definitions for the following terms and other terms are set forth throughout the specification.

[0054] A or An: The articles “a” and “an” are used herein to refer to one or to more than one (i.e., to at least one) of the grammatical object of the article. By way of example, “an element” means one element or more than one element.

[0055] Approximately or about: As used herein, the term “approximately” or “about,” as applied to one or more values of interest, refers to a value that is similar to a stated reference value. In certain embodiments, the term “approximately” or “about” refers to a range of values that fall within 25%, 20%, 19%, 18%, 17%, 16%, 15%, 14%, 13%, 12%, 11%, 10%, 9%, 8%, 7%, 6%, 5%, 4%, 3%, 2%, 1%, or less in either direction (greater than or less than) of the stated reference value unless otherwise stated or otherwise evident from the context (except where such number would exceed 100% of a possible value).

[0056] Associated with: Two events or entities are “associated” with one another, as that term is used herein, if the presence, level and/or form of one is correlated with that of the other. For example, a particular entity (e.g., polypeptide) is considered to be associated with a particular disease, disorder, or condition, if its presence, level and/or form correlates with incidence of and/or susceptibility to the disease, disorder, or condition (e.g., across a relevant population). In some embodiments, two or more entities are physically “associated” with one another if they interact, directly or indirectly, so that they are and remain in physical proximity with one another. In some embodiments, two or more entities that are physically associated with one another are covalently linked to one another; in some embodiments, two or more entities that are physically associated with one another are not covalently linked to one another but are non-covalently associated, for example by means of hydrogen bonds, van der Waals interaction, hydrophobic interactions, magnetism, and combinations thereof.

[0057] Biologically active: As used herein, the phrase “biologically active” refers to a characteristic of any agent that has activity in a biological system, and particularly in an organism. For instance, an agent that, when administered to an organism, has a biological effect on that organism, is considered to be biologically active. In particular embodiments, where a peptide is biologically active, a portion of that peptide that shares at least one biological activity of the peptide is typically referred to as a “biologically active” portion.

[0058] Base editor: By “base editor (BE),” or “nucleobase editor (NBE)” is meant an agent that binds a polynucleotide and has nucleobase modifying activity. In various embodiments, the base editor comprises a nucleobase modifying polypeptide (e.g., a deaminase) and a polynucleotide programmable nucleotide binding domain in conjunction with a guide polynucleotide (e.g., guide RNA). The base editor has base editing activity, i.e., a domain capable of modifying a base (e.g., A, T, C, G, or U) within a nucleic acid molecule (e.g., DNA). In some embodiments, the base editor is capable of deaminating one or more bases within a DNA molecule. In some embodiments, the base editor is capable of deaminating a cytosine (C) or an adenosine (A) within DNA. In some embodiments, the base editor is capable of deaminating a cytosine (C) and an adenosine (A) within DNA. In some embodiments, the base editor is a cytidine base editor (CBE). In some embodiments, the base editor is an adenosine base editor (ABE). In some embodiments, the base editor is an adenosine base editor (ABE) and a cytidine base editor (CBE). In some embodiments, the base editor is a nuclease-inactive Cas9 (dCas9) fused to an adenosine deaminase. In some embodiments, the base editor is fused to an inhibitor of base excision repair, for example, a UGI domain, or a dISN domain. In some embodiments, the fusion protein comprises a Cas9 nickase fused to a deaminase and an inhibitor of base excision repair, such as a UGI or dISN domain. In other embodiments the base editor is an abasic base editor. Details of base editors are described in International PCT Application Nos. PCT/2017/045381 (WO2018/027078) and PCT/US2016/058344 (WO2017/070632), each of which is incorporated herein by reference for its entirety.

[0059] Base editing activity: As used herein the term “base editing activity” is meant acting to chemically alter a base within a polynucleotide. In one embodiment, a first base is converted to a second base. In one embodiment, the base editing activity is cytidine deaminase activity, e.g., converting target C⋅G to T⋅A. In another embodiment, the base editing activity is adenosine or adenine deaminase activity, e.g., converting A⋅T to G⋅C. In another embodiment, the base editing activity is cytosine or cytidine deaminase activity, e.g., converting target C⋅G to T⋅A and adenosine or adenine deaminase activity, e.g., converting A⋅T to G⋅C.

[0060] Cleavage: As used herein, cleavage refers to a break in a target nucleic acid created by a nuclease of a CRISPR system described herein. In some embodiments, the cleavage event is a double-stranded DNA break. In some embodiments, the cleavage event is a single-stranded DNA break. In some embodiments, the cleavage event is a single-stranded RNA break. In some embodiments, the cleavage event is a double-stranded RNA break.

[0061] Complementary: As used herein, complementary refers to a nucleic acid strand that forms Watson-Crick base pairing, such that A base pairs with T, and C base pairs with G, or non-traditional base pairing with bases on a second nucleic acid strand. In other words, it refers to nucleic acids that hybridize with each other under appropriate conditions.

[0062] Enzyme: The term “enzyme” as defined herein encompasses native as well as modified enzymes. The term “native” as used herein refers to a material recovered from a source in nature as distinct from material artificially modified or altered by man in the laboratory. For example, a native enzyme is encoded by a gene that is present in the genome of a wild-type organism or cell. By contrast, a modified or engineered enzyme is encoded by a nucleic acid molecule that has been modified in the laboratory so as to differ from the native polypeptide, e.g. by insertion, deletion or substitution of one or more amino acid(s) or any combination of these possibilities. A genome modifying enzyme refers to any enzyme that can modify a genome in a host organism and/or a host cell.

[0063] Ex Vivo: As used herein, the term “ex vivo” refers to events that occur in cells or tissues, grown outside rather than within a multi-cellular organism.

[0064] Functional equivalent or analog: As used herein, the term “functional equivalent” or “functional analog” denotes, in the context of a functional derivative of an amino acid sequence, a molecule that retains a biological activity (either function or structural) that is substantially similar to that of the original sequence. A functional derivative or equivalent may be a natural derivative or is prepared synthetically. Exemplary functional derivatives include amino acid sequences having substitutions, deletions, or additions of one or more amino acids, provided that the biological activity of the protein is conserved. The substituting amino acid desirably has chemico-physical properties which are similar to that of the substituted amino acid. Desirable similar chemico-physical properties include, similarities in charge, bulkiness, hydrophobicity, hydrophilicity, and the like.

[0065] Improve, increase, or reduce: As used herein, the terms “improve,” “increase” or “reduce,” or grammatical equivalents, indicate values that are relative to a baseline measurement, such as a measurement in the same individual prior to initiation of the treatment described herein, or a measurement in a control subject (or multiple control subject) in the absence of the treatment described herein. A “control subject” is a subject afflicted with the same form of disease as the subject being treated, who is about the same age as the subject being treated.

[0066] Inhibition: As used herein, the terms “inhibition,” “inhibit” and “inhibiting” refer to processes or methods of decreasing or reducing activity and/or expression of a protein or a gene of interest. Typically, inhibiting a protein or a gene refers to reducing expression or a relevant activity of the protein or gene by at least 10% or more, for example, 20%, 30%, 40%, or 50%, 60%, 70%, 80%, 90% or more, or a decrease in expression or the relevant activity of greater than 1-fold, 2-fold, 3-fold, 4-fold, 5-fold, 10-fold, 50-fold, 100-fold or more as measured by one or more methods described herein or recognized in the art.

[0067] Genome modification: As used herein, the term “modification” or “modifying’ or “modified” when applied to nucleic acid sequences, refers to any change to the sequences within the genome, such as single nucleotide variant (SNV), insertion, deletion, site specific recombination, substitution, chromosomal translocation and structural variation (SV), etc. For example, in terms of insertion, the sequence modification may be the integration of a transgene into a target genomic site. For example, for a target genomic sequence, the donor DNA comprises a sequence complementary, identical, or homologous to the target genomic sequence and a sequence modification region.

[0068] Hybridization: As used herein, the term “hybridization” refers to a reaction in which two or more nucleic acids bind with each other via hydrogen bonding by Watson-Crick pairing, Hoogstein binding or other sequence-specific binding between the bases of the two nucleic acids. A sequence capable of hybridizing with another sequence is termed the “complement” of the sequence, and is said to be “complementary” or show “complementarity”.

[0069] Indel: As used herein, the term “indel” refers to insertion or deletion of bases in a nucleic acid sequence. It commonly results in mutations and is a common form of genetic variation.

[0070] In Vitro: As used herein, the term “in vitro” refers to events that occur in an artificial environment, e.g., in a test tube or reaction vessel, in cell culture, etc., rather than within a multi-cellular organism.

[0071] In Vivo: As used herein, the term “in vivo” refers to events that occur within a multi-cellular organism, such as a human and a non-human animal. In the context of cell-based systems, the term may be used to refer to events that occur within a living cell (as opposed to, for example, in vitro systems).

[0072] Large serine recombinase: As used herein, the large serine recombinases (LSRs) are a family of enzymes, often encoded in temperate phage genomes or on mobile elements. Large serine recombinases can catalyze the movement of DNA elements into and out of a host genome (e.g., bacterial chromosomes) using site-specific recombination between short DNA “attachment sites” such as the attachment sites in the phage genome (attP site) and the attachment sites in the bacterial genome (attB site), allowing precisely to cut and recombine DNA in a highly controllable and predictable way.

[0073] Linker: The term “linker” refers to any means, entity or moiety used to join two or more entities. In some embodiments, the linker is a covalent linker. In some embodiments, the linker is a non-covalent linker. Examples of covalent linkers include covalent bonds or a linker moiety covalently attached to one or more of the proteins or domains to be linked, In some embodiments, the linker is a non-covalent bond, e.g., an organometallic bond through a metal center such as platinum atom. The joining can be permanent or reversible. For covalent linkages, various functionalities can be used, such as amide groups, including carbonic acid derivatives, ethers, esters, including organic and inorganic esters, amino, urethane, urea and the like. To provide for linking, the domains can be modified by oxidation, hydroxylation, substitution, reduction etc. to provide a site for coupling. Methods for conjugation are well known by persons skilled in the art and are encompassed for use in the present invention. Linker moieties include, but are not limited to, chemical linker moieties, or for example a peptide linker moiety (a linker sequence). It will be appreciated that modification which do not significantly decrease the function of the RNA-binding domain and effector domain are preferred.

[0074] Mutation: As used herein, the term “mutation” has the ordinary meaning in the art, and includes, for example, point mutations, substitutions, insertions, deletions, inversions, and deletions.

[0075] Oligonucleotide: As used herein, the term “oligonucleotide” generally refers to polynucleotides of between about 5 and about 100 nucleotides of single-or double-stranded DNA. Oligonucleotides are also known as “oligomers” or “oligos” and may be isolated from genes, or chemically synthesized.

[0076] Polypeptide: The term “polypeptide” as used herein refers to a sequential chain of amino acids linked together via peptide bonds. The term is used to refer to an amino acid chain of any length, but one of ordinary skill in the art will understand that the term is not limited to lengthy chains and can refer to a minimal chain comprising two amino acids linked together via a peptide bond. As is known to those skilled in the art, polypeptides may be processed and/or modified. As used herein, the terms “polypeptide” and “peptide” are used inter-changeably.

[0077] Prevent: As used herein, the term “prevent” or “prevention”, when used in connection with the occurrence of a disease, disorder, and/or condition, refers to reducing the risk of developing the disease, disorder and/or condition.

[0078] Protein: The term “protein” as used herein refers to one or more polypeptides that function as a discrete unit. If a single polypeptide is the discrete functioning unit and does not require permanent or temporary physical association with other polypeptides in order to form the discrete functioning unit, the terms “polypeptide” and “protein” may be used interchangeably. If the discrete functional unit is comprised of more than one polypeptide that physically associate with one another, the term “protein” refers to the multiple polypeptides that are physically coupled and function together as the discrete unit.

[0079] Recombination: As used herein the term “recombination” or “recombination reaction” refers to a change of a nucleic acid molecule including, for example, one or more nucleic acid strand breaks (e.g., a double-strand break), followed by joining of two nucleic acid strand ends (e.g., sticky ends). In some instances, the recombination reaction comprises insertion of an insert nucleic acid, e.g., into a target site, e.g., in a genome or a construct. In some instances, the recombination reaction comprises flipping or reversing of a nucleic acid, e.g., in a genome or a construct. In some instances, the recombination reaction comprises removing a nucleic acid, e.g., from a genome or a construct.

[0080] Recognition sequence: A recognition sequence (e.g., DNA recognition sequence) generally refers to a nucleic acid (e.g., DNA) sequence that is recognized (e.g., capable of being bound by) a genome modifying enzyme, e.g., a serine recombinase. In the context of serine recombinase, a recognition sequence comprises two recognition sequences, one that is positioned in the integration site (the site into which a nucleic acid is to be integrated) and another adjacent a nucleic acid of interest to be introduced into the integration site. The recognition sequences are generically referred to as attP and attB. Recognition sequences can be native or altered relative to a native sequence. The recognition sequence may vary in length, but typically ranges from about 20 nt to about 200 nt, from about 30 to 90 nt, more usually from 30 to 70 nt. In some embodiments, the attP attachment site comprises between 30 to 75 contiguous nucleotides.

[0081] Subject: The term “subject”, as used herein, means any subject for whom diagnosis, prognosis, or therapy is desired. For example, a subject can be a mammal, e.g., a human or non-human primate (such as an ape, monkey, orangutan, or chimpanzee), a dog, cat, guinea pig, rabbit, rat, mouse, horse, cattle, or cow.

[0082] Substantial identity: The phrase “substantial identity” is used herein to refer to a comparison between amino acid or nucleic acid sequences. As will be appreciated by those of ordinary skill in the art, two sequences are generally considered to be “substantially identical” if they contain identical residues in corresponding positions. As is well known in this art, amino acid or nucleic acid sequences may be compared using any of a variety of algorithms, including those available in commercial computer programs such as BLASTN for nucleotide sequences and BLASTP, gapped BLAST, and PSI-BLAST for amino acid sequences. Exemplary such programs are described in Altschul, et al., Basic local alignment search tool, J. Mol. Biol., 215(3): 403-410, 1990; Altschul, et al., Methods in Enzymology; Altschul et al., Nucleic Acids Res. 25:3389-3402, 1997; Baxevanis et al., Bioinformatics: A Practical Guide to the Analysis of Genes and Proteins, Wiley, 1998; and Misener, et al., (eds.), Bioinformatics Methods and Protocols (Methods in Molecular Biology, Vol. 132), Humana Press, 1999. In addition to identifying identical sequences, the programs mentioned above typically provide an indication of the degree of identity. In some embodiments, two sequences are considered to be substantially identical if at least 50%, 55%, 60%, 65%, 70%, 75%, 80%, 85%, 90%, 91%, 92%, 93%, 94%, 95%, 96%, 97%, 98%, 99% or more of their corresponding residues are identical over a relevant stretch of residues. In some embodiments, the relevant stretch is a complete sequence. In some embodiments, the relevant stretch is at least 10, 15, 20, 25, 30, 35, 40, 45, 50, 55, 60, 65, 70, 75, 80, 85, 90, 95, 100, 125, 150, 175, 200, 225, 250, 275, 300, 325, 350, 375, 400, 425, 450, 475, 500 or more residues.

[0083] The terms “specific” or “specificity” as used herein refers to the property of having a degree of preference for recognizing, binding, hybridizing, recombining, or reacting with a desired target or substrate versus one or more non-desired targets or substrates under the conditions tested or specified. In general, the terms “specific for” or having “specificity for” is used to refer to a preference of at least 50% for the desired target or substrate versus two or more non-desired targets or substrates collectively.

[0084] Target Nucleic Acid: The term “target nucleic acid” as used herein refers to nucleotides of any length (oligonucleotides or polynucleotides) to which the large serine recombinase system binds. Target nucleic acids may have three-dimensional structure, may including coding or non-coding regions, may include exons, introns, mRNA, tRNA, rRNA, siRNA, shRNA, miRNA, ribozymes, cDNA, plasmids, vectors, exogenous sequences, endogenous sequences. A target nucleic acid can comprise modified nucleotides, include methylated nucleotides, or nucleotide analogs. A target nucleic acid may be interspersed with non-nucleic acid components. A target nucleic acid is not limited to, single-, double-, or multi-stranded DNA or RNA, genomic DNA, cDNA, DNA-RNA hybrids, or a polymer comprising purine and pyrimidine bases or other natural, chemically or biochemically modified, non-natural, or derivatized nucleotide bases.

[0085] Therapeutically effective amount: As used herein, the term “therapeutically effective amount” refers to an amount of a therapeutic molecule (e.g., an engineered LSR described herein) which confers a therapeutic effect on a treated subject, at a reasonable benefit/risk ratio applicable to any medical treatment. The therapeutic effect may be objective (i.e., measurable by some test or marker) or subjective (i.e., subject gives an indication of or feels an effect). In particular, the “therapeutically effective amount” refers to an amount of a therapeutic molecule or composition effective to treat, ameliorate, or prevent a particular disease or condition, or to exhibit a detectable therapeutic or preventative effect, such as by ameliorating symptoms associated with the disease, preventing or delaying the onset of the disease, and/or also lessening the severity or frequency of symptoms of the disease. A therapeutically effective amount can be administered in a dosing regimen that may comprise multiple unit doses. For any particular therapeutic molecule, a therapeutically effective amount (and/or an appropriate unit dose within an effective dosing regimen) may vary, for example, depending on route of administration, on combination with other pharmaceutical agents. Also, the specific therapeutically effective amount (and/or unit dose) for any particular subject may depend upon a variety of factors including the disorder being treated and the severity of the disorder; the activity of the specific pharmaceutical agent employed; the specific composition employed; the age, body weight, general health, sex and diet of the subject; the time of administration, route of administration, and/or rate of excretion or metabolism of the specific therapeutic molecule employed; the duration of the treatment; and like factors as is well known in the medical arts.

[0086] Treatment: As used herein, the term “treatment” (also “treat” or “treating”) refers to any administration of a therapeutic molecule (e.g., a Site specific recombinase protein or system described herein) that partially or completely alleviates, ameliorates, relieves, inhibits, delays onset of, reduces severity of and/or reduces incidence of one or more symptoms or features of a particular disease, disorder, and/or condition. Such treatment may be of a subject who does not exhibit signs of the relevant disease, disorder and/or condition and/or of a subject who exhibits only early signs of the disease, disorder, and/or condition. Alternatively or additionally, such treatment may be of a subject who exhibits one or more established signs of the relevant disease, disorder and/or condition.

### Site-Specific Recombinases

[0087] Site specific recombinases catalyze breaking and rejoining of DNA strands at specific locations in a genome, thereby bringing about precise genetic rearrangements. Using recombinase-medicated genetic rearrangements benefits the understanding of genetic mechanisms of diseases and advances gene therapy as well. There are two large families of site specific recombinases: serine recombinases and tyrosine recombinases. Serine recombinases precisely manipulate genomic sequences and DNA molecules.

[0088] Serine recombinases (such as large serine recombinases) can be found in many bacteriophages and bacterial genomes. The identification of novel large serine recombinases with specificity for unique attachment sites (attP and attB) allows for the expansion of the available tools for genome modulation, allowing for precise targeting of diverse sites. The present invention is based, in part, on the surprising discovery that novel serine recombinase enzymes isolated from different phage genomes, coupled with specific attachment sequences (e.g., attP), which recognize cognate attachment sites in the host genome (e.g., attB) can be engineered for expression in eukaryotic cells (e.g., human, plant, etc.). Accordingly, the described serine recombinase enzymes and their variants are functional in eukaryotes. Described herein is use of engineered serine recombinase enzymes in human cells with diverse attP or attB recognition sequences to target various genomic sites and integrate or recombine heterologous genes. Additionally, the present invention provides methods of use of newly identified LSRs for genome modifications in connection with gene therapy.

[0089] In some embodiments, the attP site comprises between 30 to 75 contiguous nucleotides from any one of SEQ ID NOs: 1549-2322, corresponding to its cognate LSR sequence as described in Table 3.

[0090] Accordingly, a system comprising a large serine recombinase (LSR) is provided in the present invention; the LSR system can be used for modifying a DNA sequence in a genome. In some aspects, the system comprises: (a) a large serine recombinase having at least 70% identity to any one of the amino acid sequences of SEQ ID NOs: 1-774; (b) a DNA recognition sequence comprising an attP and/or an attB site; and/or (c) a heterologous DNA sequence. Methods of use of the present LSRs and LSR containing systems to modify a host genome (e.g., a host cell) are also provided. In some aspects, the method comprises introducing into the host cell a LSR or a system comprising a LSR as described herein and a heterologous nucleic acid sequence.

### Large Serine Recombinases

[0091] In some aspects, the enzyme of the system for modifying a nucleic acid sequence in a genome is a serine recombinase, e.g., a large serine recombinase (LSR). The terms “large serine recombinases” also refers to “serine integrases” interchangeably. The large serine recombinase can be derived from any suitable organism, such as viruses, bacteria including bacteriophages that infect bacteria, archaea, fungi, mammals including human (e.g., human microbiomes). Described herein are large serine recombinase proteins obtained from phages or bacterial genomes. In some embodiments, the large serine recombinase is identified from a bacteriophage.

[0092] Accordingly, the present invention provides serine recombinase polypeptides (e.g., any one of SEQ ID NOs: 1-774) that can be used to modify or manipulate a DNA sequence, e.g., by recombining two DNA sequences comprising cognate recognition sequences (e.g., attP or attB sequences) that can be bound by the recombinase polypeptide. In some embodiments, the large serine recombinase described herein comprises an amino acid sequence having at least 70% (e.g., 70%, 75%, 80%, 81%, 82%, 83%, 84%, 85%, 86%, 87%, 88%, 89%, 90%, 91%, 92%, 93%, 94%, 95%, 96%, 97%, 98%, 99% or more) identity to any one of SEQ ID NOs: 1-774. In some embodiments, a large serine recombinase described herein comprises an amino acid sequence having at least 70% identity to any one of SEQ ID NOs: 1-774. In some embodiments, a large serine recombinase described herein comprises an amino acid sequence having at least 75% identity to any one of SEQ ID NOs: 1-774. In some embodiments, a large serine recombinase described herein comprises an amino acid sequence having at least 80% identity to any one of SEQ ID NOs: 1-774. In some embodiments, a large serine recombinase described herein comprises an amino acid sequence having at least 85% identity to any one of SEQ ID NOs: 1-774. In some embodiments, a large serine recombinase described herein comprises an amino acid sequence having at least 90% identity to any one of SEQ ID NOs: 1-774. In some embodiments, a large serine recombinase described herein comprises an amino acid sequence having at least 95% identity to any one of SEQ ID NOs: 1-774. In some embodiments, a large serine recombinase described herein comprises an amino acid sequence having at least 96% identity to any one of SEQ ID NOs: 1-774. In some embodiments, a large serine recombinase described herein comprises an amino acid sequence having at least 97% identity to any one of SEQ ID NOs: 1-774. In some embodiments, a large serine recombinase described herein comprises an amino acid sequence having at least 98% identity to any one of SEQ ID NOs: 1-774. In some embodiments, a large serine recombinase described herein comprises an amino acid sequence having at least 99% identity to any one of SEQ ID NOs: 1-774. In some embodiments, the amino acid sequence of a large serine recombinase protein is identical to any one of SEQ ID NOs: 1-774.

[0093] In some embodiments, a variant of a large serine recombinase as described herein is provided. In some embodiments, the variant comprises an amino acid substitution or chemical modifications of one or more amino acids. In other embodiments, the variant comprises the catalytic domain of a large serine recombinase as described herein. In some exemplary embodiments, a variant of a large serine recombinase comprises a truncation at the N-terminus, C-terminus, or both the N- and C-termini relative to the amino acid sequence of any one of SEQ ID NOs: 1-774. In some embodiments, the truncated variant has 1, 2, 3, 4, 5, 6, 7, 8, 9, 10, 15, 20, 25, 30, 35, 40, 45, or 50 amino acids deleted from the N-terminus or the C-terminus.

[0094] In some embodiments, a recombinase described herein is fused to a heterologous domain, e.g., a heterologous DNA binding domain to form a recombinant enzyme. In some embodiments, a recombinase is fused to a heterologous DNA binding domain, e.g., a DNA binding domain from a zinc finger, TAL, meganuclease, transcription factor, or sequence-guided DNA binding element. In some embodiments, a recombinase is fused to a DNA binding domain from a sequence-guided DNA binding element, e.g., a CRISPR-associated (Cas) DNA binding element, e.g., a Cas9.

[0095] In some embodiments, the sequences of any one of SEQ ID NOs: 1-1548 further comprise a nuclear localization sequence (NLS). In some embodiments, the NLS sequence is a prefix sequence preceding SEQ ID NOs: 1-774 and SEQ ID NOs.: 775-1548. In some embodiments, the NLS comprises a sequence having 70%, 75%, 80%, 85%, 90%, 95%, 99% or greater identity to GCCACCATGCCCAAGAAGAAGCGGAAGGTT (SEQ ID NO: 2323). In some embodiments, the NLS consists of a sequence having 100% identity to SEQ ID NO: 2323.

[0096] In some embodiments, any one of sequences in SEQ ID NOs: 1-1548 further comprise a sequence comprising an NLS, SV40 transcriptional terminator, sequences flanking the LSR sequence, comprising upstream and downstream sequences comprising attP or attB sites separated by a spacer. In some embodiments, the sequences further comprise a barcode sequence. In some embodiments, the attP (or attB) site within the flanking sequence is about 30-75 bp in length. In some embodiments, the attP (or attB) site comprises at least about 30-75 bp from SEQ ID NOs: 1549-2322.

[0097] In some embodiments, the present invention provides a polynucleotide sequence that encodes any one of the large serine recombinases described herein. A representative nucleic acid sequence for each large serine recombinase (LSR) can be found in any one of SEQ ID NOs.: 775-1548.

[0098] In some embodiments, the large serine recombinase described herein is encoded by a polynucleotide having a nucleic acid sequence at least 70% (e.g., 70%, 75%, 80%, 81%, 82%, 83%, 84%, 85%, 86%, 87%, 88%, 89%, 90%, 91%, 92%, 93%, 94%, 95%, 96%, 97%, 98%, 99% or more) identical to any one of SEQ ID NO: 775-1548. In some embodiments, a large serine recombinase described herein is encoded by a polynucleotide having a nucleic acid sequence at least 70% identical to any one of SEQ ID NOs.: 775-1548. In some embodiments, a large serine recombinase described herein is encoded by a polynucleotide having a nucleic acid sequence at least 75% identical to any one of SEQ ID NOs.: 775-1548. In some embodiments, a large serine recombinase described herein is encoded by a polynucleotide having a nucleic acid sequence at least 80% identical to any one of SEQ ID NOs.: 775-1548. In some embodiments, a large serine recombinase described herein is encoded by a polynucleotide having a nucleic acid sequence at least 85% identical to any one of SEQ ID NOs.: 775-1548. In some embodiments, a large serine recombinase described herein is encoded by a polynucleotide having a nucleic acid sequence at least 90% identical to any one of SEQ ID NOs.: 775-1548. In some embodiments, a large serine recombinase described herein is encoded by a polynucleotide having a nucleic acid sequence at least 95% identical to any one of SEQ ID NOs.: 775-1548. In some embodiments, a large serine recombinase described herein is encoded by a polynucleotide having a nucleic acid sequence of any one of SEQ ID NOs.: 775-1548.

[0099] In some embodiments, the polynucleotide encoding a large serine recombinase of the present invention is codon optimized. Various species exhibit codon bias (i.e. differences in codon usage by organisms) which correlates with the efficiency of translation of messenger RNA (mRNA) by utilizing codons in mRNA that correspond with the abundance of tRNA species for that codon in a particular organism. Various methods in the art can be used for computer optimization, including for example through use of software. In some embodiments, codon optimization refers to modification of nucleic acid sequences for enhanced expression in the host cells of interest by replacing at least one codon (e.g. 1, 2, 3, 4, 5, 10, 15, 20, 25, 50 or more codons) of the native sequence with codons that are more frequently used or most frequently used in the genes of the host cell while maintaining the native amino acid sequence. This type of optimization is known in the art and entails the mutation of foreign-derived DNA to mimic the codon preferences of the intended host organism or cell while encoding the same protein. Thus, the codons are changed, but the encoded protein remains unchanged. Codon optimization improves soluble protein levels and increases activity and editing efficiency in a given species. Codon optimization also results in increased translation and protein expression.

[0100] In some embodiments, the large serine recombinase protein is codon optimized for expression in eukaryotic cells. In some embodiments, the large serine recombinase protein is codon optimized for expression in human cells. In some embodiments, the large serine recombinase protein is codon optimized for expression in human immune cells. In some embodiments, the large serine recombinase protein is codon optimized for expression in human T-cells.

[0101] In some embodiments, the LSR encoding polynucleotide comprises at least one nucleotide modification, including any chemical modifications, e.g., modification of nucleosides and sugar subunits.

[0102] In some embodiments, the large serine recombinase is a recombinant polypeptide variant. In some embodiments, a LSR variant comprises a modified catalytic domain, or a modified nucleic acid binding domain, or a combination of the above. In some embodiments, a LSR variant comprises a catalytic domain of any one of the large serine recombinases of any one of SEQ ID NOs: 1-774. In some embodiments, the LSR recombinant polypeptide comprises at least one substitution of amino acid residues of any one of SEQ ID Nos: 1-774.

[0103] In some embodiments, a LSR variant comprises a catalytic domain encoded by the polynucleotide sequence of any one of the large serine recombinases in SEQ ID NOs: 775-1548.

[0104] In some embodiments, the LSR variant is a recombinant polypeptide that comprises a domain that contains recombinase activity derived from any one of SEQ ID Nos: 1-774, and a DNA binding domain that binds to or is capable of binding to a recognition sequence. In other embodiments, the LSR variant is a recombinant polypeptide that comprises a domain that contains recombinase activity and a DNA binding domain derived from any one of SEQ ID Nos: 1-774, that binds to or is capable of binding to a recognition sequence.

[0105] In some embodiments, the LSR variant is a recombinant polypeptide that comprises a domain that contains recombinase activity derived from any one of codon-optimized polynucleotide sequences provided in SEQ ID Nos: 775-1548, and a DNA binding domain that binds to or is capable of binding to a recognition sequence. In other embodiments, the LSR variant is a recombinant polypeptide that comprises a domain that contains recombinase activity and a DNA binding domain derived from any one of codon-optimized polynucleotide sequences provided in SEQ ID Nos: 775-1548, that binds to or is capable of binding to a recognition sequence.

[0106] In some embodiments, a large serine recombinase is fused to nuclear localization sequences, including, but not limited to, an NLS of the SV40 large T antigen, nucleoplasmin, c-myc, hRNPA1 M9, IBB domain from importin-alpha, NLS of myoma T protein, human p53, c-abl IV, influenza virus NS1, hepatitis virus delta antigen, mouse Mx1, human poly(ADP-ribose) polymerase, steroid hormone receptor (human) glucocorticoid. In some embodiments, the NLS is fused to the N-terminus of a LSR or variant thereof. In some embodiments, the NLS is fused to the C-terminus of a LSR or variant thereof. In some embodiments, a large serine recombinase protein is fused to epitope tags including, but not limited to, hemagglutinin (HA) tags, histidine (His) tags, FLAG tags, Myc tags, V5 tags, VSV-G tags, SNAP tags, thioredoxin (Trx) tags.

[0107] In some embodiments, a large serine recombinase is fused to reporter genes including, but not limited to, glutathione-S-transferase (GST), horseradish peroxidase (HRP), chloramphenicol transferase (CAT), HcRed, DsRed, cyan fluorescent protein, yellow fluorescent protein and blue fluorescent protein, green fluorescent protein (GFP), including enhanced versions or superfolded GFP, as well as other modified versions of reporter genes.

[0108] In some embodiments, serum half-life of an engineered large serine recombinase protein is increased by fusion with heterologous proteins including, but not limited to, a human serum albumin protein, transferrin protein, human IgG and/or sialylated peptide, such as the carboxy-terminal peptide (CTP, of chorionic gonadotropin β chain).

[0109] In some embodiments, serum half-life of an engineered large serine recombinase protein is decreased by fusion with destabilizing domains, including, but not limited to, geminin, ubiquitin, FKBP12-L106P, and/or dihydrofolate reductase.

### Determination of LSR Activity

[0110] In accordance with the present invention, a novel LSR polypeptide can be validated using any methods known in the art. In some embodiments, a LSR is tested using a two-vector system in which the LSR enzyme is expressed in an expressing vector and the specific recognition site sequences that is recognizable by the LSR and donor nucleic acid molecule are included in a separated vector. In other embodiments, a novel

[0111] LSR polypeptide can be validated using a single one vector system in which the LSR and its recognition site sequences are integrated in a single vector; the detailed description of the one-vector for identifying an active large serine recombinase is described in detail in the applicant's copending patent application.

### Attachment Sites (AttP or AttB)

[0112] Large serine recombinases or integrases carry out recombination between attachment sites on the phage and bacterial genomes (i.e., target genomes), known as attP and attB, respectively. Each large serine recombinase binds to its target sequence only in the presence of a specific sequence, known as an attachment site in the target genome such as a bacterial genome (attB). Large serine recombinases isolated from different phage or bacterial species recognize (i.e., bind to) different attP or attB sequences. Thus, locations in the genome that can be targeted by different large serine recombinase proteins are limited by the locations of unique attP or attB sequences, leading to specificity of genome modification.

[0113] Accordingly, in some aspects, the LSR system as described herein comprises a recognition site sequence to which the LSR in the system specifically binds. The recognition site sequence, in some embodiments, comprises an attP site sequence. In some embodiment, the recognition sequence comprises an attB site sequence. In other embodiments, the recognition sequence comprises an attP sequence and an attB sequence.

[0114] In some embodiments, the recognition site sequence comprises about 10-200 nucleotides (nt), about 20-200 nt, about 20-150 nt, about 20-100 nt, about 20-80 nt, 25-150 nt, 25-100 nt, 25-80 nt, 30-150 nt, 30-100 nt, or 30-75 nt. In some embodiments, the recognition site sequence comprises about 30-75 nt. In some examples, the recognition site sequence comprises about 20 nt, 21 nt, 22 nt, 23 nt, 24 nt, 25 nt, 26 nt, 27 nt, 28 nt, 29 nt, 30 nt, 31 nt, 32 nt, 33 nt, 34 nt, 35 nt, 36 nt, 37 nt, 38 nt, 39nt, 40 nt, 41 nt, 42 nt, 43 nt, 44 nt, 45 nt, 46 nt, 47 nt, 48 nt, 49 nt, 50 nt, 51 nt, 52 nt, 53 nt, 54 nt, 55 nt, 56 nt, 57 nt, 58 nt, 59 nt, 60 nt, 61 nt, 62 nt, 63 nt, 64 nt, 65 nt, 66 nt, 67 nt, 68 nt, 69 nt, 70 nt, 71 nt, 72 nt, 73 nt, 74 nt, 75 nt, 80 nt, 85 nt, 90 nt, 95 nt or 100 nt.

[0115] In some embodiments, the specific attP sequence is a sequence located within about 500 base pairs flanking the coding sequence of the large serine recombinase in the phage genome. In some embodiments, the specific attP sequence is a sequence located within about 450 base pairs flanking the coding sequence of the large serine recombinase in the phage genome. In some embodiments, the specific attP sequence is a sequence located within about 400 base pairs flanking the coding sequence of the large serine recombinase in the phage genome. In some embodiments, the specific attP sequence is a sequence located within about 350 base pairs flanking the coding sequence of the large serine recombinase in the phage genome. In some embodiments, the specific attP sequence is a sequence located within about 300 base pairs flanking the coding sequence of the large serine recombinase in the phage genome. In some embodiments, the specific attP sequence is a sequence located within about 250 base pairs flanking the coding sequence of the large serine recombinase in the phage genome. In some embodiments, the specific attP sequence is a sequence located within about 200 base pairs flanking the coding sequence of the large serine recombinase in the phage genome. In some embodiments, the specific attP sequence is a sequence located within about 150 base pairs flanking the coding sequence of the large serine recombinase in the phage genome. In some embodiments, the specific attP sequence is a sequence located within about 100 base pairs flanking the coding sequence of the large serine recombinase in the phage genome. In some embodiments, the specific attP sequence is a sequence located within about 50 base pairs flanking the coding sequence of the large serine recombinase in the phage genome. In some embodiments, the sequence flanking the coding sequence of the large serine recombinase refers to the sequence upstream of the coding sequence of the large serine recombinase. In some embodiments, the sequence flanking the coding sequence of the large serine recombinase refers to the sequence downstream of the coding sequence of the large serine recombinase.

[0116] In some embodiments, the specific attB sequence is a sequence located within about 500 base pairs flanking the coding sequence of the large serine recombinase in the phage genome. In some embodiments, the specific attB sequence is a sequence located within about 450 base pairs flanking the coding sequence of the large serine recombinase in the phage genome. In some embodiments, the specific attB sequence is a sequence located within about 400 base pairs flanking the coding sequence of the large serine recombinase in the phage genome. In some embodiments, the specific attB sequence is a sequence located within about 350 base pairs flanking the coding sequence of the large serine recombinase in the phage genome. In some embodiments, the specific attB sequence is a sequence located within about 300 base pairs flanking the coding sequence of the large serine recombinase in the phage genome. In some embodiments, the specific attB sequence is a sequence located within about 250 base pairs flanking the coding sequence of the large serine recombinase in the phage genome. In some embodiments, the specific attB sequence is a sequence located within about 200 base pairs flanking the coding sequence of the large serine recombinase in the phage genome. In some embodiments, the specific attB sequence is a sequence located within about 150 base pairs flanking the coding sequence of the large serine recombinase in the phage genome. In some embodiments, the specific attB sequence is a sequence located within about 100 base pairs flanking the coding sequence of the large serine recombinase in the phage genome. In some embodiments, the specific attB sequence is a sequence located within about 50 base pairs flanking the coding sequence of the large serine recombinase in the phage genome. In some embodiments, the sequence flanking the coding sequence of the large serine recombinase refers to the sequence upstream of the coding sequence of the large serine recombinase. In some embodiments, the sequence flanking the coding sequence of the large serine recombinase refers to the sequence downstream of the coding sequence of the large serine recombinase.

[0117] In some embodiments, the attP sequence is a naturally occurring attP sequence. In some embodiments, the attP site is an engineered variant. In some embodiments, the attP comprises one or more substitutions. In some embodiments, the attB sequence is a naturally occurring attP sequence. In some embodiments, the attB site is an engineered variant. In some embodiments, the attB comprises one or more substitutions. In some examples, the attP site sequence in the system comprises a sequence having at least 30%, 35%, 40%, 45%, 50%, 55%, 56%, 60%, 65%, 70%, 75%, 80%, 85%, 90%, 95%, 99% or greater identity to a naturally occurring attP sequence. In some examples, the attB sequence in the system comprises a sequence having at least 30%, 35%, 40%, 45%, 50%, 55%, 56%, 60%, 65%, 70%, 75%, 80%, 85%, 90%, 95%, 99% or greater identity to a naturally occurring attB sequence.

[0118] In some embodiments, the attP sequence and/or the attB sequence of the present system comprises an engineered recognition sequence.

[0119] In some embodiments, the attP sequence comprises two portions of recognition sequences, a first portion of the recognition sequence and a second portion recognition sequence. In some embodiments, the attB sequence comprises two portions of recognition sequences, a first portion of the recognition sequence and a second portion of the recognition sequence. The first and second portions of the attP sequence interact with the first and second portions of the attB sequence. The LSR binds to the attP-attB complex to mediate site specific recombination.

[0120] The first portion of the attP recognition sequence, in some embodiments, comprises a parapalindromic nucleic acid sequence. The first portion of the attB recognition sequence, in some embodiments, comprises a parapalindromic nucleic acid sequence. As used herein, the term ‘parapalindromic” means that one sequence is a palindrome relative to the other sequence or has at least 20%, 30%, 40%, 50%, 60%, 70%, 75%, 80%, 85%, 90%, 95%, 96%, 97%, 98%, or 99% sequence identity to a palindrome relative to the other sequence. In some embodiments, the second portion of the attP recognition sequence comprises parapalindromic nucleic acid sequence. Each of the parapalindromic sequence comprises about 10-40 nt, 10-35nt, 10-30nt, 15-40nt, 15-35 nt, or 20-30 nt. The first portion of the attB recognition sequence, in some embodiments, comprises a parapalindromic nucleic acid sequence. In some embodiments, the second portion of the attB recognition sequence comprises parapalindromic nucleic acid sequence. Each of the parapalindromic sequence comprises about 10-40 nt, 10-35 nt, 10-30 nt, 15-40 nt, 15-35 nt, or 20-30 nt.

[0121] In some embodiments, the attP sequence of the present system further comprises a core sequence, wherein the core sequence is located between the first portion and the second portion of the attP recognition sequence. In other embodiments, the attB sequence of the present system further comprises a core sequence, wherein the core sequence is located between the first portion and the second portion of the attB recognition sequence. In some instances, a core sequence can be cleaved by a recombinase.

[0122] The core sequence within the attP sequence or within the attB sequence comprises about 2-20 nt, e.g., 2 nt, 3 nt, 4 nt, 5 nt, 6 nt, 7 nt, 8 nt, 9 nt, 10 nt, 11 nt, 12 nt, 13 nt, 14 nt, 15 nt, 16 nt, 17 nt, 18 nt, 19 nt, or 20 nt. In some embodiments, the core sequence of the attB and attP are identical. In some embodiments, the core sequence of the attB and attP are not identical, e.g., have less than 99, 95, 90, 80, 70, 60, 50, 40, 30, or 20% identity. As a non-limiting example, an attP sequence is typically arranged from the 5′ end to the 3′end as follows: a first portion of the recognition sequence, a core sequence and a second portion of the recognition sequence. As another non-limiting example, an attB sequence is typically arranged from the 5′ end to the 3′end as follows: a first portion of the recognition sequence, a core sequence and a second portion of the recognition sequence.

[0123] In some embodiments, the attP sequence of the large serine recombinase system recombines with a cognate attB sequence in the target genome, integrating heterologous nucleic acid molecule. In some embodiments, the attB sequence is a naturally occurring attB site sequence in the target genome. In some embodiments, the attB sequence is a pseudo attB sequence.

[0124] In some embodiments, an attB sequence may be introduced into a host genome using a gene editing system, e.g., a base editor. In some embodiments, an attP sequence may be introduced into a host genome using a gene editing system, e.g., a base editor.

[0125] In some embodiments, the attB sequence of the large serine recombinase system recombines with a cognate attP sequence in the target genome, integrating heterologous DNA. In some embodiments, the attP sequence is a naturally occurring attP site sequence in the target genome. In some embodiments, the attP sequence is a pseudo attP sequence.

[0126] In some embodiments, the attP sequence of a LSR system and the cognate attB sequence comprises the same nucleic acid sequence. In other embodiments, the attP sequence of a LSR system and the cognate attB sequence do not comprises the same nucleic acid sequences. As non-limiting examples, the attP sequence has about 70%, 75%, 80%, 85%, 90%, 95% 96%, 97%, 98%, or 99% identity to its cognate attB sequence.

[0127] Accordingly, the large serine recombinase described herein exhibits activity, for example, recombination or integration in the presence of a unique attB and attP sequence leading to genome modification.

[0128] In some embodiments, each large serine recombinase described herein does not bind or exhibit activity with other attP or attB sequences, except for the specific attP and attB sequence it recognizes. Any one of SEQ ID NOs: 1549-2322 shows flanking sequences comprising attP sites for cognate LSR sequences as described in Table 3.

TABLE 3
Sequences identifying LSR and cognate flanking sequence comprising attP or
attB, and sequence identifier from the Gut Phage Genome database (Camarillo-Guerrero
et al., Massive expansion of human gut bacteriophage diversity; Cell, 2021, 184: 1098-1109;
http://ftp.ebi.ac.uk/pub/databases/metagenomics/genome_sets/gut_phage_database).

| | | Sequences | |
|---|---|---|---|
| | | flanking LSR | |
| LSR Amino Acid | Codon Optimized | comprising attP | Sequence |
| Sequences | LSR ORF | sites | Identifier |
| SEQ ID NO: 1 | SEQ ID NO: 775 | SEQ ID NO: 1549 | NC_002656 |
| SEQ ID NO: 2 | SEQ ID NO: 776 | SEQ ID NO: 1550 | ASN69149.1 |
| SEQ ID NO: 3 | SEQ ID NO: 777 | SEQ ID NO: 1551 | WP_109962774.1 |
| SEQ ID NO: 4 | SEQ ID NO: 778 | SEQ ID NO: 1552 | QIW89333.1 |
| SEQ ID NO: 5 | SEQ ID NO: 779 | SEQ ID NO: 1553 | uvig_401611 |
| SEQ ID NO: 6 | SEQ ID NO: 780 | SEQ ID NO: 1554 | uvig_576757 |
| SEQ ID NO: 7 | SEQ ID NO: 781 | SEQ ID NO: 1555 | uvig_205537 |
| SEQ ID NO: 8 | SEQ ID NO: 782 | SEQ ID NO: 1556 | uvig_281475 |
| SEQ ID NO: 9 | SEQ ID NO: 783 | SEQ ID NO: 1557 | uvig_22285 |
| SEQ ID NO: 10 | SEQ ID NO: 784 | SEQ ID NO: 1558 | uvig_274113 |
| SEQ ID NO: 11 | SEQ ID NO: 785 | SEQ ID NO: 1559 | uvig_176095 |
| SEQ ID NO: 12 | SEQ ID NO: 786 | SEQ ID NO: 1560 | ivig_2328 |
| SEQ ID NO: 13 | SEQ ID NO: 787 | SEQ ID NO: 1561 | uvig_594158 |
| SEQ ID NO: 14 | SEQ ID NO: 788 | SEQ ID NO: 1562 | uvig_181433 |
| SEQ ID NO: 15 | SEQ ID NO: 789 | SEQ ID NO: 1563 | uvig_154782 |
| SEQ ID NO: 16 | SEQ ID NO: 790 | SEQ ID NO: 1564 | uvig_569447 |
| SEQ ID NO: 17 | SEQ ID NO: 791 | SEQ ID NO: 1565 | uvig_187460 |
| SEQ ID NO: 18 | SEQ ID NO: 792 | SEQ ID NO: 1566 | uvig_166991 |
| SEQ ID NO: 19 | SEQ ID NO: 793 | SEQ ID NO: 1567 | uvig_169676 |
| SEQ ID NO: 20 | SEQ ID NO: 794 | SEQ ID NO: 1568 | uvig_284816 |
| SEQ ID NO: 21 | SEQ ID NO: 795 | SEQ ID NO: 1569 | uvig_366143 |
| SEQ ID NO: 22 | SEQ ID NO: 796 | SEQ ID NO: 1570 | uvig_121245 |
| SEQ ID NO: 23 | SEQ ID NO: 797 | SEQ ID NO: 1571 | uvig_190766 |
| SEQ ID NO: 24 | SEQ ID NO: 798 | SEQ ID NO: 1572 | uvig_152630 |
| SEQ ID NO: 25 | SEQ ID NO: 799 | SEQ ID NO: 1573 | uvig_500555 |
| SEQ ID NO: 26 | SEQ ID NO: 800 | SEQ ID NO: 1574 | uvig_356689 |
| SEQ ID NO: 27 | SEQ ID NO: 801 | SEQ ID NO: 1575 | uvig_527188 |
| SEQ ID NO: 28 | SEQ ID NO: 802 | SEQ ID NO: 1576 | uvig_415064 |
| SEQ ID NO: 29 | SEQ ID NO: 803 | SEQ ID NO: 1577 | uvig_593675 |
| SEQ ID NO: 30 | SEQ ID NO: 804 | SEQ ID NO: 1578 | uvig_200526 |
| SEQ ID NO: 31 | SEQ ID NO: 805 | SEQ ID NO: 1579 | uvig_188594 |
| SEQ ID NO: 32 | SEQ ID NO: 806 | SEQ ID NO: 1580 | uvig_323580 |
| SEQ ID NO: 33 | SEQ ID NO: 807 | SEQ ID NO: 1581 | uvig_81430 |
| SEQ ID NO: 34 | SEQ ID NO: 808 | SEQ ID NO: 1582 | uvig_395648 |
| SEQ ID NO: 35 | SEQ ID NO: 809 | SEQ ID NO: 1583 | uvig_255494 |
| SEQ ID NO: 36 | SEQ ID NO: 810 | SEQ ID NO: 1584 | ivig_2835 |
| SEQ ID NO: 37 | SEQ ID NO: 811 | SEQ ID NO: 1585 | uvig_78894 |
| SEQ ID NO: 38 | SEQ ID NO: 812 | SEQ ID NO: 1586 | uvig_205989 |
| SEQ ID NO: 39 | SEQ ID NO: 813 | SEQ ID NO: 1587 | uvig_580229 |
| SEQ ID NO: 40 | SEQ ID NO: 814 | SEQ ID NO: 1588 | uvig_94393 |
| SEQ ID NO: 41 | SEQ ID NO: 815 | SEQ ID NO: 1589 | uvig_401826 |
| SEQ ID NO: 42 | SEQ ID NO: 816 | SEQ ID NO: 1590 | uvig_183461 |
| SEQ ID NO: 43 | SEQ ID NO: 817 | SEQ ID NO: 1591 | uvig_19322 |
| SEQ ID NO: 44 | SEQ ID NO: 818 | SEQ ID NO: 1592 | uvig_539751 |
| SEQ ID NO: 45 | SEQ ID NO: 819 | SEQ ID NO: 1593 | uvig_408451 |
| SEQ ID NO: 46 | SEQ ID NO: 820 | SEQ ID NO: 1594 | uvig_154620 |
| SEQ ID NO: 47 | SEQ ID NO: 821 | SEQ ID NO: 1595 | uvig_349562 |
| SEQ ID NO: 48 | SEQ ID NO: 822 | SEQ ID NO: 1596 | uvig_596853 |
| SEQ ID NO: 49 | SEQ ID NO: 823 | SEQ ID NO: 1597 | uvig_4360 |
| SEQ ID NO: 50 | SEQ ID NO: 824 | SEQ ID NO: 1598 | uvig_167506 |
| SEQ ID NO: 51 | SEQ ID NO: 825 | SEQ ID NO: 1599 | uvig_339756 |
| SEQ ID NO: 52 | SEQ ID NO: 826 | SEQ ID NO: 1600 | uvig_182703 |
| SEQ ID NO: 53 | SEQ ID NO: 827 | SEQ ID NO: 1601 | ivig_3237 |
| SEQ ID NO: 54 | SEQ ID NO: 828 | SEQ ID NO: 1602 | uvig_297200 |
| SEQ ID NO: 55 | SEQ ID NO: 829 | SEQ ID NO: 1603 | uvig_470108 |
| SEQ ID NO: 56 | SEQ ID NO: 830 | SEQ ID NO: 1604 | uvig_32054 |
| SEQ ID NO: 57 | SEQ ID NO: 831 | SEQ ID NO: 1605 | uvig_399343 |
| SEQ ID NO: 58 | SEQ ID NO: 832 | SEQ ID NO: 1606 | uvig_290255 |
| SEQ ID NO: 59 | SEQ ID NO: 833 | SEQ ID NO: 1607 | uvig_242919 |
| SEQ ID NO: 60 | SEQ ID NO: 834 | SEQ ID NO: 1608 | uvig_138748 |
| SEQ ID NO: 61 | SEQ ID NO: 835 | SEQ ID NO: 1609 | uvig_448583 |
| SEQ ID NO: 62 | SEQ ID NO: 836 | SEQ ID NO: 1610 | uvig_596866 |
| SEQ ID NO: 63 | SEQ ID NO: 837 | SEQ ID NO: 1611 | uvig_42013 |
| SEQ ID NO: 64 | SEQ ID NO: 838 | SEQ ID NO: 1612 | uvig_452057 |
| SEQ ID NO: 65 | SEQ ID NO: 839 | SEQ ID NO: 1613 | ivig_4185 |
| SEQ ID NO: 66 | SEQ ID NO: 840 | SEQ ID NO: 1614 | uvig_58086 |
| SEQ ID NO: 67 | SEQ ID NO: 841 | SEQ ID NO: 1615 | uvig_75655 |
| SEQ ID NO: 68 | SEQ ID NO: 842 | SEQ ID NO: 1616 | uvig_442715 |
| SEQ ID NO: 69 | SEQ ID NO: 843 | SEQ ID NO: 1617 | ivig_244 |
| SEQ ID NO: 70 | SEQ ID NO: 844 | SEQ ID NO: 1618 | uvig_271148 |
| SEQ ID NO: 71 | SEQ ID NO: 845 | SEQ ID NO: 1619 | uvig_460604 |
| SEQ ID NO: 72 | SEQ ID NO: 846 | SEQ ID NO: 1620 | uvig_171430 |
| SEQ ID NO: 73 | SEQ ID NO: 847 | SEQ ID NO: 1621 | uvig_585929 |
| SEQ ID NO: 74 | SEQ ID NO: 848 | SEQ ID NO: 1622 | uvig_120053 |
| SEQ ID NO: 75 | SEQ ID NO: 849 | SEQ ID NO: 1623 | uvig_365399 |
| SEQ ID NO: 76 | SEQ ID NO: 850 | SEQ ID NO: 1624 | uvig_432464 |
| SEQ ID NO: 77 | SEQ ID NO: 851 | SEQ ID NO: 1625 | uvig_204911 |
| SEQ ID NO: 78 | SEQ ID NO: 852 | SEQ ID NO: 1626 | uvig_97244 |
| SEQ ID NO: 79 | SEQ ID NO: 853 | SEQ ID NO: 1627 | uvig_81090 |
| SEQ ID NO: 80 | SEQ ID NO: 854 | SEQ ID NO: 1628 | uvig_227260 |
| SEQ ID NO: 81 | SEQ ID NO: 855 | SEQ ID NO: 1629 | uvig_581146 |
| SEQ ID NO: 82 | SEQ ID NO: 856 | SEQ ID NO: 1630 | uvig_64010 |
| SEQ ID NO: 83 | SEQ ID NO: 857 | SEQ ID NO: 1631 | uvig_87948 |
| SEQ ID NO: 84 | SEQ ID NO: 858 | SEQ ID NO: 1632 | uvig_392002 |
| SEQ ID NO: 85 | SEQ ID NO: 859 | SEQ ID NO: 1633 | uvig_229002 |
| SEQ ID NO: 86 | SEQ ID NO: 860 | SEQ ID NO: 1634 | uvig_548354 |
| SEQ ID NO: 87 | SEQ ID NO: 861 | SEQ ID NO: 1635 | uvig_100661 |
| SEQ ID NO: 88 | SEQ ID NO: 862 | SEQ ID NO: 1636 | uvig_107826 |
| SEQ ID NO: 89 | SEQ ID NO: 863 | SEQ ID NO: 1637 | uvig_254024 |
| SEQ ID NO: 90 | SEQ ID NO: 864 | SEQ ID NO: 1638 | uvig_182389 |
| SEQ ID NO: 91 | SEQ ID NO: 865 | SEQ ID NO: 1639 | uvig_102394 |
| SEQ ID NO: 92 | SEQ ID NO: 866 | SEQ ID NO: 1640 | uvig_585001 |
| SEQ ID NO: 93 | SEQ ID NO: 867 | SEQ ID NO: 1641 | uvig_255241 |
| SEQ ID NO: 94 | SEQ ID NO: 868 | SEQ ID NO: 1642 | uvig_376366 |
| SEQ ID NO: 95 | SEQ ID NO: 869 | SEQ ID NO: 1643 | uvig_6107 |
| SEQ ID NO: 96 | SEQ ID NO: 870 | SEQ ID NO: 1644 | uvig_368726 |
| SEQ ID NO: 97 | SEQ ID NO: 871 | SEQ ID NO: 1645 | uvig_206729 |
| SEQ ID NO: 98 | SEQ ID NO: 872 | SEQ ID NO: 1646 | uvig_539964 |
| SEQ ID NO: 99 | SEQ ID NO: 873 | SEQ ID NO: 1647 | uvig_70532 |
| SEQ ID NO: 100 | SEQ ID NO: 874 | SEQ ID NO: 1648 | uvig_418756 |
| SEQ ID NO: 101 | SEQ ID NO: 875 | SEQ ID NO: 1649 | uvig_187460 |
| SEQ ID NO: 102 | SEQ ID NO: 876 | SEQ ID NO: 1650 | uvig_441829 |
| SEQ ID NO: 103 | SEQ ID NO: 877 | SEQ ID NO: 1651 | uvig_517008 |
| SEQ ID NO: 104 | SEQ ID NO: 878 | SEQ ID NO: 1652 | uvig_368153 |
| SEQ ID NO: 105 | SEQ ID NO: 879 | SEQ ID NO: 1653 | uvig_310206 |
| SEQ ID NO: 106 | SEQ ID NO: 880 | SEQ ID NO: 1654 | uvig_541528 |
| SEQ ID NO: 107 | SEQ ID NO: 881 | SEQ ID NO: 1655 | uvig_539021 |
| SEQ ID NO: 108 | SEQ ID NO: 882 | SEQ ID NO: 1656 | uvig_467692 |
| SEQ ID NO: 109 | SEQ ID NO: 883 | SEQ ID NO: 1657 | uvig_188069 |
| SEQ ID NO: 110 | SEQ ID NO: 884 | SEQ ID NO: 1658 | uvig_138780 |
| SEQ ID NO: 111 | SEQ ID NO: 885 | SEQ ID NO: 1659 | uvig_588864 |
| SEQ ID NO: 112 | SEQ ID NO: 886 | SEQ ID NO: 1660 | uvig_150649 |
| SEQ ID NO: 113 | SEQ ID NO: 887 | SEQ ID NO: 1661 | uvig_473313 |
| SEQ ID NO: 114 | SEQ ID NO: 888 | SEQ ID NO: 1662 | uvig_192865 |
| SEQ ID NO: 115 | SEQ ID NO: 889 | SEQ ID NO: 1663 | uvig_444213 |
| SEQ ID NO: 116 | SEQ ID NO: 890 | SEQ ID NO: 1664 | uvig_223147 |
| SEQ ID NO: 117 | SEQ ID NO: 891 | SEQ ID NO: 1665 | uvig_80069 |
| SEQ ID NO: 118 | SEQ ID NO: 892 | SEQ ID NO: 1666 | uvig_594811 |
| SEQ ID NO: 119 | SEQ ID NO: 893 | SEQ ID NO: 1667 | uvig_239214 |
| SEQ ID NO: 120 | SEQ ID NO: 894 | SEQ ID NO: 1668 | uvig_65204 |
| SEQ ID NO: 121 | SEQ ID NO: 895 | SEQ ID NO: 1669 | uvig_597817 |
| SEQ ID NO: 122 | SEQ ID NO: 896 | SEQ ID NO: 1670 | uvig_35124 |
| SEQ ID NO: 123 | SEQ ID NO: 897 | SEQ ID NO: 1671 | uvig_550968 |
| SEQ ID NO: 124 | SEQ ID NO: 898 | SEQ ID NO: 1672 | uvig_296393 |
| SEQ ID NO: 125 | SEQ ID NO: 899 | SEQ ID NO: 1673 | uvig_311349 |
| SEQ ID NO: 126 | SEQ ID NO: 900 | SEQ ID NO: 1674 | uvig_245605 |
| SEQ ID NO: 127 | SEQ ID NO: 901 | SEQ ID NO: 1675 | uvig_163750 |
| SEQ ID NO: 128 | SEQ ID NO: 902 | SEQ ID NO: 1676 | uvig_75905 |
| SEQ ID NO: 129 | SEQ ID NO: 903 | SEQ ID NO: 1677 | uvig_151078 |
| SEQ ID NO: 130 | SEQ ID NO: 904 | SEQ ID NO: 1678 | uvig_195859 |
| SEQ ID NO: 131 | SEQ ID NO: 905 | SEQ ID NO: 1679 | uvig_150139 |
| SEQ ID NO: 132 | SEQ ID NO: 906 | SEQ ID NO: 1680 | uvig_224697 |
| SEQ ID NO: 133 | SEQ ID NO: 907 | SEQ ID NO: 1681 | uvig_395040 |
| SEQ ID NO: 134 | SEQ ID NO: 908 | SEQ ID NO: 1682 | uvig_581138 |
| SEQ ID NO: 135 | SEQ ID NO: 909 | SEQ ID NO: 1683 | uvig_225196 |
| SEQ ID NO: 136 | SEQ ID NO: 910 | SEQ ID NO: 1684 | uvig_230928 |
| SEQ ID NO: 137 | SEQ ID NO: 911 | SEQ ID NO: 1685 | uvig_197914 |
| SEQ ID NO: 138 | SEQ ID NO: 912 | SEQ ID NO: 1686 | uvig_148886 |
| SEQ ID NO: 139 | SEQ ID NO: 913 | SEQ ID NO: 1687 | uvig_106050 |
| SEQ ID NO: 140 | SEQ ID NO: 914 | SEQ ID NO: 1688 | uvig_203979 |
| SEQ ID NO: 141 | SEQ ID NO: 915 | SEQ ID NO: 1689 | uvig_75234 |
| SEQ ID NO: 142 | SEQ ID NO: 916 | SEQ ID NO: 1690 | uvig_180737 |
| SEQ ID NO: 143 | SEQ ID NO: 917 | SEQ ID NO: 1691 | uvig_354682 |
| SEQ ID NO: 144 | SEQ ID NO: 918 | SEQ ID NO: 1692 | uvig_292057 |
| SEQ ID NO: 145 | SEQ ID NO: 919 | SEQ ID NO: 1693 | uvig_181325 |
| SEQ ID NO: 146 | SEQ ID NO: 920 | SEQ ID NO: 1694 | uvig_568903 |
| SEQ ID NO: 147 | SEQ ID NO: 921 | SEQ ID NO: 1695 | uvig_254684 |
| SEQ ID NO: 148 | SEQ ID NO: 922 | SEQ ID NO: 1696 | uvig_368674 |
| SEQ ID NO: 149 | SEQ ID NO: 923 | SEQ ID NO: 1697 | uvig_538311 |
| SEQ ID NO: 150 | SEQ ID NO: 924 | SEQ ID NO: 1698 | uvig_131471 |
| SEQ ID NO: 151 | SEQ ID NO: 925 | SEQ ID NO: 1699 | uvig_435486 |
| SEQ ID NO: 152 | SEQ ID NO: 926 | SEQ ID NO: 1700 | uvig_136059 |
| SEQ ID NO: 153 | SEQ ID NO: 927 | SEQ ID NO: 1701 | uvig_279733 |
| SEQ ID NO: 154 | SEQ ID NO: 928 | SEQ ID NO: 1702 | uvig_58086 |
| SEQ ID NO: 155 | SEQ ID NO: 929 | SEQ ID NO: 1703 | uvig_564581 |
| SEQ ID NO: 156 | SEQ ID NO: 930 | SEQ ID NO: 1704 | ivig_3762 |
| SEQ ID NO: 157 | SEQ ID NO: 931 | SEQ ID NO: 1705 | uvig_580293 |
| SEQ ID NO: 158 | SEQ ID NO: 932 | SEQ ID NO: 1706 | uvig_584862 |
| SEQ ID NO: 159 | SEQ ID NO: 933 | SEQ ID NO: 1707 | uvig_195589 |
| SEQ ID NO: 160 | SEQ ID NO: 934 | SEQ ID NO: 1708 | uvig_27141 |
| SEQ ID NO: 161 | SEQ ID NO: 935 | SEQ ID NO: 1709 | uvig_173343 |
| SEQ ID NO: 162 | SEQ ID NO: 936 | SEQ ID NO: 1710 | uvig_9846 |
| SEQ ID NO: 163 | SEQ ID NO: 937 | SEQ ID NO: 1711 | uvig_278778 |
| SEQ ID NO: 164 | SEQ ID NO: 938 | SEQ ID NO: 1712 | uvig_178349 |
| SEQ ID NO: 165 | SEQ ID NO: 939 | SEQ ID NO: 1713 | uvig_286852 |
| SEQ ID NO: 166 | SEQ ID NO: 940 | SEQ ID NO: 1714 | uvig_452261 |
| SEQ ID NO: 167 | SEQ ID NO: 941 | SEQ ID NO: 1715 | uvig_70560 |
| SEQ ID NO: 168 | SEQ ID NO: 942 | SEQ ID NO: 1716 | ivig_2547 |
| SEQ ID NO: 169 | SEQ ID NO: 943 | SEQ ID NO: 1717 | uvig_443823 |
| SEQ ID NO: 170 | SEQ ID NO: 944 | SEQ ID NO: 1718 | uvig_268778 |
| SEQ ID NO: 171 | SEQ ID NO: 945 | SEQ ID NO: 1719 | uvig_579415 |
| SEQ ID NO: 172 | SEQ ID NO: 946 | SEQ ID NO: 1720 | uvig_465509 |
| SEQ ID NO: 173 | SEQ ID NO: 947 | SEQ ID NO: 1721 | uvig_539852 |
| SEQ ID NO: 174 | SEQ ID NO: 948 | SEQ ID NO: 1722 | ivig_4470 |
| SEQ ID NO: 175 | SEQ ID NO: 949 | SEQ ID NO: 1723 | uvig_590420 |
| SEQ ID NO: 176 | SEQ ID NO: 950 | SEQ ID NO: 1724 | uvig_271148 |
| SEQ ID NO: 177 | SEQ ID NO: 951 | SEQ ID NO: 1725 | uvig_373577 |
| SEQ ID NO: 178 | SEQ ID NO: 952 | SEQ ID NO: 1726 | uvig_217517 |
| SEQ ID NO: 179 | SEQ ID NO: 953 | SEQ ID NO: 1727 | uvig_581095 |
| SEQ ID NO: 180 | SEQ ID NO: 954 | SEQ ID NO: 1728 | QGJ85883.1 |
| SEQ ID NO: 181 | SEQ ID NO: 955 | SEQ ID NO: 1729 | uvig_460604 |
| SEQ ID NO: 182 | SEQ ID NO: 956 | SEQ ID NO: 1730 | uvig_200966 |
| SEQ ID NO: 183 | SEQ ID NO: 957 | SEQ ID NO: 1731 | uvig_540211 |
| SEQ ID NO: 184 | SEQ ID NO: 958 | SEQ ID NO: 1732 | uvig_533354 |
| SEQ ID NO: 185 | SEQ ID NO: 959 | SEQ ID NO: 1733 | uvig_424088 |
| SEQ ID NO: 186 | SEQ ID NO: 960 | SEQ ID NO: 1734 | uvig_334631 |
| SEQ ID NO: 187 | SEQ ID NO: 961 | SEQ ID NO: 1735 | uvig_80185 |
| SEQ ID NO: 188 | SEQ ID NO: 962 | SEQ ID NO: 1736 | uvig_538824 |
| SEQ ID NO: 189 | SEQ ID NO: 963 | SEQ ID NO: 1737 | uvig_390438 |
| SEQ ID NO: 190 | SEQ ID NO: 964 | SEQ ID NO: 1738 | uvig_91735 |
| SEQ ID NO: 191 | SEQ ID NO: 965 | SEQ ID NO: 1739 | uvig_188377 |
| SEQ ID NO: 192 | SEQ ID NO: 966 | SEQ ID NO: 1740 | uvig_192283 |
| SEQ ID NO: 193 | SEQ ID NO: 967 | SEQ ID NO: 1741 | uvig_180924 |
| SEQ ID NO: 194 | SEQ ID NO: 968 | SEQ ID NO: 1742 | uvig_129321 |
| SEQ ID NO: 195 | SEQ ID NO: 969 | SEQ ID NO: 1743 | uvig_127383 |
| SEQ ID NO: 196 | SEQ ID NO: 970 | SEQ ID NO: 1744 | uvig_184013 |
| SEQ ID NO: 197 | SEQ ID NO: 971 | SEQ ID NO: 1745 | uvig_538870 |
| SEQ ID NO: 198 | SEQ ID NO: 972 | SEQ ID NO: 1746 | uvig_254484 |
| SEQ ID NO: 199 | SEQ ID NO: 973 | SEQ ID NO: 1747 | uvig_295592 |
| SEQ ID NO: 200 | SEQ ID NO: 974 | SEQ ID NO: 1748 | uvig_280868 |
| SEQ ID NO: 201 | SEQ ID NO: 975 | SEQ ID NO: 1749 | uvig_428055 |
| SEQ ID NO: 202 | SEQ ID NO: 976 | SEQ ID NO: 1750 | uvig_565627 |
| SEQ ID NO: 203 | SEQ ID NO: 977 | SEQ ID NO: 1751 | uvig_118880 |
| SEQ ID NO: 204 | SEQ ID NO: 978 | SEQ ID NO: 1752 | uvig_124951 |
| SEQ ID NO: 205 | SEQ ID NO: 979 | SEQ ID NO: 1753 | uvig_295592 |
| SEQ ID NO: 206 | SEQ ID NO: 980 | SEQ ID NO: 1754 | uvig_30637 |
| SEQ ID NO: 207 | SEQ ID NO: 981 | SEQ ID NO: 1755 | uvig_230232 |
| SEQ ID NO: 208 | SEQ ID NO: 982 | SEQ ID NO: 1756 | uvig_220226 |
| SEQ ID NO: 209 | SEQ ID NO: 983 | SEQ ID NO: 1757 | uvig_229288 |
| SEQ ID NO: 210 | SEQ ID NO: 984 | SEQ ID NO: 1758 | uvig_51701 |
| SEQ ID NO: 211 | SEQ ID NO: 985 | SEQ ID NO: 1759 | uvig_254558 |
| SEQ ID NO: 212 | SEQ ID NO: 986 | SEQ ID NO: 1760 | ivig_3141 |
| SEQ ID NO: 213 | SEQ ID NO: 987 | SEQ ID NO: 1761 | uvig_123245 |
| SEQ ID NO: 214 | SEQ ID NO: 988 | SEQ ID NO: 1762 | uvig_138779 |
| SEQ ID NO: 215 | SEQ ID NO: 989 | SEQ ID NO: 1763 | uvig_22285 |
| SEQ ID NO: 216 | SEQ ID NO: 990 | SEQ ID NO: 1764 | uvig_67879 |
| SEQ ID NO: 217 | SEQ ID NO: 991 | SEQ ID NO: 1765 | uvig_505551 |
| SEQ ID NO: 218 | SEQ ID NO: 992 | SEQ ID NO: 1766 | uvig_433950 |
| SEQ ID NO: 219 | SEQ ID NO: 993 | SEQ ID NO: 1767 | uvig_123245 |
| SEQ ID NO: 220 | SEQ ID NO: 994 | SEQ ID NO: 1768 | uvig_205573 |
| SEQ ID NO: 221 | SEQ ID NO: 995 | SEQ ID NO: 1769 | uvig_311654 |
| SEQ ID NO: 222 | SEQ ID NO: 996 | SEQ ID NO: 1770 | uvig_268018 |
| SEQ ID NO: 223 | SEQ ID NO: 997 | SEQ ID NO: 1771 | uvig_490592 |
| SEQ ID NO: 224 | SEQ ID NO: 998 | SEQ ID NO: 1772 | uvig_220844 |
| SEQ ID NO: 225 | SEQ ID NO: 999 | SEQ ID NO: 1773 | uvig_127324 |
| SEQ ID NO: 226 | SEQ ID NO: 1000 | SEQ ID NO: 1774 | uvig_418530 |
| SEQ ID NO: 227 | SEQ ID NO: 1001 | SEQ ID NO: 1775 | uvig_169032 |
| SEQ ID NO: 228 | SEQ ID NO: 1002 | SEQ ID NO: 1776 | uvig_572866 |
| SEQ ID NO: 229 | SEQ ID NO: 1003 | SEQ ID NO: 1777 | uvig_327543 |
| SEQ ID NO: 230 | SEQ ID NO: 1004 | SEQ ID NO: 1778 | uvig_177600 |
| SEQ ID NO: 231 | SEQ ID NO: 1005 | SEQ ID NO: 1779 | uvig_457951 |
| SEQ ID NO: 232 | SEQ ID NO: 1006 | SEQ ID NO: 1780 | uvig_580269 |
| SEQ ID NO: 233 | SEQ ID NO: 1007 | SEQ ID NO: 1781 | uvig_576757 |
| SEQ ID NO: 234 | SEQ ID NO: 1008 | SEQ ID NO: 1782 | uvig_157917 |
| SEQ ID NO: 235 | SEQ ID NO: 1009 | SEQ ID NO: 1783 | uvig_555782 |
| SEQ ID NO: 236 | SEQ ID NO: 1010 | SEQ ID NO: 1784 | uvig_193710 |
| SEQ ID NO: 237 | SEQ ID NO: 1011 | SEQ ID NO: 1785 | uvig_363401 |
| SEQ ID NO: 238 | SEQ ID NO: 1012 | SEQ ID NO: 1786 | uvig_195006 |
| SEQ ID NO: 239 | SEQ ID NO: 1013 | SEQ ID NO: 1787 | uvig_180433 |
| SEQ ID NO: 240 | SEQ ID NO: 1014 | SEQ ID NO: 1788 | uvig_557335 |
| SEQ ID NO: 241 | SEQ ID NO: 1015 | SEQ ID NO: 1789 | uvig_89445 |
| SEQ ID NO: 242 | SEQ ID NO: 1016 | SEQ ID NO: 1790 | uvig_576812 |
| SEQ ID NO: 243 | SEQ ID NO: 1017 | SEQ ID NO: 1791 | uvig_1903 |
| SEQ ID NO: 244 | SEQ ID NO: 1018 | SEQ ID NO: 1792 | uvig_151346 |
| SEQ ID NO: 245 | SEQ ID NO: 1019 | SEQ ID NO: 1793 | uvig_282034 |
| SEQ ID NO: 246 | SEQ ID NO: 1020 | SEQ ID NO: 1794 | uvig_69193 |
| SEQ ID NO: 247 | SEQ ID NO: 1021 | SEQ ID NO: 1795 | uvig_318656 |
| SEQ ID NO: 248 | SEQ ID NO: 1022 | SEQ ID NO: 1796 | uvig_227965 |
| SEQ ID NO: 249 | SEQ ID NO: 1023 | SEQ ID NO: 1797 | uvig_182406 |
| SEQ ID NO: 250 | SEQ ID NO: 1024 | SEQ ID NO: 1798 | uvig_166254 |
| SEQ ID NO: 251 | SEQ ID NO: 1025 | SEQ ID NO: 1799 | uvig_586179 |
| SEQ ID NO: 252 | SEQ ID NO: 1026 | SEQ ID NO: 1800 | uvig_275384 |
| SEQ ID NO: 253 | SEQ ID NO: 1027 | SEQ ID NO: 1801 | uvig_128002 |
| SEQ ID NO: 254 | SEQ ID NO: 1028 | SEQ ID NO: 1802 | uvig_8240 |
| SEQ ID NO: 255 | SEQ ID NO: 1029 | SEQ ID NO: 1803 | uvig_86984 |
| SEQ ID NO: 256 | SEQ ID NO: 1030 | SEQ ID NO: 1804 | uvig_425758 |
| SEQ ID NO: 257 | SEQ ID NO: 1031 | SEQ ID NO: 1805 | uvig_158104 |
| SEQ ID NO: 258 | SEQ ID NO: 1032 | SEQ ID NO: 1806 | uvig_567103 |
| SEQ ID NO: 259 | SEQ ID NO: 1033 | SEQ ID NO: 1807 | uvig_58544 |
| SEQ ID NO: 260 | SEQ ID NO: 1034 | SEQ ID NO: 1808 | uvig_42250 |
| SEQ ID NO: 261 | SEQ ID NO: 1035 | SEQ ID NO: 1809 | uvig_198610 |
| SEQ ID NO: 262 | SEQ ID NO: 1036 | SEQ ID NO: 1810 | uvig_507007 |
| SEQ ID NO: 263 | SEQ ID NO: 1037 | SEQ ID NO: 1811 | uvig_232060 |
| SEQ ID NO: 264 | SEQ ID NO: 1038 | SEQ ID NO: 1812 | uvig_598290 |
| SEQ ID NO: 265 | SEQ ID NO: 1039 | SEQ ID NO: 1813 | uvig_73872 |
| SEQ ID NO: 266 | SEQ ID NO: 1040 | SEQ ID NO: 1814 | uvig_41106 |
| SEQ ID NO: 267 | SEQ ID NO: 1041 | SEQ ID NO: 1815 | uvig_53580 |
| SEQ ID NO: 268 | SEQ ID NO: 1042 | SEQ ID NO: 1816 | uvig_504803 |
| SEQ ID NO: 269 | SEQ ID NO: 1043 | SEQ ID NO: 1817 | uvig_198801 |
| SEQ ID NO: 270 | SEQ ID NO: 1044 | SEQ ID NO: 1818 | ivig_3837 |
| SEQ ID NO: 271 | SEQ ID NO: 1045 | SEQ ID NO: 1819 | uvig_58201 |
| SEQ ID NO: 272 | SEQ ID NO: 1046 | SEQ ID NO: 1820 | uvig_312745 |
| SEQ ID NO: 273 | SEQ ID NO: 1047 | SEQ ID NO: 1821 | uvig_287346 |
| SEQ ID NO: 274 | SEQ ID NO: 1048 | SEQ ID NO: 1822 | uvig_569915 |
| SEQ ID NO: 275 | SEQ ID NO: 1049 | SEQ ID NO: 1823 | uvig_380944 |
| SEQ ID NO: 276 | SEQ ID NO: 1050 | SEQ ID NO: 1824 | uvig_585281 |
| SEQ ID NO: 277 | SEQ ID NO: 1051 | SEQ ID NO: 1825 | uvig_85227 |
| SEQ ID NO: 278 | SEQ ID NO: 1052 | SEQ ID NO: 1826 | ivig_3177 |
| SEQ ID NO: 279 | SEQ ID NO: 1053 | SEQ ID NO: 1827 | uvig_83127 |
| SEQ ID NO: 280 | SEQ ID NO: 1054 | SEQ ID NO: 1828 | uvig_205904 |
| SEQ ID NO: 281 | SEQ ID NO: 1055 | SEQ ID NO: 1829 | uvig_239031 |
| SEQ ID NO: 282 | SEQ ID NO: 1056 | SEQ ID NO: 1830 | uvig_160559 |
| SEQ ID NO: 283 | SEQ ID NO: 1057 | SEQ ID NO: 1831 | uvig_135439 |
| SEQ ID NO: 284 | SEQ ID NO: 1058 | SEQ ID NO: 1832 | ivig_116 |
| SEQ ID NO: 285 | SEQ ID NO: 1059 | SEQ ID NO: 1833 | uvig_354027 |
| SEQ ID NO: 286 | SEQ ID NO: 1060 | SEQ ID NO: 1834 | uvig_305800 |
| SEQ ID NO: 287 | SEQ ID NO: 1061 | SEQ ID NO: 1835 | uvig_45 |
| SEQ ID NO: 288 | SEQ ID NO: 1062 | SEQ ID NO: 1836 | uvig_151078 |
| SEQ ID NO: 289 | SEQ ID NO: 1063 | SEQ ID NO: 1837 | uvig_369437 |
| SEQ ID NO: 290 | SEQ ID NO: 1064 | SEQ ID NO: 1838 | uvig_319734 |
| SEQ ID NO: 291 | SEQ ID NO: 1065 | SEQ ID NO: 1839 | uvig_183862 |
| SEQ ID NO: 292 | SEQ ID NO: 1066 | SEQ ID NO: 1840 | uvig_250794 |
| SEQ ID NO: 293 | SEQ ID NO: 1067 | SEQ ID NO: 1841 | uvig_195543 |
| SEQ ID NO: 294 | SEQ ID NO: 1068 | SEQ ID NO: 1842 | uvig_557325 |
| SEQ ID NO: 295 | SEQ ID NO: 1069 | SEQ ID NO: 1843 | uvig_13945 |
| SEQ ID NO: 296 | SEQ ID NO: 1070 | SEQ ID NO: 1844 | uvig_114897 |
| SEQ ID NO: 297 | SEQ ID NO: 1071 | SEQ ID NO: 1845 | uvig_505551 |
| SEQ ID NO: 298 | SEQ ID NO: 1072 | SEQ ID NO: 1846 | uvig_331196 |
| SEQ ID NO: 299 | SEQ ID NO: 1073 | SEQ ID NO: 1847 | uvig_80069 |
| SEQ ID NO: 300 | SEQ ID NO: 1074 | SEQ ID NO: 1848 | uvig_9192 |
| SEQ ID NO: 301 | SEQ ID NO: 1075 | SEQ ID NO: 1849 | uvig_507971 |
| SEQ ID NO: 302 | SEQ ID NO: 1076 | SEQ ID NO: 1850 | uvig_80003 |
| SEQ ID NO: 303 | SEQ ID NO: 1077 | SEQ ID NO: 1851 | uvig_176185 |
| SEQ ID NO: 304 | SEQ ID NO: 1078 | SEQ ID NO: 1852 | uvig_280693 |
| SEQ ID NO: 305 | SEQ ID NO: 1079 | SEQ ID NO: 1853 | uvig_81612 |
| SEQ ID NO: 306 | SEQ ID NO: 1080 | SEQ ID NO: 1854 | uvig_296980 |
| SEQ ID NO: 307 | SEQ ID NO: 1081 | SEQ ID NO: 1855 | uvig_517692 |
| SEQ ID NO: 308 | SEQ ID NO: 1082 | SEQ ID NO: 1856 | uvig_170697 |
| SEQ ID NO: 309 | SEQ ID NO: 1083 | SEQ ID NO: 1857 | uvig_55768 |
| SEQ ID NO: 310 | SEQ ID NO: 1084 | SEQ ID NO: 1858 | uvig_178167 |
| SEQ ID NO: 311 | SEQ ID NO: 1085 | SEQ ID NO: 1859 | uvig_66023 |
| SEQ ID NO: 312 | SEQ ID NO: 1086 | SEQ ID NO: 1860 | uvig_380785 |
| SEQ ID NO: 313 | SEQ ID NO: 1087 | SEQ ID NO: 1861 | uvig_388771 |
| SEQ ID NO: 314 | SEQ ID NO: 1088 | SEQ ID NO: 1862 | uvig_520747 |
| SEQ ID NO: 315 | SEQ ID NO: 1089 | SEQ ID NO: 1863 | uvig_380944 |
| SEQ ID NO: 316 | SEQ ID NO: 1090 | SEQ ID NO: 1864 | uvig_148875 |
| SEQ ID NO: 317 | SEQ ID NO: 1091 | SEQ ID NO: 1865 | uvig_143975 |
| SEQ ID NO: 318 | SEQ ID NO: 1092 | SEQ ID NO: 1866 | uvig_59951 |
| SEQ ID NO: 319 | SEQ ID NO: 1093 | SEQ ID NO: 1867 | uvig_368726 |
| SEQ ID NO: 320 | SEQ ID NO: 1094 | SEQ ID NO: 1868 | uvig_355166 |
| SEQ ID NO: 321 | SEQ ID NO: 1095 | SEQ ID NO: 1869 | uvig_345767 |
| SEQ ID NO: 322 | SEQ ID NO: 1096 | SEQ ID NO: 1870 | uvig_585265 |
| SEQ ID NO: 323 | SEQ ID NO: 1097 | SEQ ID NO: 1871 | ivig_2445 |
| SEQ ID NO: 324 | SEQ ID NO: 1098 | SEQ ID NO: 1872 | uvig_136571 |
| SEQ ID NO: 325 | SEQ ID NO: 1099 | SEQ ID NO: 1873 | uvig_469171 |
| SEQ ID NO: 326 | SEQ ID NO: 1100 | SEQ ID NO: 1874 | uvig_155463 |
| SEQ ID NO: 327 | SEQ ID NO: 1101 | SEQ ID NO: 1875 | uvig_597316 |
| SEQ ID NO: 328 | SEQ ID NO: 1102 | SEQ ID NO: 1876 | uvig_181332 |
| SEQ ID NO: 329 | SEQ ID NO: 1103 | SEQ ID NO: 1877 | uvig_222038 |
| SEQ ID NO: 330 | SEQ ID NO: 1104 | SEQ ID NO: 1878 | uvig_211114 |
| SEQ ID NO: 331 | SEQ ID NO: 1105 | SEQ ID NO: 1879 | uvig_473863 |
| SEQ ID NO: 332 | SEQ ID NO: 1106 | SEQ ID NO: 1880 | uvig_73839 |
| SEQ ID NO: 333 | SEQ ID NO: 1107 | SEQ ID NO: 1881 | uvig_154548 |
| SEQ ID NO: 334 | SEQ ID NO: 1108 | SEQ ID NO: 1882 | uvig_578394 |
| SEQ ID NO: 335 | SEQ ID NO: 1109 | SEQ ID NO: 1883 | uvig_175345 |
| SEQ ID NO: 336 | SEQ ID NO: 1110 | SEQ ID NO: 1884 | uvig_574139 |
| SEQ ID NO: 337 | SEQ ID NO: 1111 | SEQ ID NO: 1885 | uvig_189213 |
| SEQ ID NO: 338 | SEQ ID NO: 1112 | SEQ ID NO: 1886 | uvig_296776 |
| SEQ ID NO: 339 | SEQ ID NO: 1113 | SEQ ID NO: 1887 | uvig_173157 |
| SEQ ID NO: 340 | SEQ ID NO: 1114 | SEQ ID NO: 1888 | uvig_393561 |
| SEQ ID NO: 341 | SEQ ID NO: 1115 | SEQ ID NO: 1889 | uvig_296393 |
| SEQ ID NO: 342 | SEQ ID NO: 1116 | SEQ ID NO: 1890 | uvig_123245 |
| SEQ ID NO: 343 | SEQ ID NO: 1117 | SEQ ID NO: 1891 | uvig_58220 |
| SEQ ID NO: 344 | SEQ ID NO: 1118 | SEQ ID NO: 1892 | uvig_448547 |
| SEQ ID NO: 345 | SEQ ID NO: 1119 | SEQ ID NO: 1893 | uvig_400458 |
| SEQ ID NO: 346 | SEQ ID NO: 1120 | SEQ ID NO: 1894 | uvig_172639 |
| SEQ ID NO: 347 | SEQ ID NO: 1121 | SEQ ID NO: 1895 | uvig_189626 |
| SEQ ID NO: 348 | SEQ ID NO: 1122 | SEQ ID NO: 1896 | uvig_170915 |
| SEQ ID NO: 349 | SEQ ID NO: 1123 | SEQ ID NO: 1897 | uvig_195109 |
| SEQ ID NO: 350 | SEQ ID NO: 1124 | SEQ ID NO: 1898 | uvig_597743 |
| SEQ ID NO: 351 | SEQ ID NO: 1125 | SEQ ID NO: 1899 | uvig_595313 |
| SEQ ID NO: 352 | SEQ ID NO: 1126 | SEQ ID NO: 1900 | uvig_244256 |
| SEQ ID NO: 353 | SEQ ID NO: 1127 | SEQ ID NO: 1901 | uvig_555240 |
| SEQ ID NO: 354 | SEQ ID NO: 1128 | SEQ ID NO: 1902 | uvig_336926 |
| SEQ ID NO: 355 | SEQ ID NO: 1129 | SEQ ID NO: 1903 | uvig_239031 |
| SEQ ID NO: 356 | SEQ ID NO: 1130 | SEQ ID NO: 1904 | uvig_146316 |
| SEQ ID NO: 357 | SEQ ID NO: 1131 | SEQ ID NO: 1905 | uvig_390637 |
| SEQ ID NO: 358 | SEQ ID NO: 1132 | SEQ ID NO: 1906 | uvig_383825 |
| SEQ ID NO: 359 | SEQ ID NO: 1133 | SEQ ID NO: 1907 | ivig_4414 |
| SEQ ID NO: 360 | SEQ ID NO: 1134 | SEQ ID NO: 1908 | uvig_80069 |
| SEQ ID NO: 361 | SEQ ID NO: 1135 | SEQ ID NO: 1909 | uvig_395426 |
| SEQ ID NO: 362 | SEQ ID NO: 1136 | SEQ ID NO: 1910 | uvig_434714 |
| SEQ ID NO: 363 | SEQ ID NO: 1137 | SEQ ID NO: 1911 | uvig_425922 |
| SEQ ID NO: 364 | SEQ ID NO: 1138 | SEQ ID NO: 1912 | uvig_114951 |
| SEQ ID NO: 365 | SEQ ID NO: 1139 | SEQ ID NO: 1913 | uvig_442872 |
| SEQ ID NO: 366 | SEQ ID NO: 1140 | SEQ ID NO: 1914 | uvig_510225 |
| SEQ ID NO: 367 | SEQ ID NO: 1141 | SEQ ID NO: 1915 | uvig_281842 |
| SEQ ID NO: 368 | SEQ ID NO: 1142 | SEQ ID NO: 1916 | ivig_126 |
| SEQ ID NO: 369 | SEQ ID NO: 1143 | SEQ ID NO: 1917 | uvig_581976 |
| SEQ ID NO: 370 | SEQ ID NO: 1144 | SEQ ID NO: 1918 | uvig_49690 |
| SEQ ID NO: 371 | SEQ ID NO: 1145 | SEQ ID NO: 1919 | uvig_572170 |
| SEQ ID NO: 372 | SEQ ID NO: 1146 | SEQ ID NO: 1920 | ivig_2192 |
| SEQ ID NO: 373 | SEQ ID NO: 1147 | SEQ ID NO: 1921 | uvig_394091 |
| SEQ ID NO: 374 | SEQ ID NO: 1148 | SEQ ID NO: 1922 | uvig_598290 |
| SEQ ID NO: 375 | SEQ ID NO: 1149 | SEQ ID NO: 1923 | uvig_517008 |
| SEQ ID NO: 376 | SEQ ID NO: 1150 | SEQ ID NO: 1924 | uvig_223324 |
| SEQ ID NO: 377 | SEQ ID NO: 1151 | SEQ ID NO: 1925 | uvig_347727 |
| SEQ ID NO: 378 | SEQ ID NO: 1152 | SEQ ID NO: 1926 | uvig_47521 |
| SEQ ID NO: 379 | SEQ ID NO: 1153 | SEQ ID NO: 1927 | uvig_539751 |
| SEQ ID NO: 380 | SEQ ID NO: 1154 | SEQ ID NO: 1928 | uvig_124673 |
| SEQ ID NO: 381 | SEQ ID NO: 1155 | SEQ ID NO: 1929 | uvig_430255 |
| SEQ ID NO: 382 | SEQ ID NO: 1156 | SEQ ID NO: 1930 | uvig_581111 |
| SEQ ID NO: 383 | SEQ ID NO: 1157 | SEQ ID NO: 1931 | uvig_154343 |
| SEQ ID NO: 384 | SEQ ID NO: 1158 | SEQ ID NO: 1932 | uvig_597740 |
| SEQ ID NO: 385 | SEQ ID NO: 1159 | SEQ ID NO: 1933 | ivig_2971 |
| SEQ ID NO: 386 | SEQ ID NO: 1160 | SEQ ID NO: 1934 | uvig_458373 |
| SEQ ID NO: 387 | SEQ ID NO: 1161 | SEQ ID NO: 1935 | uvig_200526 |
| SEQ ID NO: 388 | SEQ ID NO: 1162 | SEQ ID NO: 1936 | uvig_307306 |
| SEQ ID NO: 389 | SEQ ID NO: 1163 | SEQ ID NO: 1937 | uvig_396131 |
| SEQ ID NO: 390 | SEQ ID NO: 1164 | SEQ ID NO: 1938 | uvig_568903 |
| SEQ ID NO: 391 | SEQ ID NO: 1165 | SEQ ID NO: 1939 | uvig_199869 |
| SEQ ID NO: 392 | SEQ ID NO: 1166 | SEQ ID NO: 1940 | uvig_181597 |
| SEQ ID NO: 393 | SEQ ID NO: 1167 | SEQ ID NO: 1941 | uvig_38906 |
| SEQ ID NO: 394 | SEQ ID NO: 1168 | SEQ ID NO: 1942 | uvig_16065 |
| SEQ ID NO: 395 | SEQ ID NO: 1169 | SEQ ID NO: 1943 | uvig_453325 |
| SEQ ID NO: 396 | SEQ ID NO: 1170 | SEQ ID NO: 1944 | uvig_294132 |
| SEQ ID NO: 397 | SEQ ID NO: 1171 | SEQ ID NO: 1945 | uvig_550213 |
| SEQ ID NO: 398 | SEQ ID NO: 1172 | SEQ ID NO: 1946 | uvig_442559 |
| SEQ ID NO: 399 | SEQ ID NO: 1173 | SEQ ID NO: 1947 | uvig_148886 |
| SEQ ID NO: 400 | SEQ ID NO: 1174 | SEQ ID NO: 1948 | ivig_4396 |
| SEQ ID NO: 401 | SEQ ID NO: 1175 | SEQ ID NO: 1949 | uvig_284398 |
| SEQ ID NO: 402 | SEQ ID NO: 1176 | SEQ ID NO: 1950 | uvig_517692 |
| SEQ ID NO: 403 | SEQ ID NO: 1177 | SEQ ID NO: 1951 | ivig_1929 |
| SEQ ID NO: 404 | SEQ ID NO: 1178 | SEQ ID NO: 1952 | uvig_35057 |
| SEQ ID NO: 405 | SEQ ID NO: 1179 | SEQ ID NO: 1953 | uvig_35057 |
| SEQ ID NO: 406 | SEQ ID NO: 1180 | SEQ ID NO: 1954 | uvig_174247 |
| SEQ ID NO: 407 | SEQ ID NO: 1181 | SEQ ID NO: 1955 | uvig_163358 |
| SEQ ID NO: 408 | SEQ ID NO: 1182 | SEQ ID NO: 1956 | ivig_2547 |
| SEQ ID NO: 409 | SEQ ID NO: 1183 | SEQ ID NO: 1957 | uvig_13765 |
| SEQ ID NO: 410 | SEQ ID NO: 1184 | SEQ ID NO: 1958 | uvig_151707 |
| SEQ ID NO: 411 | SEQ ID NO: 1185 | SEQ ID NO: 1959 | uvig_380829 |
| SEQ ID NO: 412 | SEQ ID NO: 1186 | SEQ ID NO: 1960 | uvig_83213 |
| SEQ ID NO: 413 | SEQ ID NO: 1187 | SEQ ID NO: 1961 | uvig_206323 |
| SEQ ID NO: 414 | SEQ ID NO: 1188 | SEQ ID NO: 1962 | uvig_404291 |
| SEQ ID NO: 415 | SEQ ID NO: 1189 | SEQ ID NO: 1963 | ivig_756 |
| SEQ ID NO: 416 | SEQ ID NO: 1190 | SEQ ID NO: 1964 | ivig_2327 |
| SEQ ID NO: 417 | SEQ ID NO: 1191 | SEQ ID NO: 1965 | uvig_554333 |
| SEQ ID NO: 418 | SEQ ID NO: 1192 | SEQ ID NO: 1966 | uvig_257872 |
| SEQ ID NO: 419 | SEQ ID NO: 1193 | SEQ ID NO: 1967 | uvig_210496 |
| SEQ ID NO: 420 | SEQ ID NO: 1194 | SEQ ID NO: 1968 | uvig_151237 |
| SEQ ID NO: 421 | SEQ ID NO: 1195 | SEQ ID NO: 1969 | uvig_206100 |
| SEQ ID NO: 422 | SEQ ID NO: 1196 | SEQ ID NO: 1970 | uvig_134660 |
| SEQ ID NO: 423 | SEQ ID NO: 1197 | SEQ ID NO: 1971 | uvig_234005 |
| SEQ ID NO: 424 | SEQ ID NO: 1198 | SEQ ID NO: 1972 | uvig_146622 |
| SEQ ID NO: 425 | SEQ ID NO: 1199 | SEQ ID NO: 1973 | uvig_356610 |
| SEQ ID NO: 426 | SEQ ID NO: 1200 | SEQ ID NO: 1974 | uvig_243310 |
| SEQ ID NO: 427 | SEQ ID NO: 1201 | SEQ ID NO: 1975 | uvig_278686 |
| SEQ ID NO: 428 | SEQ ID NO: 1202 | SEQ ID NO: 1976 | uvig_441833 |
| SEQ ID NO: 429 | SEQ ID NO: 1203 | SEQ ID NO: 1977 | uvig_584681 |
| SEQ ID NO: 430 | SEQ ID NO: 1204 | SEQ ID NO: 1978 | uvig_441567 |
| SEQ ID NO: 431 | SEQ ID NO: 1205 | SEQ ID NO: 1979 | uvig_3575 |
| SEQ ID NO: 432 | SEQ ID NO: 1206 | SEQ ID NO: 1980 | uvig_195822 |
| SEQ ID NO: 433 | SEQ ID NO: 1207 | SEQ ID NO: 1981 | uvig_386577 |
| SEQ ID NO: 434 | SEQ ID NO: 1208 | SEQ ID NO: 1982 | uvig_381373 |
| SEQ ID NO: 435 | SEQ ID NO: 1209 | SEQ ID NO: 1983 | uvig_100318 |
| SEQ ID NO: 436 | SEQ ID NO: 1210 | SEQ ID NO: 1984 | uvig_206650 |
| SEQ ID NO: 437 | SEQ ID NO: 1211 | SEQ ID NO: 1985 | uvig_192865 |
| SEQ ID NO: 438 | SEQ ID NO: 1212 | SEQ ID NO: 1986 | uvig_416748 |
| SEQ ID NO: 439 | SEQ ID NO: 1213 | SEQ ID NO: 1987 | uvig_495199 |
| SEQ ID NO: 440 | SEQ ID NO: 1214 | SEQ ID NO: 1988 | uvig_305979 |
| SEQ ID NO: 441 | SEQ ID NO: 1215 | SEQ ID NO: 1989 | uvig_291363 |
| SEQ ID NO: 442 | SEQ ID NO: 1216 | SEQ ID NO: 1990 | uvig_263829 |
| SEQ ID NO: 443 | SEQ ID NO: 1217 | SEQ ID NO: 1991 | uvig_13765 |
| SEQ ID NO: 444 | SEQ ID NO: 1218 | SEQ ID NO: 1992 | uvig_527169 |
| SEQ ID NO: 445 | SEQ ID NO: 1219 | SEQ ID NO: 1993 | uvig_133907 |
| SEQ ID NO: 446 | SEQ ID NO: 1220 | SEQ ID NO: 1994 | uvig_8523 |
| SEQ ID NO: 447 | SEQ ID NO: 1221 | SEQ ID NO: 1995 | uvig_361885 |
| SEQ ID NO: 448 | SEQ ID NO: 1222 | SEQ ID NO: 1996 | uvig_186102 |
| SEQ ID NO: 449 | SEQ ID NO: 1223 | SEQ ID NO: 1997 | uvig_183615 |
| SEQ ID NO: 450 | SEQ ID NO: 1224 | SEQ ID NO: 1998 | uvig_159029 |
| SEQ ID NO: 451 | SEQ ID NO: 1225 | SEQ ID NO: 1999 | uvig_89669 |
| SEQ ID NO: 452 | SEQ ID NO: 1226 | SEQ ID NO: 2000 | uvig_47505 |
| SEQ ID NO: 453 | SEQ ID NO: 1227 | SEQ ID NO: 2001 | uvig_51452 |
| SEQ ID NO: 454 | SEQ ID NO: 1228 | SEQ ID NO: 2002 | uvig_239031 |
| SEQ ID NO: 455 | SEQ ID NO: 1229 | SEQ ID NO: 2003 | uvig_543352 |
| SEQ ID NO: 456 | SEQ ID NO: 1230 | SEQ ID NO: 2004 | uvig_248716 |
| SEQ ID NO: 457 | SEQ ID NO: 1231 | SEQ ID NO: 2005 | uvig_366853 |
| SEQ ID NO: 458 | SEQ ID NO: 1232 | SEQ ID NO: 2006 | uvig_203185 |
| SEQ ID NO: 459 | SEQ ID NO: 1233 | SEQ ID NO: 2007 | uvig_54187 |
| SEQ ID NO: 460 | SEQ ID NO: 1234 | SEQ ID NO: 2008 | uvig_373913 |
| SEQ ID NO: 461 | SEQ ID NO: 1235 | SEQ ID NO: 2009 | uvig_284738 |
| SEQ ID NO: 462 | SEQ ID NO: 1236 | SEQ ID NO: 2010 | uvig_31017 |
| SEQ ID NO: 463 | SEQ ID NO: 1237 | SEQ ID NO: 2011 | uvig_51541 |
| SEQ ID NO: 464 | SEQ ID NO: 1238 | SEQ ID NO: 2012 | uvig_525361 |
| SEQ ID NO: 465 | SEQ ID NO: 1239 | SEQ ID NO: 2013 | uvig_520815 |
| SEQ ID NO: 466 | SEQ ID NO: 1240 | SEQ ID NO: 2014 | uvig_92124 |
| SEQ ID NO: 467 | SEQ ID NO: 1241 | SEQ ID NO: 2015 | uvig_588507 |
| SEQ ID NO: 468 | SEQ ID NO: 1242 | SEQ ID NO: 2016 | uvig_129895 |
| SEQ ID NO: 469 | SEQ ID NO: 1243 | SEQ ID NO: 2017 | uvig_74804 |
| SEQ ID NO: 470 | SEQ ID NO: 1244 | SEQ ID NO: 2018 | uvig_9192 |
| SEQ ID NO: 471 | SEQ ID NO: 1245 | SEQ ID NO: 2019 | uvig_190248 |
| SEQ ID NO: 472 | SEQ ID NO: 1246 | SEQ ID NO: 2020 | uvig_41106 |
| SEQ ID NO: 473 | SEQ ID NO: 1247 | SEQ ID NO: 2021 | uvig_453452 |
| SEQ ID NO: 474 | SEQ ID NO: 1248 | SEQ ID NO: 2022 | uvig_244564 |
| SEQ ID NO: 475 | SEQ ID NO: 1249 | SEQ ID NO: 2023 | uvig_563601 |
| SEQ ID NO: 476 | SEQ ID NO: 1250 | SEQ ID NO: 2024 | uvig_203635 |
| SEQ ID NO: 477 | SEQ ID NO: 1251 | SEQ ID NO: 2025 | uvig_311594 |
| SEQ ID NO: 478 | SEQ ID NO: 1252 | SEQ ID NO: 2026 | uvig_85018 |
| SEQ ID NO: 479 | SEQ ID NO: 1253 | SEQ ID NO: 2027 | uvig_81090 |
| SEQ ID NO: 480 | SEQ ID NO: 1254 | SEQ ID NO: 2028 | uvig_81430 |
| SEQ ID NO: 481 | SEQ ID NO: 1255 | SEQ ID NO: 2029 | uvig_144265 |
| SEQ ID NO: 482 | SEQ ID NO: 1256 | SEQ ID NO: 2030 | uvig_597427 |
| SEQ ID NO: 483 | SEQ ID NO: 1257 | SEQ ID NO: 2031 | uvig_593889 |
| SEQ ID NO: 484 | SEQ ID NO: 1258 | SEQ ID NO: 2032 | uvig_55768 |
| SEQ ID NO: 485 | SEQ ID NO: 1259 | SEQ ID NO: 2033 | uvig_120053 |
| SEQ ID NO: 486 | SEQ ID NO: 1260 | SEQ ID NO: 2034 | uvig_441833 |
| SEQ ID NO: 487 | SEQ ID NO: 1261 | SEQ ID NO: 2035 | uvig_210070 |
| SEQ ID NO: 488 | SEQ ID NO: 1262 | SEQ ID NO: 2036 | uvig_236827 |
| SEQ ID NO: 489 | SEQ ID NO: 1263 | SEQ ID NO: 2037 | uvig_393304 |
| SEQ ID NO: 490 | SEQ ID NO: 1264 | SEQ ID NO: 2038 | uvig_55768 |
| SEQ ID NO: 491 | SEQ ID NO: 1265 | SEQ ID NO: 2039 | uvig_227545 |
| SEQ ID NO: 492 | SEQ ID NO: 1266 | SEQ ID NO: 2040 | uvig_285944 |
| SEQ ID NO: 493 | SEQ ID NO: 1267 | SEQ ID NO: 2041 | uvig_224805 |
| SEQ ID NO: 494 | SEQ ID NO: 1268 | SEQ ID NO: 2042 | uvig_395773 |
| SEQ ID NO: 495 | SEQ ID NO: 1269 | SEQ ID NO: 2043 | ivig_749 |
| SEQ ID NO: 496 | SEQ ID NO: 1270 | SEQ ID NO: 2044 | uvig_537547 |
| SEQ ID NO: 497 | SEQ ID NO: 1271 | SEQ ID NO: 2045 | uvig_449731 |
| SEQ ID NO: 498 | SEQ ID NO: 1272 | SEQ ID NO: 2046 | uvig_287167 |
| SEQ ID NO: 499 | SEQ ID NO: 1273 | SEQ ID NO: 2047 | uvig_189213 |
| SEQ ID NO: 500 | SEQ ID NO: 1274 | SEQ ID NO: 2048 | uvig_437676 |
| SEQ ID NO: 501 | SEQ ID NO: 1275 | SEQ ID NO: 2049 | uvig_535546 |
| SEQ ID NO: 502 | SEQ ID NO: 1276 | SEQ ID NO: 2050 | uvig_102394 |
| SEQ ID NO: 503 | SEQ ID NO: 1277 | SEQ ID NO: 2051 | uvig_318842 |
| SEQ ID NO: 504 | SEQ ID NO: 1278 | SEQ ID NO: 2052 | uvig_284065 |
| SEQ ID NO: 505 | SEQ ID NO: 1279 | SEQ ID NO: 2053 | uvig_495062 |
| SEQ ID NO: 506 | SEQ ID NO: 1280 | SEQ ID NO: 2054 | uvig_151327 |
| SEQ ID NO: 507 | SEQ ID NO: 1281 | SEQ ID NO: 2055 | uvig_61202 |
| SEQ ID NO: 508 | SEQ ID NO: 1282 | SEQ ID NO: 2056 | uvig_393944 |
| SEQ ID NO: 509 | SEQ ID NO: 1283 | SEQ ID NO: 2057 | uvig_53595 |
| SEQ ID NO: 510 | SEQ ID NO: 1284 | SEQ ID NO: 2058 | uvig_342637 |
| SEQ ID NO: 511 | SEQ ID NO: 1285 | SEQ ID NO: 2059 | uvig_173210 |
| SEQ ID NO: 512 | SEQ ID NO: 1286 | SEQ ID NO: 2060 | uvig_13498 |
| SEQ ID NO: 513 | SEQ ID NO: 1287 | SEQ ID NO: 2061 | uvig_313242 |
| SEQ ID NO: 514 | SEQ ID NO: 1288 | SEQ ID NO: 2062 | uvig_212380 |
| SEQ ID NO: 515 | SEQ ID NO: 1289 | SEQ ID NO: 2063 | uvig_34482 |
| SEQ ID NO: 516 | SEQ ID NO: 1290 | SEQ ID NO: 2064 | uvig_463416 |
| SEQ ID NO: 517 | SEQ ID NO: 1291 | SEQ ID NO: 2065 | uvig_346035 |
| SEQ ID NO: 518 | SEQ ID NO: 1292 | SEQ ID NO: 2066 | uvig_375837 |
| SEQ ID NO: 519 | SEQ ID NO: 1293 | SEQ ID NO: 2067 | uvig_324806 |
| SEQ ID NO: 520 | SEQ ID NO: 1294 | SEQ ID NO: 2068 | uvig_527025 |
| SEQ ID NO: 521 | SEQ ID NO: 1295 | SEQ ID NO: 2069 | uvig_450121 |
| SEQ ID NO: 522 | SEQ ID NO: 1296 | SEQ ID NO: 2070 | uvig_42449 |
| SEQ ID NO: 523 | SEQ ID NO: 1297 | SEQ ID NO: 2071 | uvig_396773 |
| SEQ ID NO: 524 | SEQ ID NO: 1298 | SEQ ID NO: 2072 | ivig_4126 |
| SEQ ID NO: 525 | SEQ ID NO: 1299 | SEQ ID NO: 2073 | uvig_591587 |
| SEQ ID NO: 526 | SEQ ID NO: 1300 | SEQ ID NO: 2074 | uvig_39360 |
| SEQ ID NO: 527 | SEQ ID NO: 1301 | SEQ ID NO: 2075 | uvig_460722 |
| SEQ ID NO: 528 | SEQ ID NO: 1302 | SEQ ID NO: 2076 | uvig_288194 |
| SEQ ID NO: 529 | SEQ ID NO: 1303 | SEQ ID NO: 2077 | uvig_296879 |
| SEQ ID NO: 530 | SEQ ID NO: 1304 | SEQ ID NO: 2078 | uvig_151499 |
| SEQ ID NO: 531 | SEQ ID NO: 1305 | SEQ ID NO: 2079 | uvig_539135 |
| SEQ ID NO: 532 | SEQ ID NO: 1306 | SEQ ID NO: 2080 | uvig_57166 |
| SEQ ID NO: 533 | SEQ ID NO: 1307 | SEQ ID NO: 2081 | uvig_577393 |
| SEQ ID NO: 534 | SEQ ID NO: 1308 | SEQ ID NO: 2082 | uvig_365918 |
| SEQ ID NO: 535 | SEQ ID NO: 1309 | SEQ ID NO: 2083 | uvig_57063 |
| SEQ ID NO: 536 | SEQ ID NO: 1310 | SEQ ID NO: 2084 | uvig_586504 |
| SEQ ID NO: 537 | SEQ ID NO: 1311 | SEQ ID NO: 2085 | uvig_135914 |
| SEQ ID NO: 538 | SEQ ID NO: 1312 | SEQ ID NO: 2086 | uvig_256011 |
| SEQ ID NO: 539 | SEQ ID NO: 1313 | SEQ ID NO: 2087 | uvig_150631 |
| SEQ ID NO: 540 | SEQ ID NO: 1314 | SEQ ID NO: 2088 | uvig_541260 |
| SEQ ID NO: 541 | SEQ ID NO: 1315 | SEQ ID NO: 2089 | uvig_484218 |
| SEQ ID NO: 542 | SEQ ID NO: 1316 | SEQ ID NO: 2090 | uvig_287622 |
| SEQ ID NO: 543 | SEQ ID NO: 1317 | SEQ ID NO: 2091 | uvig_138265 |
| SEQ ID NO: 544 | SEQ ID NO: 1318 | SEQ ID NO: 2092 | uvig_378326 |
| SEQ ID NO: 545 | SEQ ID NO: 1319 | SEQ ID NO: 2093 | uvig_598266 |
| SEQ ID NO: 546 | SEQ ID NO: 1320 | SEQ ID NO: 2094 | uvig_289409 |
| SEQ ID NO: 547 | SEQ ID NO: 1321 | SEQ ID NO: 2095 | uvig_57389 |
| SEQ ID NO: 548 | SEQ ID NO: 1322 | SEQ ID NO: 2096 | uvig_25407 |
| SEQ ID NO: 549 | SEQ ID NO: 1323 | SEQ ID NO: 2097 | uvig_351737 |
| SEQ ID NO: 550 | SEQ ID NO: 1324 | SEQ ID NO: 2098 | uvig_155989 |
| SEQ ID NO: 551 | SEQ ID NO: 1325 | SEQ ID NO: 2099 | uvig_321891 |
| SEQ ID NO: 552 | SEQ ID NO: 1326 | SEQ ID NO: 2100 | uvig_151301 |
| SEQ ID NO: 553 | SEQ ID NO: 1327 | SEQ ID NO: 2101 | uvig_522525 |
| SEQ ID NO: 554 | SEQ ID NO: 1328 | SEQ ID NO: 2102 | uvig_517329 |
| SEQ ID NO: 555 | SEQ ID NO: 1329 | SEQ ID NO: 2103 | uvig_11457 |
| SEQ ID NO: 556 | SEQ ID NO: 1330 | SEQ ID NO: 2104 | uvig_285452 |
| SEQ ID NO: 557 | SEQ ID NO: 1331 | SEQ ID NO: 2105 | uvig_325705 |
| SEQ ID NO: 558 | SEQ ID NO: 1332 | SEQ ID NO: 2106 | uvig_205806 |
| SEQ ID NO: 559 | SEQ ID NO: 1333 | SEQ ID NO: 2107 | uvig_119010 |
| SEQ ID NO: 560 | SEQ ID NO: 1334 | SEQ ID NO: 2108 | uvig_115965 |
| SEQ ID NO: 561 | SEQ ID NO: 1335 | SEQ ID NO: 2109 | ivig_3513 |
| SEQ ID NO: 562 | SEQ ID NO: 1336 | SEQ ID NO: 2110 | uvig_598110 |
| SEQ ID NO: 563 | SEQ ID NO: 1337 | SEQ ID NO: 2111 | uvig_161644 |
| SEQ ID NO: 564 | SEQ ID NO: 1338 | SEQ ID NO: 2112 | uvig_116390 |
| SEQ ID NO: 565 | SEQ ID NO: 1339 | SEQ ID NO: 2113 | uvig_236553 |
| SEQ ID NO: 566 | SEQ ID NO: 1340 | SEQ ID NO: 2114 | uvig_370958 |
| SEQ ID NO: 567 | SEQ ID NO: 1341 | SEQ ID NO: 2115 | uvig_299740 |
| SEQ ID NO: 568 | SEQ ID NO: 1342 | SEQ ID NO: 2116 | ivig_1066 |
| SEQ ID NO: 569 | SEQ ID NO: 1343 | SEQ ID NO: 2117 | uvig_441476 |
| SEQ ID NO: 570 | SEQ ID NO: 1344 | SEQ ID NO: 2118 | uvig_112613 |
| SEQ ID NO: 571 | SEQ ID NO: 1345 | SEQ ID NO: 2119 | uvig_184056 |
| SEQ ID NO: 572 | SEQ ID NO: 1346 | SEQ ID NO: 2120 | uvig_111591 |
| SEQ ID NO: 573 | SEQ ID NO: 1347 | SEQ ID NO: 2121 | uvig_577010 |
| SEQ ID NO: 574 | SEQ ID NO: 1348 | SEQ ID NO: 2122 | uvig_476025 |
| SEQ ID NO: 575 | SEQ ID NO: 1349 | SEQ ID NO: 2123 | uvig_382772 |
| SEQ ID NO: 576 | SEQ ID NO: 1350 | SEQ ID NO: 2124 | uvig_512136 |
| SEQ ID NO: 577 | SEQ ID NO: 1351 | SEQ ID NO: 2125 | uvig_156529 |
| SEQ ID NO: 578 | SEQ ID NO: 1352 | SEQ ID NO: 2126 | uvig_594437 |
| SEQ ID NO: 579 | SEQ ID NO: 1353 | SEQ ID NO: 2127 | uvig_366074 |
| SEQ ID NO: 580 | SEQ ID NO: 1354 | SEQ ID NO: 2128 | uvig_573612 |
| SEQ ID NO: 581 | SEQ ID NO: 1355 | SEQ ID NO: 2129 | uvig_191392 |
| SEQ ID NO: 582 | SEQ ID NO: 1356 | SEQ ID NO: 2130 | uvig_587167 |
| SEQ ID NO: 583 | SEQ ID NO: 1357 | SEQ ID NO: 2131 | uvig_595287 |
| SEQ ID NO: 584 | SEQ ID NO: 1358 | SEQ ID NO: 2132 | uvig_329173 |
| SEQ ID NO: 585 | SEQ ID NO: 1359 | SEQ ID NO: 2133 | uvig_170733 |
| SEQ ID NO: 586 | SEQ ID NO: 1360 | SEQ ID NO: 2134 | uvig_400465 |
| SEQ ID NO: 587 | SEQ ID NO: 1361 | SEQ ID NO: 2135 | uvig_393882 |
| SEQ ID NO: 588 | SEQ ID NO: 1362 | SEQ ID NO: 2136 | uvig_587924 |
| SEQ ID NO: 589 | SEQ ID NO: 1363 | SEQ ID NO: 2137 | uvig_151182 |
| SEQ ID NO: 590 | SEQ ID NO: 1364 | SEQ ID NO: 2138 | uvig_383745 |
| SEQ ID NO: 591 | SEQ ID NO: 1365 | SEQ ID NO: 2139 | uvig_64089 |
| SEQ ID NO: 592 | SEQ ID NO: 1366 | SEQ ID NO: 2140 | uvig_563074 |
| SEQ ID NO: 593 | SEQ ID NO: 1367 | SEQ ID NO: 2141 | uvig_256936 |
| SEQ ID NO: 594 | SEQ ID NO: 1368 | SEQ ID NO: 2142 | uvig_110275 |
| SEQ ID NO: 595 | SEQ ID NO: 1369 | SEQ ID NO: 2143 | uvig_239325 |
| SEQ ID NO: 596 | SEQ ID NO: 1370 | SEQ ID NO: 2144 | uvig_578984 |
| SEQ ID NO: 597 | SEQ ID NO: 1371 | SEQ ID NO: 2145 | uvig_316826 |
| SEQ ID NO: 598 | SEQ ID NO: 1372 | SEQ ID NO: 2146 | uvig_86231 |
| SEQ ID NO: 599 | SEQ ID NO: 1373 | SEQ ID NO: 2147 | uvig_125074 |
| SEQ ID NO: 600 | SEQ ID NO: 1374 | SEQ ID NO: 2148 | uvig_337673 |
| SEQ ID NO: 601 | SEQ ID NO: 1375 | SEQ ID NO: 2149 | uvig_595969 |
| SEQ ID NO: 602 | SEQ ID NO: 1376 | SEQ ID NO: 2150 | uvig_177087 |
| SEQ ID NO: 603 | SEQ ID NO: 1377 | SEQ ID NO: 2151 | uvig_594539 |
| SEQ ID NO: 604 | SEQ ID NO: 1378 | SEQ ID NO: 2152 | uvig_236070 |
| SEQ ID NO: 605 | SEQ ID NO: 1379 | SEQ ID NO: 2153 | uvig_171405 |
| SEQ ID NO: 606 | SEQ ID NO: 1380 | SEQ ID NO: 2154 | uvig_578207 |
| SEQ ID NO: 607 | SEQ ID NO: 1381 | SEQ ID NO: 2155 | uvig_354904 |
| SEQ ID NO: 608 | SEQ ID NO: 1382 | SEQ ID NO: 2156 | uvig_15514 |
| SEQ ID NO: 609 | SEQ ID NO: 1383 | SEQ ID NO: 2157 | uvig_83898 |
| SEQ ID NO: 610 | SEQ ID NO: 1384 | SEQ ID NO: 2158 | uvig_246969 |
| SEQ ID NO: 611 | SEQ ID NO: 1385 | SEQ ID NO: 2159 | uvig_187146 |
| SEQ ID NO: 612 | SEQ ID NO: 1386 | SEQ ID NO: 2160 | uvig_132785 |
| SEQ ID NO: 613 | SEQ ID NO: 1387 | SEQ ID NO: 2161 | uvig_293930 |
| SEQ ID NO: 614 | SEQ ID NO: 1388 | SEQ ID NO: 2162 | uvig_306774 |
| SEQ ID NO: 615 | SEQ ID NO: 1389 | SEQ ID NO: 2163 | uvig_368839 |
| SEQ ID NO: 616 | SEQ ID NO: 1390 | SEQ ID NO: 2164 | uvig_105444 |
| SEQ ID NO: 617 | SEQ ID NO: 1391 | SEQ ID NO: 2165 | uvig_381374 |
| SEQ ID NO: 618 | SEQ ID NO: 1392 | SEQ ID NO: 2166 | uvig_330914 |
| SEQ ID NO: 619 | SEQ ID NO: 1393 | SEQ ID NO: 2167 | uvig_394534 |
| SEQ ID NO: 620 | SEQ ID NO: 1394 | SEQ ID NO: 2168 | uvig_582769 |
| SEQ ID NO: 621 | SEQ ID NO: 1395 | SEQ ID NO: 2169 | uvig_578663 |
| SEQ ID NO: 622 | SEQ ID NO: 1396 | SEQ ID NO: 2170 | uvig_103894 |
| SEQ ID NO: 623 | SEQ ID NO: 1397 | SEQ ID NO: 2171 | uvig_263922 |
| SEQ ID NO: 624 | SEQ ID NO: 1398 | SEQ ID NO: 2172 | uvig_156514 |
| SEQ ID NO: 625 | SEQ ID NO: 1399 | SEQ ID NO: 2173 | uvig_454524 |
| SEQ ID NO: 626 | SEQ ID NO: 1400 | SEQ ID NO: 2174 | uvig_204816 |
| SEQ ID NO: 627 | SEQ ID NO: 1401 | SEQ ID NO: 2175 | uvig_396721 |
| SEQ ID NO: 628 | SEQ ID NO: 1402 | SEQ ID NO: 2176 | uvig_593897 |
| SEQ ID NO: 629 | SEQ ID NO: 1403 | SEQ ID NO: 2177 | uvig_440207 |
| SEQ ID NO: 630 | SEQ ID NO: 1404 | SEQ ID NO: 2178 | uvig_578394 |
| SEQ ID NO: 631 | SEQ ID NO: 1405 | SEQ ID NO: 2179 | uvig_370045 |
| SEQ ID NO: 632 | SEQ ID NO: 1406 | SEQ ID NO: 2180 | uvig_93245 |
| SEQ ID NO: 633 | SEQ ID NO: 1407 | SEQ ID NO: 2181 | uvig_151615 |
| SEQ ID NO: 634 | SEQ ID NO: 1408 | SEQ ID NO: 2182 | uvig_327878 |
| SEQ ID NO: 635 | SEQ ID NO: 1409 | SEQ ID NO: 2183 | uvig_176611 |
| SEQ ID NO: 636 | SEQ ID NO: 1410 | SEQ ID NO: 2184 | uvig_154256 |
| SEQ ID NO: 637 | SEQ ID NO: 1411 | SEQ ID NO: 2185 | uvig_596302 |
| SEQ ID NO: 638 | SEQ ID NO: 1412 | SEQ ID NO: 2186 | uvig_118876 |
| SEQ ID NO: 639 | SEQ ID NO: 1413 | SEQ ID NO: 2187 | uvig_375705 |
| SEQ ID NO: 640 | SEQ ID NO: 1414 | SEQ ID NO: 2188 | QGJ86143.1 |
| SEQ ID NO: 641 | SEQ ID NO: 1415 | SEQ ID NO: 2189 | MT658802 |
| SEQ ID NO: 642 | SEQ ID NO: 1416 | SEQ ID NO: 2190 | QGJ86433.1 |
| SEQ ID NO: 643 | SEQ ID NO: 1417 | SEQ ID NO: 2191 | uvig_582533 |
| SEQ ID NO: 644 | SEQ ID NO: 1418 | SEQ ID NO: 2192 | QGJ85967.1 |
| SEQ ID NO: 645 | SEQ ID NO: 1419 | SEQ ID NO: 2193 | MZ322017 |
| SEQ ID NO: 646 | SEQ ID NO: 1420 | SEQ ID NO: 2194 | MW584159 |
| SEQ ID NO: 647 | SEQ ID NO: 1421 | SEQ ID NO: 2195 | CP063968 |
| SEQ ID NO: 648 | SEQ ID NO: 1422 | SEQ ID NO: 2196 | uvig_364726 |
| SEQ ID NO: 649 | SEQ ID NO: 1423 | SEQ ID NO: 2197 | uvig_118757 |
| SEQ ID NO: 650 | SEQ ID NO: 1424 | SEQ ID NO: 2198 | uvig_442496 |
| SEQ ID NO: 651 | SEQ ID NO: 1425 | SEQ ID NO: 2199 | uvig_425122 |
| SEQ ID NO: 652 | SEQ ID NO: 1426 | SEQ ID NO: 2200 | uvig_151019 |
| SEQ ID NO: 653 | SEQ ID NO: 1427 | SEQ ID NO: 2201 | uvig_570177 |
| SEQ ID NO: 654 | SEQ ID NO: 1428 | SEQ ID NO: 2202 | HQ906663 |
| SEQ ID NO: 655 | SEQ ID NO: 1429 | SEQ ID NO: 2203 | CP017837 |
| SEQ ID NO: 656 | SEQ ID NO: 1430 | SEQ ID NO: 2204 | MZ308445 |
| SEQ ID NO: 657 | SEQ ID NO: 1431 | SEQ ID NO: 2205 | MN585974 |
| SEQ ID NO: 658 | SEQ ID NO: 1432 | SEQ ID NO: 2206 | uvig_323824 |
| SEQ ID NO: 659 | SEQ ID NO: 1433 | SEQ ID NO: 2207 | uvig_314864 |
| SEQ ID NO: 660 | SEQ ID NO: 1434 | SEQ ID NO: 2208 | uvig_31244 |
| SEQ ID NO: 661 | SEQ ID NO: 1435 | SEQ ID NO: 2209 | uvig_328850 |
| SEQ ID NO: 662 | SEQ ID NO: 1436 | SEQ ID NO: 2210 | uvig_323858 |
| SEQ ID NO: 663 | SEQ ID NO: 1437 | SEQ ID NO: 2211 | uvig_520818 |
| SEQ ID NO: 664 | SEQ ID NO: 1438 | SEQ ID NO: 2212 | uvig_199031 |
| SEQ ID NO: 665 | SEQ ID NO: 1439 | SEQ ID NO: 2213 | uvig_17362 |
| SEQ ID NO: 666 | SEQ ID NO: 1440 | SEQ ID NO: 2214 | uvig_135797 |
| SEQ ID NO: 667 | SEQ ID NO: 1441 | SEQ ID NO: 2215 | uvig_240645 |
| SEQ ID NO: 668 | SEQ ID NO: 1442 | SEQ ID NO: 2216 | uvig_358290 |
| SEQ ID NO: 669 | SEQ ID NO: 1443 | SEQ ID NO: 2217 | uvig_357839 |
| SEQ ID NO: 670 | SEQ ID NO: 1444 | SEQ ID NO: 2218 | uvig_263250 |
| SEQ ID NO: 671 | SEQ ID NO: 1445 | SEQ ID NO: 2219 | uvig_148588 |
| SEQ ID NO: 672 | SEQ ID NO: 1446 | SEQ ID NO: 2220 | uvig_171237 |
| SEQ ID NO: 673 | SEQ ID NO: 1447 | SEQ ID NO: 2221 | ivig_3933 |
| SEQ ID NO: 674 | SEQ ID NO: 1448 | SEQ ID NO: 2222 | uvig_584312 |
| SEQ ID NO: 675 | SEQ ID NO: 1449 | SEQ ID NO: 2223 | uvig_80961 |
| SEQ ID NO: 676 | SEQ ID NO: 1450 | SEQ ID NO: 2224 | uvig_10984 |
| SEQ ID NO: 677 | SEQ ID NO: 1451 | SEQ ID NO: 2225 | uvig_226352 |
| SEQ ID NO: 678 | SEQ ID NO: 1452 | SEQ ID NO: 2226 | uvig_143228 |
| SEQ ID NO: 679 | SEQ ID NO: 1453 | SEQ ID NO: 2227 | uvig_579072 |
| SEQ ID NO: 680 | SEQ ID NO: 1454 | SEQ ID NO: 2228 | uvig_596872 |
| SEQ ID NO: 681 | SEQ ID NO: 1455 | SEQ ID NO: 2229 | uvig_381385 |
| SEQ ID NO: 682 | SEQ ID NO: 1456 | SEQ ID NO: 2230 | uvig_146439 |
| SEQ ID NO: 683 | SEQ ID NO: 1457 | SEQ ID NO: 2231 | uvig_423324 |
| SEQ ID NO: 684 | SEQ ID NO: 1458 | SEQ ID NO: 2232 | uvig_441018 |
| SEQ ID NO: 685 | SEQ ID NO: 1459 | SEQ ID NO: 2233 | uvig_426061 |
| SEQ ID NO: 686 | SEQ ID NO: 1460 | SEQ ID NO: 2234 | uvig_287690 |
| SEQ ID NO: 687 | SEQ ID NO: 1461 | SEQ ID NO: 2235 | uvig_61588 |
| SEQ ID NO: 688 | SEQ ID NO: 1462 | SEQ ID NO: 2236 | ivig_3872 |
| SEQ ID NO: 689 | SEQ ID NO: 1463 | SEQ ID NO: 2237 | uvig_541020 |
| SEQ ID NO: 690 | SEQ ID NO: 1464 | SEQ ID NO: 2238 | uvig_396371 |
| SEQ ID NO: 691 | SEQ ID NO: 1465 | SEQ ID NO: 2239 | uvig_301458 |
| SEQ ID NO: 692 | SEQ ID NO: 1466 | SEQ ID NO: 2240 | uvig_430479 |
| SEQ ID NO: 693 | SEQ ID NO: 1467 | SEQ ID NO: 2241 | uvig_425764 |
| SEQ ID NO: 694 | SEQ ID NO: 1468 | SEQ ID NO: 2242 | uvig_128102 |
| SEQ ID NO: 695 | SEQ ID NO: 1469 | SEQ ID NO: 2243 | uvig_294201 |
| SEQ ID NO: 696 | SEQ ID NO: 1470 | SEQ ID NO: 2244 | uvig_174822 |
| SEQ ID NO: 697 | SEQ ID NO: 1471 | SEQ ID NO: 2245 | ivig_1533 |
| SEQ ID NO: 698 | SEQ ID NO: 1472 | SEQ ID NO: 2246 | uvig_317982 |
| SEQ ID NO: 699 | SEQ ID NO: 1473 | SEQ ID NO: 2247 | uvig_598484 |
| SEQ ID NO: 700 | SEQ ID NO: 1474 | SEQ ID NO: 2248 | uvig_434341 |
| SEQ ID NO: 701 | SEQ ID NO: 1475 | SEQ ID NO: 2249 | uvig_323835 |
| SEQ ID NO: 702 | SEQ ID NO: 1476 | SEQ ID NO: 2250 | uvig_400028 |
| SEQ ID NO: 703 | SEQ ID NO: 1477 | SEQ ID NO: 2251 | uvig_100684 |
| SEQ ID NO: 704 | SEQ ID NO: 1478 | SEQ ID NO: 2252 | uvig_95947 |
| SEQ ID NO: 705 | SEQ ID NO: 1479 | SEQ ID NO: 2253 | uvig_392101 |
| SEQ ID NO: 706 | SEQ ID NO: 1480 | SEQ ID NO: 2254 | uvig_208975 |
| SEQ ID NO: 707 | SEQ ID NO: 1481 | SEQ ID NO: 2255 | uvig_586184 |
| SEQ ID NO: 708 | SEQ ID NO: 1482 | SEQ ID NO: 2256 | uvig_22576 |
| SEQ ID NO: 709 | SEQ ID NO: 1483 | SEQ ID NO: 2257 | uvig_581097 |
| SEQ ID NO: 710 | SEQ ID NO: 1484 | SEQ ID NO: 2258 | uvig_483710 |
| SEQ ID NO: 711 | SEQ ID NO: 1485 | SEQ ID NO: 2259 | uvig_255651 |
| SEQ ID NO: 712 | SEQ ID NO: 1486 | SEQ ID NO: 2260 | uvig_453602 |
| SEQ ID NO: 713 | SEQ ID NO: 1487 | SEQ ID NO: 2261 | uvig_370654 |
| SEQ ID NO: 714 | SEQ ID NO: 1488 | SEQ ID NO: 2262 | uvig_208980 |
| SEQ ID NO: 715 | SEQ ID NO: 1489 | SEQ ID NO: 2263 | uvig_127373 |
| SEQ ID NO: 716 | SEQ ID NO: 1490 | SEQ ID NO: 2264 | uvig_311977 |
| SEQ ID NO: 717 | SEQ ID NO: 1491 | SEQ ID NO: 2265 | uvig_349522 |
| SEQ ID NO: 718 | SEQ ID NO: 1492 | SEQ ID NO: 2266 | uvig_53024 |
| SEQ ID NO: 719 | SEQ ID NO: 1493 | SEQ ID NO: 2267 | uvig_595447 |
| SEQ ID NO: 720 | SEQ ID NO: 1494 | SEQ ID NO: 2268 | uvig_231300 |
| SEQ ID NO: 721 | SEQ ID NO: 1495 | SEQ ID NO: 2269 | uvig_476161 |
| SEQ ID NO: 722 | SEQ ID NO: 1496 | SEQ ID NO: 2270 | uvig_590668 |
| SEQ ID NO: 723 | SEQ ID NO: 1497 | SEQ ID NO: 2271 | uvig_150568 |
| SEQ ID NO: 724 | SEQ ID NO: 1498 | SEQ ID NO: 2272 | uvig_76620 |
| SEQ ID NO: 725 | SEQ ID NO: 1499 | SEQ ID NO: 2273 | uvig_419578 |
| SEQ ID NO: 726 | SEQ ID NO: 1500 | SEQ ID NO: 2274 | uvig_282819 |
| SEQ ID NO: 727 | SEQ ID NO: 1501 | SEQ ID NO: 2275 | uvig_577253 |
| SEQ ID NO: 728 | SEQ ID NO: 1502 | SEQ ID NO: 2276 | uvig_257578 |
| SEQ ID NO: 729 | SEQ ID NO: 1503 | SEQ ID NO: 2277 | uvig_437230 |
| SEQ ID NO: 730 | SEQ ID NO: 1504 | SEQ ID NO: 2278 | uvig_594175 |
| SEQ ID NO: 731 | SEQ ID NO: 1505 | SEQ ID NO: 2279 | uvig_593397 |
| SEQ ID NO: 732 | SEQ ID NO: 1506 | SEQ ID NO: 2280 | uvig_225515 |
| SEQ ID NO: 733 | SEQ ID NO: 1507 | SEQ ID NO: 2281 | uvig_107724 |
| SEQ ID NO: 734 | SEQ ID NO: 1508 | SEQ ID NO: 2282 | uvig_286002 |
| SEQ ID NO: 735 | SEQ ID NO: 1509 | SEQ ID NO: 2283 | uvig_25355 |
| SEQ ID NO: 736 | SEQ ID NO: 1510 | SEQ ID NO: 2284 | uvig_457901 |
| SEQ ID NO: 737 | SEQ ID NO: 1511 | SEQ ID NO: 2285 | uvig_247278 |
| SEQ ID NO: 738 | SEQ ID NO: 1512 | SEQ ID NO: 2286 | uvig_374979 |
| SEQ ID NO: 739 | SEQ ID NO: 1513 | SEQ ID NO: 2287 | uvig_140430 |
| SEQ ID NO: 740 | SEQ ID NO: 1514 | SEQ ID NO: 2288 | uvig_249187 |
| SEQ ID NO: 741 | SEQ ID NO: 1515 | SEQ ID NO: 2289 | uvig_199462 |
| SEQ ID NO: 742 | SEQ ID NO: 1516 | SEQ ID NO: 2290 | uvig_104410 |
| SEQ ID NO: 743 | SEQ ID NO: 1517 | SEQ ID NO: 2291 | uvig_324974 |
| SEQ ID NO: 744 | SEQ ID NO: 1518 | SEQ ID NO: 2292 | uvig_214087 |
| SEQ ID NO: 745 | SEQ ID NO: 1519 | SEQ ID NO: 2293 | uvig_13945 |
| SEQ ID NO: 746 | SEQ ID NO: 1520 | SEQ ID NO: 2294 | uvig_11401 |
| SEQ ID NO: 747 | SEQ ID NO: 1521 | SEQ ID NO: 2295 | uvig_81430 |
| SEQ ID NO: 748 | SEQ ID NO: 1522 | SEQ ID NO: 2296 | uvig_250870 |
| SEQ ID NO: 749 | SEQ ID NO: 1523 | SEQ ID NO: 2297 | uvig_590864 |
| SEQ ID NO: 750 | SEQ ID NO: 1524 | SEQ ID NO: 2298 | uvig_135439 |
| SEQ ID NO: 751 | SEQ ID NO: 1525 | SEQ ID NO: 2299 | uvig_166254 |
| SEQ ID NO: 752 | SEQ ID NO: 1526 | SEQ ID NO: 2300 | uvig_422831 |
| SEQ ID NO: 753 | SEQ ID NO: 1527 | SEQ ID NO: 2301 | ivig_3102 |
| SEQ ID NO: 754 | SEQ ID NO: 1528 | SEQ ID NO: 2302 | uvig_404379 |
| SEQ ID NO: 755 | SEQ ID NO: 1529 | SEQ ID NO: 2303 | uvig_554169 |
| SEQ ID NO: 756 | SEQ ID NO: 1530 | SEQ ID NO: 2304 | uvig_173267 |
| SEQ ID NO: 757 | SEQ ID NO: 1531 | SEQ ID NO: 2305 | uvig_110260 |
| SEQ ID NO: 758 | SEQ ID NO: 1532 | SEQ ID NO: 2306 | ivig_1400 |
| SEQ ID NO: 759 | SEQ ID NO: 1533 | SEQ ID NO: 2307 | uvig_144279 |
| SEQ ID NO: 760 | SEQ ID NO: 1534 | SEQ ID NO: 2308 | uvig_193710 |
| SEQ ID NO: 761 | SEQ ID NO: 1535 | SEQ ID NO: 2309 | uvig_256500 |
| SEQ ID NO: 762 | SEQ ID NO: 1536 | SEQ ID NO: 2310 | uvig_206777 |
| SEQ ID NO: 763 | SEQ ID NO: 1537 | SEQ ID NO: 2311 | uvig_158624 |
| SEQ ID NO: 764 | SEQ ID NO: 1538 | SEQ ID NO: 2312 | uvig_46185 |
| SEQ ID NO: 765 | SEQ ID NO: 1539 | SEQ ID NO: 2313 | uvig_593892 |
| SEQ ID NO: 766 | SEQ ID NO: 1540 | SEQ ID NO: 2314 | uvig_36383 |
| SEQ ID NO: 767 | SEQ ID NO: 1541 | SEQ ID NO: 2315 | uvig_384338 |
| SEQ ID NO: 768 | SEQ ID NO: 1542 | SEQ ID NO: 2316 | uvig_329211 |
| SEQ ID NO: 769 | SEQ ID NO: 1543 | SEQ ID NO: 2317 | uvig_163634 |
| SEQ ID NO: 770 | SEQ ID NO: 1544 | SEQ ID NO: 2318 | uvig_351740 |
| SEQ ID NO: 771 | SEQ ID NO: 1545 | SEQ ID NO: 2319 | QGJ86668.1 |
| SEQ ID NO: 772 | SEQ ID NO: 1546 | SEQ ID NO: 2320 | uvig_587893 |
| SEQ ID NO: 773 | SEQ ID NO: 1547 | SEQ ID NO: 2321 | uvig_195542 |
| SEQ ID NO: 774 | SEQ ID NO: 1548 | SEQ ID NO: 2322 | uvig_40909 |

### Heterologous Nucleic Acids

[0129] A large serine recombinase can mediate an integration of a heterologous nucleic acid molecule into the specific site in the target genome via the attP-attB complex. The heterologous nucleic acid can be a DNA molecule, RNA molecule, oligonucleotide, which is single-, double-, or multi-stranded DNA or RNA, genomic DNA, cDNA, DNA-RNA hybrids, or a polymer comprising purine and pyrimidine bases or other natural, chemically or biochemically modified, non-natural, or derivatized nucleotide bases either deoxyribonucleotides, ribonucleotides, or analogs thereof. heterologous nucleic acid molecules may have three-dimensional structure, may include coding or non-coding regions, may include exons, introns, mRNA, tRNA, rRNA, siRNA, shRNA, miRNA, ribozymes, cDNA, plasmids, vectors, exogenous sequences, endogenous sequences. A heterologous nucleic acid nucleic acid can comprise modified nucleotides, include methylated nucleotides, or nucleotide analogs. In some embodiments, a heterologous nucleic acid may be interspersed with non-nucleic acid components.

[0130] In some embodiments, the heterologous nucleic acid molecule may contain an open reading frame encoding a polypeptide of in heterologous nucleic acid molecule comprises a Kozak sequence, an internal ribosome entry site, a start codon, a stop codon, one or more exons, and one or more introns. In some embodiments, the heterologous nucleic acid molecule comprises a splice acceptor site, and/or a splice donor site. In some embodiments, the heterologous nucleic acid molecule comprises a 3′ UTR region, a 5′ UTR region, a microRNA binding site, a microRNA sequence, a siRNA sequence, a guide RNA sequence, a piwi RNA sequence, a poly(A) tail, e.g., downstream of the stop codon of an open reading frame. In some embodiments, the heterologous nucleic acid molecule comprises a promoter (e.g., constitute or inducible promoter), a eukaryotic transcriptional terminator, one or more translation enhancing elements. In some embodiments the promoter is an RNA polymerase I promoter, RNA polymerase II promoter, or RNA polymerase III promoter. In some embodiments, the donor nucleic acid molecule comprises a self-cleaving peptide such as a T2A or P2A site.

[0131] The donor nucleic acid molecule can be any size. In some embodiments, the heterologous nucleic acid molecule is about 10 bp-20 kb, about 100 bp-15 kb, or about 1 kb-10 kb. In some examples, the donor nucleic acid molecule is 10 bp, 25 bp, 50 bp, 100 bp, 200 bp, 500 bp, 800 bp, 1,000 bp, 1.5 kb, 2.0 kb, 3.0 kb, 5.0 kb, 7.5 kb, 10 kb, 12 kb, 15 kb, 20 kb or 30 kb in length.

[0132] In some embodiments, the heterologous nucleic acid molecule comprises a sequence having at least 50%, 60%, 70%, 80%, 85%, 90%, 95%, 97%, 98%, 99% or 100% identity to a target DNA sequence in the target genome, or a portion thereof.

[0133] As non-limiting examples, the heterologous gene or heterologous nucleic acid molecule comprises a polynucleotide sequence encoding a chimeric antigen receptor (CAR). The term “chimeric antigen receptor” or “CAR,” as used herein, refers to an artificial T cell surface receptor that is engineered to be expressed on an immune effector cell and specifically bind an antigen. CARs may be used as a therapy with adoptive cell transfer. Monocytes are removed from a patient (blood, tumor or ascites fluid) and modified so that they express receptors specific to a particular form of antigen. In some embodiments, the CARs have been expressed with specificity to a tumor associated antigen, for example. CARs may also comprise an intracellular activation domain, a transmembrane domain and an extracellular domain comprising a tumor associated antigen binding region. In some aspects, CARs comprise fusions of single-chain variable fragments (scFv) derived monoclonal antibodies, fused to CD3-zeta transmembrane and intracellular domain. The specificity of CAR designs may be derived from ligands of receptors (e.g., peptides). In some embodiments, a CAR can target cancers by redirecting a monocyte/macrophage expressing the CAR specific for tumor associated antigens.

[0134] In some embodiments, the co-stimulatory domain of the CAR can include, but is not limited to, a domain derived from CD7, B7-1 (CD80), B7-2 (CD86), PD-L1, PD-L2, 4-1BBL, OX40L, inducible costimulatory ligand (ICOS-L), intercellular adhesion molecule (ICAM), CD30L, CD40, CD70, CD83, HLA-G, MICA, MICB, HVEM, lymphotoxin beta receptor, 3/TR6, ILT3, ILT4, HVEM, an agonist or antibody that binds Toll ligand receptor and a ligand that specifically binds with B7-H3.

[0135] The CAR may comprise an antigen binding domain that binds to a tumor antigen, such as an antigen that is specific for a tumor or cancer of interest. In one embodiment, the tumor antigen of the present invention comprises one or more antigenic cancer epitopes. Nonlimiting examples of tumor associated antigens include CD19; CD123; CD22; CD30; CD171; CS-1 (also referred to as CD2 subset 1, CRACC, SLAMF7, CD319, and 19A24); C-type lectin-like molecule-1 (CLL-1 or CLECL1); CD33; epidermal growth factor receptor variant III (EGFRvIII); ganglioside G2 (GD2); ganglioside GD3 (aNeu5Ac(2-8) aNeu5A (2-3)bDGalp(1-4)bDGlcp(1-1)Cer); TNF receptor family member B cell maturation (BCMA); Tn antigen ((Tn Ag) or (GalNAca-Ser/Thr)); prostate-specific membrane antigen (PSMA); Receptor tyrosine kinase-like orphan receptor 1 (ROR1); Fms-Like Tyrosine Kinase 3 (FLT3); Tumor-associated glycoprotein 72 (TAG72); CD38; CD44v6; Carcinoembryonic antigen (CEA); Epithelial cell adhesion molecule (EPCAM); B7H3 (CD276); KIT (CD117); Interleukin-13 receptor subunit alpha-2 (IL-13Ra2 or CD213A2); Mesothelin; Interleukin 11 receptor alpha (IL-11Ra); prostate stem cell antigen (PSCA); Protease Serine 21 (Testisin or PRSS21); vascular endothelial growth factor receptor 2 (VEGFR2); Lewis (Y) antigen; CD24; Platelet-derived growth factor receptor beta (PDGFR-beta); Stage-specific embryonic antigen-4 (SSEA-4); CD20; Folate receptor alpha; Receptor tyrosine-protein kinase ERBB2 (Her2/neu); Mucin 1, cell surface associated (MUC1); epidermal growth factor receptor (EGFR); neural cell adhesion molecule (NCAM); Prostase; prostatic acid phosphatase (PAP); elongation factor 2 mutated (ELF2M); Ephrin B2; fibroblast activation protein alpha (FAP); insulin-like growth factor 1 receptor (IGF-I receptor), carbonic anhydrase IX (CAIX); Proteasome (Prosome, Macropain) Subunit, Beta Type, (LMP2); glycoprotein 100 (gp100); oncogene fusion protein consisting of breakpoint cluster region (BCR) and Abelson murine leukemia viral oncogene homolog 1 (Abl) (bcr-abl); tyrosinase; ephrin type-A receptor 2 (EphA2); Fucosyl GM1; sialyl Lewis adhesion molecule (sLe); ganglioside GM3 (aNeu5Ac(2-3) bDGalp(1-4)bDGlcp(1-1)Cer); transglutaminase 5 (TGS5); high molecular weight-melanoma-associated antigen (HMWMAA); o-acetyl-GD2 ganglioside (OAcGD2); Folate receptor beta; tumor endothelial marker 1 (TEM1/CD248); tumor endothelial marker 7-related (TEM7R); claudin 6 (CLDN6); thyroid stimulating hormone receptor (TSHR); G protein-coupled receptor class C group 5, member D (GPRC5D); chromosome X open reading frame 61 (CXORF61); CD97; CD179a; anaplastic lymphoma kinase (ALK); Polysialic acid; placenta-specific 1 (PLAC1); hexasaccharide portion of globoH glycoceramide (GloboH); mammary gland differentiation antigen (NY-BR-1); uroplakin 2 (UPK2); Hepatitis A virus cellular receptor 1 (HAVCR1); adrenoceptor beta 3 (ADRB3); pannexin 3 (PANX3); G protein-coupled receptor 20 (GPR20); lymphocyte antigen 6 complex, locus K 9 (LY6K); Olfactory receptor 51E2 (OR51E2); TCR Gamma Alternate Reading Frame Protein (TARP); Wilms tumor protein (WT1); Cancer/testis antigen 1 (NY-ESO-1); Cancer/testis antigen 2 (LAGE-1a); Melanoma-associated antigen 1 (MAGE-A1); ETS translocation-variant gene 6, located on chromosome 12p (ETV6-AML); sperm protein 17 (SPA17); X Antigen Family, Member 1A (XAGE1); angiopoietin-binding cell surface receptor 2 (Tie 2); melanoma cancer testis antigen-1 (MAD-CT-1); melanoma cancer testis antigen-2 (MAD-CT-2); Fos-related antigen 1; tumor protein p53 (p53); p53 mutant; prostein; surviving; telomerase; prostate carcinoma tumor antigen-1 (PCTA-1 or Galectin 8), melanoma antigen recognized by T cells 1 (MelanA or MART1); Rat sarcoma (Ras) mutant; human Telomerase reverse transcriptase (hTERT); sarcoma translocation breakpoints; melanoma inhibitor of apoptosis (ML-IAP); ERG (transmembrane protease, serine 2 (TMPRSS2) ETS fusion gene); N-Acetyl glucosaminyl-transferase V (NA17); paired box protein Pax-3 (PAX3); Androgen receptor; Cyclin B1; v-myc avian myelocytomatosis viral oncogene neuroblastoma derived homolog (MYCN); Ras Homolog Family Member C (RhoC); Tyrosinase-related protein 2 (TRP-2); Cytochrome P450 1B1 (CYP1B1); CCCTC-Binding Factor (Zinc Finger Protein)-Like (BORIS or Brother of the Regulator of Imprinted Sites), Squamous Cell Carcinoma Antigen Recognized By T Cells 3 (SART3); Paired box protein Pax-5 (PAX5); proacrosin binding protein sp32 (OY-TES1); lymphocyte-specific protein tyrosine kinase (LCK); A kinase anchor protein 4 (AKAP-4); synovial sarcoma, X breakpoint 2 (SSX2); Receptor for Advanced Glycation Endproducts (RAGE-1); renal ubiquitous 1 (RU1); renal ubiquitous 2 (RU2); legumain; human papilloma virus E6 (HPV E6); human papilloma virus E7 (HPV E7); intestinal carboxyl esterase; heat shock protein 70-2 mutated (mut hsp70-2); CD79a; CD79b; CD72; Leukocyte-associated immunoglobulin-like receptor 1 (LAIR1); Fc fragment of IgA receptor (FCAR or CD89); Leukocyte immunoglobulin-like receptor subfamily A member 2 (LILRA2); CD300 molecule-like family member f (CD300LF); C-type lectin domain family 12 member A (CLEC12A); bone marrow stromal cell antigen 2 (BST2); EGF-like module-containing mucin-like hormone receptor-like 2 (EMR2); lymphocyte antigen 75 (LY75); Glypican-3 (GPC3); Fc receptor-like 5 (FCRLS); and immunoglobulin lambda-like polypeptide 1 (IGLL1).

[0136] A suitable transmembrane domain of particular use in an CAR described herein may be a transmembrane domain derived from CD28, 4-1BB/CD137, CD8 (e.g., CD8α), CD4, CD19, CD3 epsilon, CD45, CD5, CD9, CD16, CD22, CD33, CD37, CD64, CD80, CD86, CD134, CD137, CTLA4, PD-1, CD154, TCR alpha, TCR beta, gamma delta TCR or CD3 zeta and/or transmembrane regions containing functional variants thereof such as those retaining a substantial portion of the structural, e.g., transmembrane, properties thereof.

[0137] In some embodiments, the heterologous gene or heterologous nucleic acid molecule is an engineered T-cell receptor (TCR). In some embodiments, the heterologous nucleic acid molecule encodes a therapeutic protein. As used herein, the term “therapeutic protein” refers to any protein that, when administered to a subject directly or indirectly in the form of a translated nucleic acid, has a therapeutic, diagnostic, and/or prophylactic effect and/or elicits a desired biological and/or pharmacological effect.

[0138] In some embodiment, the heterologous nucleic acid is fused with a specific attB sequence or an attP sequence that is recognized by the large serine recombinase. In some examples, the heterologous nucleic acid comprises the first parapalindromic sequence and the second parapalindromic sequence of an attP sequence that a LSR binds to. The LSR then binds to the attP-attB complex formed between the attP sequence and the cognate attB sequence in the target genome and excise integration of the heterologous nucleic acid sequence into the target genome. In other examples, the heterologous nucleic acid comprises the first parapalindromic sequence and the second parapalindromic sequence of an attB sequence that a LSR binds to. The LSR then binds to the attP-attB complex formed between the attB sequence and the cognate attP sequence in the target genome and excise integration of the heterologous nucleic acid sequence into the target genome.

[0139] In some embodiments, the present system comprises a polynucleotide encoding a LSR or a variant thereof, a recognition sequence specific to the LSR and a heterologous (e.g., donor) nucleic acid sequence. In some embodiments, the system comprises an in vitro transcribed mRNA molecule encoding an LSR. In some embodiments, the system comprises an in vitro transcribed mRNA molecule encoding a heterologous polypeptide. In some embodiments, the system comprises circular mRNA. As used herein, the terms “circRNA” or “circular polyribonucleotide” or “circular RNA” are used interchangeably and refers to a polyribonucleotide that forms a circular structure through covalent bonds. In some embodiments, the heterologous nucleic acid sequence comprises a nanoplasmid. In some embodiments, the heterologous nucleic acid sequence comprises doggybone DNA or dbDNA™.

### Expression of the Large Serine Recombinase System

[0140] Recombinant expression of a large serine recombinase described herein, can include construction of an expression vector containing a polynucleotide that encodes the serine recombinase. Once a polynucleotide has been obtained, a vector for the production of the polypeptide can be produced by recombinant DNA technology using techniques known in the art. Known methods can be used to construct expression vectors containing polypeptide coding sequences and appropriate transcriptional and translational control signals. These methods include, for example, in vitro recombinant DNA techniques, synthetic techniques, and in vivo genetic recombination. In accordance with the present disclosure, there may be employed conventional molecular biology, microbiology, and recombinant DNA techniques within the skill of the art.

[0141] An expression vector can be transferred to a host cell by conventional techniques, and the transfected cells can then be cultured by conventional techniques to produce polypeptides.

[0142] In some embodiments, a nucleotide sequence encoding a large serine recombinase is operably linked to a control element, e.g., a transcriptional control element, such as a promoter. The transcriptional control element may be functional in either a eukaryotic cell, e.g., a mammalian cell; or a prokaryotic cell (e.g., bacterial or archaeal cell). In some embodiments, the eukaryotic cell is a human cell. In some embodiments, a nucleotide sequence encoding a novel large serine recombinase protein is operably linked to multiple control elements that allow expression of the encoded nucleotide sequence in both prokaryotic and eukaryotic cells.

[0143] A promoter can be a constitutively active promoter (i.e., a promoter that is constitutively in an active/“ON” state), it may be an inducible promoter (i.e., a promoter whose state, active/“ON” or inactive/“OFF”, is controlled by an external stimulus, e.g., the presence of a particular temperature, compound, or protein.), it may be a spatially restricted promoter (i.e., transcriptional control element, enhancer, etc.) (e.g., tissue specific promoter, cell type specific promoter, etc.), and it may be a temporally restricted promoter (i.e., the promoter is in the “ON” state or “OFF” state during specific stages of embryonic development or during specific stages of a biological process, e.g., hair follicle cycle in mice).

[0144] Suitable promoters can be derived from viruses and can therefore be referred to as viral promoters, or they can be derived from any organism, including prokaryotic or eukaryotic organisms. Suitable promoters can be used to drive expression by any RNA polymerase (e.g., pol I, pol II, pol III). Exemplary promoters include, but are not limited to the SV40 early promoter, mouse mammary tumor virus long terminal repeat (LTR) promoter; adenovirus major late promoter (Ad MLP); a herpes simplex virus (HSV) promoter, a cytomegalovirus (CMV) promoter such as the CMV immediate early promoter region (CMVIE), a rous sarcoma virus (RSV) promoter, a human U6 small nuclear promoter (U6) (Miyagishi et al., Nature Biotechnology 20, 497-500 (2002)), an enhanced U6 promoter (e.g., Xia et al., Nucleic Acids Res. 2003 Sep. 1; 31(17)), and/or a human HI promoter (HI).

[0145] Examples of inducible promoters include, but are not limited to T7 RNA polymerase promoter, T3 RNA polymerase promoter, Isopropyl-beta-D-thiogalactopyranoside (IPTG)-regulated promoter, lactose induced promoter, heat shock promoter, Tetracycline-regulated promoter (e.g., Tet-ON, Tet-OFF, etc.), Steroid-regulated promoter, Metal-regulated promoter, estrogen receptor-regulated promoter, etc. Inducible promoters can therefore be regulated by molecules including, but not limited to, doxycycline, RNA polymerase, e.g., T7 RNA polymerase, an estrogen receptor and/or an estrogen receptor fusion.

[0146] In some embodiments, the promoter is a spatially restricted promoter (i.e., cell type specific promoter, tissue specific promoter, etc.) such that in a multi-cellular organism, the promoter is active (i.e., “ON”) in a subset of specific cells. Spatially restricted promoters may also be referred to as enhancers, transcriptional control elements, control sequences, etc. Any convenient spatially restricted promoter may be used and the choice of suitable promoter (e.g., a brain specific promoter, a promoter that drives expression in a subset of neurons, a promoter that drives expression in the germline, a promoter that drives expression in the lungs, a promoter that drives expression in muscles, a promoter that drives expression in islet cells of the pancreas, etc.) will depend on the organism. Thus, a spatially restricted promoter can be used to regulate the expression of a nucleic acid encoding a subject site-directed polypeptide in a wide variety of different tissues and cell types, depending on the organism. Some spatially restricted promoters are also temporally restricted such that the promoter is in the “ON” state or “OFF” state during specific stages of embryonic development or during specific stages of a biological process (e.g., hair follicle cycle).

[0147] For illustration purposes, examples of spatially restricted promoters include, but are not limited to, neuron-specific promoters, adipocyte-specific promoters, cardiomyocyte-specific promoters, smooth muscle-specific promoters, photoreceptor-specific promoters, etc. Neuron-specific spatially restricted promoters include, but are not limited to, a neuron-specific enolase (NSE) promoter, an aromatic amino acid decarboxylase (AADC) promoter, a neurofilament promoter, a synapsin promoter, a thy-1 promoter, a serotonin receptor promoter, a tyrosine hydroxylase promoter (TH), a GnRH promoter, an L7 promoter, a DNMT promoter, an enkephalin promoter, a myelin basic protein (MBP) promoter, a Ca²⁺-calmodulin-dependent protein kinase II-alpha (CamKIIa) promoter and/or a CMV enhancer/platelet-derived growth factor-β promoter.

[0148] Adipocyte-specific spatially restricted promoters include, but are not limited to aP2 gene promoter/enhancer, e.g., a region from −5.4 kb to +21 bp of a human aP2 gene, a glucose transporter-4 (GLUT4) promoter, a fatty acid translocase (FAT/CD36) promoter, a stearoyl-CoA desaturase-1 (SCD1) promoter, a leptin promoter, and an adiponectin promoter, an adipsin promoter and/or a resistin promoter.

[0149] Cardiomyocyte-specific spatially restricted promoters include, but are not limited to control sequences derived from the following genes: myosin light chain-2, a-myosin heavy chain, AE3, cardiac troponin C, and/or cardiac actin.

[0150] Smooth muscle-specific spatially restricted promoters include, but are not limited to an SM22a promoter, a smoothelin promoter, and/or an a-smooth muscle actin promoter.

[0151] Photoreceptor-specific spatially restricted promoters include, but are not limited to, a rhodopsin promoter, a rhodopsin kinase promoter, a beta phosphodiesterase gene promoter, a retinitis pigmentosa gene promoter, an interphotoreceptor retinoid-binding protein (IRBP) gene enhancer, and/or an IRBP gene promoter.

[0152] In some embodiments, the expression vector is a viral vector, such as an adenoviral vector, an AAV vector, a lentiviral vector or a retroviral vector.

[0153] In some embodiments, the expression vector is non-viral vector.

[0154] In some embodiments, the system is construed as an in vitro transcribed messenger RNA for expression in a host cell or an organism.

[0155] In some embodiments, the polynucleotide encoding a large serine recombinase is constructed in an expressing vector, and the target nucleic acid molecule and the recognition sequence of the large serine recombinase are construed in a separate donor vector.

[0156] In some embodiments, the polynucleotide encoding a large serine recombinase, the target nucleic acid sequence and the recognition sequence are construed in a single vector.

### Large Serine Recombinase Mediated Recombination

[0157] The large serine recombinase system described herein can be used for genome modification. Large serine recombinase mediated recombination can lead to integration of a heterologous DNA (e.g., donor sequence) at a specific target locus resulting in a gene silencing event, replacement, an insertion of exogenous gene, or an alteration of the expression (e.g., an increase or a decrease) of a desired target gene. As used herein, the term “site specific modification” or “site specific recombination” refers to any changes to a genomic sequence around a target site in a genome.

[0158] Accordingly, in some embodiments, the large serine recombinase system described herein is used in a method of altering the expression of a target nucleic acid, e.g., disruption of expression of a target gene.

[0159] In some embodiments the large serine recombinase system described herein is used in a method of modifying a target nucleic acid in a desired target cell. In some embodiments, the invention provides methods for site-specific modification of a target nucleic acid in eukaryotic cells to effectuate a desired modification in gene expression.

[0160] In some embodiments, the large serine recombinase systems described herein can be used to modify a target nucleic acid (e.g., by inserting, deleting, or substituting one or more nucleic acid residues). For example, in some embodiments the systems described herein comprise an exogenous donor template nucleic acid (e.g., a DNA molecule or a RNA molecule), which comprises a desirable nucleic acid sequence. Upon resolution of a cleavage event induced with the system described herein, the molecular machinery of the cell will utilize the exogenous donor template nucleic acid in repairing and/or resolving the cleavage event. Alternatively, the molecular machinery of the cell can utilize an endogenous template in repairing and/or resolving the cleavage event. In some embodiments, the large serine recombinase systems described herein may be used to alter a target nucleic acid resulting in an insertion, a deletion, and/or a point mutation. In some embodiments, the insertion is a scarless insertion (i.e., the insertion of an intended nucleic acid sequence into a target nucleic acid resulting in no additional unintended nucleic acid sequence upon resolution of the cleavage event).

[0161] In some embodiments, after recombinase mediated recombination, the target site surrounding the integrated sequence contains a limited number of insertions or deletions, for example, in less than about 50% or 10% of integration events.

[0162] In some embodiments, the serine recombinase system of the present invention may result in a genomic modification (e.g., an insertion or deletion) at the target site (e.g., the site of insert DNA integration, e.g., adjacent to the integration of the insert DNA) comprising less than 20 nt, e.g., less than 20, 19, 18, 17, 16, 15, 14, 13, 12, 11, 10, 9, 8, 7, 6, 5, 4, 3, 2, or less than 1 nt of DNA. In some embodiments, a LSR system of this invention may result in an insertion at the target site (e.g., the site of insert DNA integration, e.g., adjacent to the integration of the insert DNA) comprising less than 20 nucleotides or base pairs, e.g., less than 20, 19, 18, 17, 16, 15, 14, 13, 12, 11, 10, 9, 8, 7, 6, 5, 4, 3, 2, or less than 1 nucleotides or base pairs of DNA. In some embodiments, the serine recombinase system of the present invention may result in a deletion at the target site (e.g., the site of insert DNA integration, e.g., adjacent to the integration of the insert DNA) comprising less than 20 nucleotides or base pairs, e.g., less than 20, 19, 18, 17, 16, 15, 14, 13, 12, 11, 10, 9, 8, 7, 6, 5, 4, 3, 2, or less than 1 nucleotide or base pair of genomic DNA. In some embodiments, the target site does not show multiple insertion events, e.g., head-to-tail or head-to-head duplications.

[0163] As discussed herein, the heterologous sequence is inserted into a target site in the genome of the cell. In some embodiments, the target site comprises, in order, (i) a first parapalindromic sequence), and (ii) a second parapalindromic sequence. Upon a LSR mediated recombination, a heterologous sequence is inserted to the target site between the first and the second parapalindromic sequence.

### Genome Target Sites

[0164] In some embodiments, the system of the present invention may be redirected to a defined target site in the human genome. In some embodiments, the target site can be any site in the target genome. In some embodiments, the system targets a genomic safe harbor target site, e.g., mediates an insertion of a heterogeneous nucleic acid sequence into a position that meets a safe harbor criteria. A genomic safe harbor site is a site in a host genome that is able to accommodate the integration of new genetic material, e.g., such that the inserted genetic element does not cause significant alterations of the host genome posing a risk to the host cell or organism.

[0165] Genomic safe harbor sites include, but are not limited to, any sites located more than 300 kb from a cancer-related gene; any sites located more than 300 kb from a miRNA/other functional small RNA; any sites located more than 50 kb from a 5′ gene end; any sites located more than 50 kb from a replication origin; any sites located more than 50 kb away from any ultraconserved element; any sites having low transcriptional activity (i.e. no mRNA +/−25 kb); any sites that are not in a copy number variable region; any sites in open chromatin; and any unique sites, with one copy in the human genome. Examples of genomic safe harbor sites in the human genome include the adeno-associated vims site 1, a naturally occurring site of integration of AAV vims on chromosome 19, the chemokine (C-C motif) receptor 5 (CCR5) gene, a chemokine receptor gene known as an HIV-1 co-receptor, the human ortholog of the mouse Rosa26 locus, the rDNA locus (e.g., 5S rDNA, 18S rDNA, 5.8S rDNA, and 28S rDNA loci), safe harbor sites described, e.g., in Pellenz et al., 2018.

[0166] In some embodiments the genomic safe harbor site is a naturally occurring safe harbor site. In some embodiments, a genomic sate harbor site is derived from the native target of a mobile genetic element, e.g., a recombinase, transposon, retrotransposon, or retrovirus. In some embodiments, a genomic safe harbor site is created using DNA modifying enzymes.

[0167] In some embodiments, a system of this invention may result in a genomic modification (e.g., an insertion or deletion) at the genome target site (e.g., the site where a heterogeneous nucleic acid sequence is integrated into the host genome by the LSR system,) comprising less than 20 nt, e.g., less than 20, 19, 18, 17, 16, 15, 14, 13, 12, 11, 10, 9, 8, 7, 6, 5, 4, 3, 2, or less than 1 nt flanking the insertion site of heterologous DNA.

[0168] In some embodiments, a target site shows less than 100 insert copies at the target site. In some embodiments, a target site shows more than two copies of the insert sequence are present in less than 95% of target sites containing inserts. In some embodiments, a target site shows multiple copies of the insert sequence. In some embodiments, the insertion of heterologous donor sequence results in formation of attL and attR sites, formed by the combination of portions of attB and attP sites.

### Pharmaceutical Compositions

[0169] In another aspect, provided by the present invention include compositions comprising a large serine recombinase or a variant thereof, and/or a large serine recombinase system as described herein. In some embodiments, a pharmaceutical composition comprising the same is provided. The term “pharmaceutical composition”, as used herein, refers to a composition formulated for pharmaceutical use. In some embodiments, the pharmaceutical composition further comprises a pharmaceutically acceptable carrier. In some embodiments, the pharmaceutical composition comprises additional agents (e.g., for specific delivery, increasing half-life, or other therapeutic compounds).

[0170] As used here, the term “pharmaceutically-acceptable carrier” means a pharmaceutically-acceptable material, composition or vehicle, such as a liquid or solid filler, diluent, excipient, manufacturing aid (e.g., lubricant, talc magnesium, calcium or zinc stearate, or steric acid), or solvent encapsulating material, involved in carrying or transporting the compound from one site (e.g., the delivery site) of the body, to another site (e.g., organ, tissue or portion of the body). A pharmaceutically acceptable carrier is “acceptable” in the sense of being compatible with the other ingredients of the formulation and not injurious to the tissue of the subject (e.g., physiologically compatible, sterile, physiologic pH, etc.).

[0171] “Pharmaceutically acceptable vehicles” may be vehicles approved by a regulatory agency of the Federal or a state government or listed in the U.S. The term “vehicle” refers to a diluent, adjuvant, excipient, or carrier with which a compound of the invention is formulated for administration to a subject. Such pharmaceutical vehicles can be lipids, e.g. liposomes, e.g. liposome dendrimers; liquids, such as water and oils, including those of petroleum, animal, vegetable or synthetic origin, such as peanut oil, soybean oil, mineral oil, sesame oil and the like, saline; gum acacia, gelatin, starch paste, talc, keratin, colloidal silica, urea, and the like. In addition, auxiliary, stabilizing, thickening, lubricating and coloring agents may be used.

[0172] Some non-limiting examples of materials which can serve as pharmaceutically-acceptable carriers include: (1) sugars, such as lactose, glucose and sucrose; (2) starches, such as corn starch and potato starch; (3) cellulose, and its derivatives, such as sodium carboxymethyl cellulose, methylcellulose, ethyl cellulose, microcrystalline cellulose and cellulose acetate; (4) powdered tragacanth; (5) malt; (6) gelatin; (7) lubricating agents, such as magnesium stearate, sodium lauryl sulfate and talc; (8) excipients, such as cocoa butter and suppository waxes; (9) oils, such as peanut oil, cottonseed oil, safflower oil, sesame oil, olive oil, corn oil and soybean oil; (10) glycols, such as propylene glycol; (11) polyols, such as glycerin, sorbitol, mannitol and polyethylene glycol (PEG); (12) esters, such as ethyl oleate and ethyl laurate; (13) agar; (14) buffering agents, such as magnesium hydroxide and aluminum hydroxide; (15) alginic acid; (16) pyrogen-free water; (17) isotonic saline; (18) Ringer's solution; (19) ethyl alcohol; (20) pH buffered solutions; (21) polyesters, polycarbonates and/or polyanhydrides; (22) bulking agents, such as polypeptides and amino acids (23) serum alcohols, such as ethanol; and (23) other non-toxic compatible substances employed in pharmaceutical formulations. Wetting agents, coloring agents, release agents, coating agents, sweetening agents, flavoring agents, perfuming agents, preservative and antioxidants can also be present in the formulation. The terms such as “excipient,” “carrier,” “pharmaceutically acceptable carrier,” “vehicle,” or the like are used interchangeably herein.

[0173] Pharmaceutical compositions can comprise one or more pH buffering compounds to maintain the pH of the formulation at a predetermined level that reflects physiological pH, such as in the range of about 5.0 to about 8.0. The pH buffering compound used in the aqueous liquid formulation can be an amino acid or mixture of amino acids, such as histidine or a mixture of amino acids such as histidine and glycine. Alternatively, the pH buffering compound is preferably an agent which maintains the pH of the formulation at a predetermined level, such as in the range of about 5.0 to about 8.0, and which does not chelate calcium ions. Illustrative examples of such pH buffering compounds include, but are not limited to, imidazole and acetate ions. The pH buffering compound may be present in any amount suitable to maintain the pH of the formulation at a predetermined level.

[0174] Pharmaceutical compositions can also contain one or more osmotic modulating agents, i.e., a compound that modulates the osmotic properties (e.g, tonicity, osmolality, and/or osmotic pressure) of the formulation to a level that is acceptable to the blood stream and blood cells of recipient individuals. The osmotic modulating agent can be an agent that does not chelate calcium ions. The osmotic modulating agent can be any compound known or available to those skilled in the art that modulates the osmotic properties of the formulation. One skilled in the art may empirically determine the suitability of a given osmotic modulating agent for use in the inventive formulation. Illustrative examples of suitable types of osmotic modulating agents include, but are not limited to: salts, such as sodium chloride and sodium acetate; sugars, such as sucrose, dextrose, and mannitol; amino acids, such as glycine; and mixtures of one or more of these agents and/or types of agents. The osmotic modulating agent(s) may be present in any concentration sufficient to modulate the osmotic properties of the formulation.

[0175] Pharmaceutical compositions may be formulated into preparations in solid, semisolid, liquid or gaseous forms, such as tablets, capsules, powders, granules, ointments, solutions, suppositories, injections, inhalants, gels, microspheres, and aerosols.

[0176] In some embodiments, the pharmaceutical composition is formulated for delivery to a subject, e.g., for genome modification. Suitable routes of administrating the pharmaceutical composition described herein include, without limitation: topical, subcutaneous, transdermal, intradermal, intralesional, intraarticular, intraperitoneal, intravesical, transmucosal, gingival, intradental, intracochlear, transtympanic, intraorgan, epidural, intrathecal, intramuscular, intravenous, intravascular, intraosseus, periocular, intratumoral, intracerebral, and intracerebroventricular administration.

[0177] The composition can also include any of a variety of stabilizing agents, such as an antioxidant for example. When the pharmaceutical composition includes a polypeptide, the polypeptide can be complexed with various well-known compounds that enhance the in vivo stability of the polypeptide, or otherwise enhance its pharmacological properties (e.g., increase the half-life of the polypeptide, reduce its toxicity, and enhance solubility or uptake). Examples of such modifications or complexing agents include sulfate, gluconate, citrate and phosphate. The nucleic acids or polypeptides of a composition can also be complexed with molecules that enhance their in vivo attributes. Such molecules include, for example, carbohydrates, polyamines, amino acids, other peptides, ions (e.g., sodium, potassium, calcium, magnesium, manganese), and lipids.

[0178] The pharmaceutical compositions can be administered for prophylactic and/or therapeutic treatments. Toxicity and therapeutic efficacy of the active ingredient can be determined according to standard pharmaceutical procedures in cell cultures and/or experimental animals, including, for example, determining the LD50 (the dose lethal to 50% of the population) and the ED50 (the dose therapeutically effective in 50% of the population). The dose ratio between toxic and therapeutic effects is the therapeutic index and it can be expressed as the ratio LD50/ED50. Therapies that exhibit large therapeutic indices are preferred.

[0179] The data obtained from cell culture and/or animal studies can be used in formulating a range of dosages for humans. The dosage of the active ingredient typically lines within a range of circulating concentrations that include the ED50 with low toxicity. The dosage can vary within this range depending upon the dosage form employed and the route of administration utilized.

[0180] The components used to formulate the pharmaceutical compositions are preferably of high purity and are substantially free of potentially harmful contaminants (e.g., at least National Food (NF) grade, generally at least analytical grade, and more typically at least pharmaceutical grade). Moreover, compositions intended for in vivo use are usually sterile. To the extent that a given compound must be synthesized prior to use, the resulting product is typically substantially free of any potentially toxic agents, particularly any endotoxins, which may be present during the synthesis or purification process. Compositions for parental administration are also sterile, substantially isotonic and made under GMP conditions.

[0181] In some embodiments, the pharmaceutical composition described herein is administered locally to a diseased site. In some embodiments, the pharmaceutical composition described herein is administered to a subject by injection, by means of a catheter, by means of a suppository, or by means of an implant, the implant being of a porous, non-porous, or gelatinous material, including a membrane, such as a sialastic membrane, or a fiber.

[0182] In other embodiments, the pharmaceutical composition described herein is delivered in a controlled release system. In one embodiment, a pump can be used (See, e.g., Langer, 1990, Science 249:1527-1533; Sefton, 1989, CRC Crit. Ref. Biomed. Eng. 14:201; Buchwald et al., 1980, Surgery 88:507; Saudek et al., 1989, N. Engl. J. Med. 321:574). In another embodiment, polymeric materials can be used. (See, e.g., Medical Applications of Controlled Release (Langer and Wise eds., CRC Press, Boca Raton, Fla., 1974); Controlled Drug Bioavailability, Drug Product Design and Performance (Smolen and Ball eds., Wiley, New York, 1984); Ranger and Peppas, 1983, Macromol. Sci. Rev. Macromol. Chem. 23:61. See also Levy et al., 1985, Science 228:190; During et al., 1989, Ann. Neurol. 25:351; Howard et ah, 1989, J. Neurosurg. 71:105.) Other controlled release systems are discussed, for example, in Langer, supra.

[0183] In some embodiments, the pharmaceutical composition is formulated in accordance with routine procedures as a composition adapted for intravenous or subcutaneous administration to a subject, e.g., a human. In some embodiments, pharmaceutical composition for administration by injection are solutions in sterile isotonic use as solubilizing agent and a local anesthetic such as lignocaine to ease pain at the site of the injection. Generally, the ingredients are supplied either separately or mixed together in unit dosage form, for example, as a dry lyophilized powder or water free concentrate in a hermetically sealed container such as an ampoule or sachette indicating the quantity of active agent. Where the pharmaceutical is to be administered by infusion, it can be dispensed with an infusion bottle containing sterile pharmaceutical grade water or saline. Where the pharmaceutical composition is administered by injection, an ampoule of sterile water for injection or saline can be provided so that the ingredients can be mixed prior to administration.

[0184] A pharmaceutical composition for systemic administration can be a liquid, e.g., sterile saline, lactated Ringer's or Hank's solution. In addition, the pharmaceutical composition can be in solid forms and re-dissolved or suspended immediately prior to use. Lyophilized forms are also contemplated. The pharmaceutical composition can be contained within a lipid particle or vesicle, such as a liposome or microcrystal, which is also suitable for parenteral administration. The particles can be of any suitable structure, such as unilamellar or plurilamellar, so long as compositions are contained therein. Compounds can be entrapped in “stabilized plasmid-lipid particles” (SPLP) containing the fusogenic lipid dioleoylphosphatidylethanolamine (DOPE), low levels (5-10 mol %) of cationic lipid, and stabilized by a polyethyleneglycol (PEG) coating (Zhang Y. P. et ah, Gene Ther. 1999, 6:1438-47). Positively charged lipids such as N-[1-(2,3-dioleoyloxi) propyl]-N,N,N-trimethyl-amoniummethylsulfate, or “DOTAP,” are particularly preferred for such particles and vesicles. The preparation of such lipid particles is well known. See, e.g., U.S. Pat. Nos. 4,880,635; 4,906,477; 4,911,928; 4,917,951; 4,920,016; and 4,921,757; each of which is incorporated herein by reference.

[0185] The pharmaceutical composition described herein can be administered or packaged as a unit dose, for example. The term “unit dose” when used in reference to a pharmaceutical composition of the present disclosure refers to physically discrete units suitable as unitary dosage for the subject, each unit containing a predetermined quantity of active material calculated to produce the desired therapeutic effect in association with the required diluent; i.e., carrier, or vehicle.

[0186] Further, the pharmaceutical composition can be provided as a pharmaceutical kit comprising (a) a container containing a compound of the invention in lyophilized form and (b) a second container containing a pharmaceutically acceptable diluent (e.g., sterile used for reconstitution or dilution of the lyophilized compound of the invention. Optionally associated with such container(s) can be a notice in the form prescribed by a governmental agency regulating the manufacture, use or sale of pharmaceuticals or biological products, which notice reflects approval by the agency of manufacture, use or sale for human administration.

[0187] In another aspect, an article of manufacture containing materials useful for the treatment of the diseases described above is included. In some embodiments, the article of manufacture comprises a container and a label. Suitable containers include, for example, bottles, vials, syringes, and test tubes. The containers can be formed from a variety of materials such as glass or plastic. In some embodiments, the container holds a composition that is effective for treating a disease described herein and can have a sterile access port. For example, the container can be an intravenous solution bag or a vial having a stopper pierceable by a hypodermic injection needle. The active agent in the composition is a compound of the invention. In some embodiments, the label on or associated with the container indicates that the composition is used for treating the disease of choice. The article of manufacture can further comprise a second container comprising a pharmaceutically-acceptable buffer, such as phosphate-buffered saline, Ringer's solution, or dextrose solution. It can further include other materials desirable from a commercial and user standpoint, including other buffers, diluents, filters, needles, syringes, and package inserts with instructions for use.

[0188] In some embodiments, the large serine recombinase system is provided as part of a pharmaceutical composition. In some embodiments, the pharmaceutical composition comprises any of the fusion proteins provided herein. In some embodiments, the pharmaceutical composition comprises any of the complexes provided herein. In some embodiments pharmaceutical composition comprises a large serine recombinase, an attP or attB sequence, a heterologous DNA, a cationic lipid, and a pharmaceutically acceptable excipient. Pharmaceutical compositions can optionally comprise one or more additional therapeutically active substances.

### Engineered Cells

[0189] In some embodiments, the present invention provides engineered cells that are genetically modified using the systems and methods described herein. The engineered cells may be produced by introducing a serine large recombinase mediated DNA modification in the genome of the cell.

[0190] The engineered cells are any types of cells. In some embodiments, the cells are dividing cells. In some embodiments, the cells are non-dividing cells. In some embodiments, the cells are cell lines. In some embodiments, the cells are primary cells. In some embodiments, the cells are mammal cells including human cells. As non-limiting examples, the cells are immune cells (e.g., T cells, B cells, NK cells, macrophages etc), cancer cells, stem cells, progenitor cells, iPS cells and embryonic cells.

[0191] In some embodiments, an engineered cell comprises a heterologous sequence at one or more target sites.

[0192] Following the methods described above, a DNA region of interest may be cleaved and modified, i.e. “genetically modified”, ex vivo. In some embodiments, as when a selectable marker has been inserted into the DNA region of interest, the population of cells may be enriched for those comprising the genetic modification by separating the genetically modified cells from the remaining population. Prior to enriching, the “genetically modified” cells may make up only about 1% or more (e.g., 2% or more, 3% or more, 4% or more, 5% or more, 6% or more, 7% or more, 8% or more, 9% or more, 10% or more, 15% or more, or 20% or more) of the cellular population. Separation of “genetically modified” cells may be achieved by any convenient separation technique appropriate for the selectable marker used. For example, if a fluorescent marker has been inserted, cells may be separated by fluorescence activated cell sorting, whereas if a cell surface marker has been inserted, cells may be separated from the heterologous population by affinity separation techniques, e.g. magnetic separation, affinity chromatography, “panning” with an affinity reagent attached to a solid matrix, or other convenient technique. Techniques providing accurate separation include fluorescence activated cell sorters, which can have varying degrees of sophistication, such as multiple color channels, low angle and obtuse light scattering detecting channels, impedance channels, etc. The cells may be selected against dead cells by employing dyes associated with dead cells (e.g. propidium iodide). Any technique may be employed which is not unduly detrimental to the viability of the genetically modified cells. Cell compositions that are highly enriched for cells comprising modified DNA are achieved in this manner. By “highly enriched”, it is meant that the genetically modified cells will be 70% or more, 75% or more, 80% or more, 85% or more, 90% or more of the cell composition, for example, about 95% or more, or 98% or more of the cell composition. In other words, the composition may be a substantially pure composition of genetically modified cells.

[0193] Genetically modified cells produced by the methods described herein may be used immediately. Alternatively, the cells may be frozen at liquid nitrogen temperatures and stored for long periods of time, being thawed and capable of being reused. In such cases, the cells will usually be frozen in 10% dimethylsulfoxide (DMSO), 50% serum, 40% buffered medium, or some other such solution as is commonly used in the art to preserve cells at such freezing temperatures, and thawed in a manner as commonly known in the art for thawing frozen cultured cells.

[0194] The genetically modified cells may be cultured in vitro under various culture conditions. The cells may be expanded in culture, i.e. grown under conditions that promote their proliferation. Culture medium may be liquid or semi-solid, e.g. containing agar, methylcellulose, etc. The cell population may be suspended in an appropriate nutrient medium, such as Iscove's modified DMEM or RPMI 1640, normally supplemented with fetal calf serum (about 5-10%), L-glutamine, a thiol, particularly 2-mercaptoethanol, and antibiotics, e.g. penicillin and streptomycin. The culture may contain growth factors to which the regulatory T cells are responsive. Growth factors, as defined herein, are molecules capable of promoting survival, growth and/or differentiation of cells, either in culture or in the intact tissue, through specific effects on a transmembrane receptor. Growth factors include polypeptides and non-polypeptide factors.

[0195] Exemplary engineered cells include CAR T cells, CAR NK cells and other engineered immune cells for immunotherapy. In some aspects, the CAR-T cells are autologous T cells. In some aspects, the CAR T cells are allogeneic.

[0196] Cells that have been genetically modified in this way may be transplanted to a subject for purposes such as gene therapy, e.g., to treat a disease or as an antiviral, antipathogenic, or anticancer therapeutic, for the production of genetically modified organisms in agriculture, or for biological research. The subject may be a neonate, a juvenile, or an adult. Of particular interest are mammalian subjects. Mammalian species that may be treated with the present methods include canines and felines; equines; bovines; ovines; etc. and primates, particularly humans. Animal models, particularly small mammals (e.g., mouse, rat, guinea pig, hamster, lagomorpha (e.g., rabbit), etc.) may be used for experimental investigations.

[0197] Cells may be provided to the subject alone or with a suitable substrate or matrix, e.g. to support their growth and/or organization in the tissue to which they are being transplanted. Usually, at least 1×10³ cells will be administered, for example 5×10³ cells, 1×10⁴ cells, 5×10⁴ cells, 1×10⁵ cells, 1×10⁶ cells or more. The cells may be introduced to the subject via any of the following routes: parenteral, subcutaneous, intravenous, intracranial, intraspinal, intraocular, or into spinal fluid. The cells may be introduced by injection, catheter, or the like. Cells may also be introduced into an embryo (e.g., a blastocyst) for the purpose of generating a transgenic animal (e.g., a transgenic mouse).

[0198] The number of administrations of treatment to a subject may vary. Introducing the genetically modified cells into the subject may be a one-time event; but in certain situations, such treatment may elicit improvement for a limited period of time and require an on-going series of repeated treatments. In other situations, multiple administrations of the genetically modified cells may be required before an effect is observed. The exact protocols depend upon the disease or condition, the stage of the disease and parameters of the individual subject being treated.

### Delivery Systems

[0199] The large serine recombinase systems described herein, or components thereof, nucleic acid molecules thereof, and/or nucleic acid molecules encoding or providing components thereof, can be delivered by various delivery systems such as vectors, e.g., plasmids and delivery vectors. Exemplary embodiments are described below. The large serine recombinase systems can be encoded on a nucleic acid that is contained in a viral vector. Viral vectors can include lentivirus, Adenovirus, Retrovirus, and Adeno-associated viruses (AAVs). Viral vectors can be selected based on the application. For example, AAVs are commonly used for gene delivery in vivo due to their mild immunogenicity. Adenoviruses are commonly used as vaccines because of the strong immunogenic response they induce. Packaging capacity of the viral vectors can limit the size of the large serine recombinase that can be packaged into the vector. For example, the packaging capacity of the AAVs is ˜4.5 kb including two 145 base inverted terminal repeats (ITRs).

[0200] AAV is a small, single-stranded DNA dependent virus belonging to the parvovirus family. The 4.7 kb wild-type (wt) AAV genome is made up of two genes that encode four replication proteins and three capsid proteins, respectively, and is flanked on either side by 145-bp inverted terminal repeats (ITRs). The virion is composed of three capsid proteins, Vp1, Vp2, and Vp3, produced in a 1:1:10 ratio from the same open reading frame but from differential splicing (Vp1) and alternative translational start sites (Vp2 and Vp3, respectively). Vp3 is the most abundant subunit in the virion and participates in receptor recognition at the cell surface defining the tropism of the virus. A phospholipase domain, which functions in viral infectivity, has been identified in the unique N terminus of Vp1.

[0201] Similar to wt AAV, recombinant AAV (rAAV) utilizes the cis-acting 145-bp ITRs to flank vector transgene cassettes, providing up to 4.5 kb for packaging of foreign DNA. Subsequent to infection, rAAV can express a fusion protein of the invention and persist without integration into the host genome by existing episomally in circular head-to-tail concatemers. Although there are numerous examples of rAAV success using this system, in vitro and in vivo, the limited packaging capacity has limited the use of AAV-mediated gene delivery when the length of the coding sequence of the gene is equal or greater in size than the wt AAV genome.

[0202] The small packaging capacity of AAV vectors makes the delivery of a number of genes that exceed this size and/or the use of large physiological regulatory elements challenging. These challenges can be addressed, for example, by dividing the protein(s) to be delivered into two or more fragments, wherein the N-terminal fragment is fused to a split intein-N and the C-terminal fragment is fused to a split intein-C. These fragments are then packaged into two or more AAV vectors. As used herein, “intein” refers to a self-splicing protein intron (e.g., peptide) that ligates flanking N-terminal and C-terminal exteins (e.g., fragments to be joined). The use of certain inteins for joining heterologous protein fragments is described, for example, in Wood et al., J. Biol. Chem. 289(21); 14512-9 (2014). For example, when fused to separate protein fragments, the inteins IntN and IntC recognize each other, splice themselves out and simultaneously ligate the flanking N- and C-terminal exteins of the protein fragments to which they were fused, thereby reconstituting a full-length protein from the two protein fragments. Other suitable inteins will be apparent to a person of skill in the art.

[0203] In some embodiments, the serine recombinase system of the invention can vary in length. In some embodiments, a protein fragment ranges from 500 amino acids to about 5000 amino acids in length. In some embodiments, a protein fragment ranges from about 500 amino acids to about 4000 amino acids in length. In some embodiments, a protein fragment ranges from about 500 amino acids to about 3000 amino acids in length. In some embodiments, a protein fragment ranges from about 500 amino acids to about 2000 amino acids in length. In some embodiments, a protein fragment ranges from about 500 amino acids to about 1000 amino acids in length. Suitable protein fragments of other lengths will be apparent to a person of skill in the art.

[0204] In some embodiments, a portion or fragment of a fusion protein is fused to an intein and fused to an AAV capsid protein. The intein, nuclease and capsid protein can be fused together in any arrangement (e.g., nuclease-intein-capsid, intein-nuclease-capsid, capsid-intein-nuclease, etc.). In some embodiments, the N-terminus of an intein is fused to the C-terminus of a fusion protein and the C-terminus of the intein is fused to the N-terminus of an AAV capsid protein.

[0205] In one embodiment, dual AAV vectors are generated by splitting a large transgene expression cassette in two separate halves (5′ and 3′ ends, or head and tail), where each half of the cassette is packaged in a single AAV vector (of <5 kb). The re-assembly of the full-length transgene expression cassette is then achieved upon co-infection of the same cell by both dual AAV vectors followed by: (1) homologous recombination (HR) between 5′ and 3′ genomes (dual AAV overlapping vectors); (2) ITR-mediated tail-to-head concatemerization of 5′ and 3′ genomes (dual AAV trans-splicing vectors); or (3) a combination of these two mechanisms (dual AAV hybrid vectors). The use of dual AAV vectors in vivo results in the expression of full-length proteins. The use of the dual AAV vector platform represents an efficient and viable gene transfer strategy for transgenes of >4.7 kb in size.

[0206] The disclosed strategies for designing large serine recombinase systems described herein can be useful for generating systems capable of being packaged into a viral vector. The use of RNA or DNA viral based systems for the delivery of a recombinase takes advantage of highly evolved processes for targeting a virus to specific cells in culture or in the host and trafficking the viral payload to the nucleus or host cell genome. Viral vectors can be administered directly to cells in culture, patients (in vivo), or they can be used to treat cells in vitro, and the modified cells can optionally be administered to patients (ex vivo). Conventional viral based systems could include retroviral, lentivirus, adenoviral, adeno-associated and herpes simplex virus vectors for gene transfer. Integration in the host genome is possible with the retrovirus, lentivirus, and adeno-associated virus gene transfer methods, often resulting in long term expression of the inserted transgene. Additionally, high transduction efficiencies have been observed in many different cell types and target tissues.

[0207] The tropism of a retrovirus can be altered by incorporating foreign envelope proteins, expanding the potential target population of target cells. Lentiviral vectors are retroviral vectors that are able to transduce or infect non-dividing cells and typically produce high viral titers. Selection of a retroviral gene transfer system would therefore depend on the target tissue. Retroviral vectors are comprised of cis-acting long terminal repeats with packaging capacity for up to 6-10 kb of foreign sequence. The minimum cis-acting LTRs are sufficient for replication and packaging of the vectors, which are then used to integrate the therapeutic gene into the target cell to provide permanent transgene expression. Widely used retroviral vectors include those based upon murine leukemia virus (MuLV), gibbon ape leukemia virus (GaLV), Simian Immuno deficiency virus (SIV), human immuno deficiency virus (HIV), and combinations thereof (See, e.g., Buchscher et al., J. Virol. 66:2731-2739 (1992); Johann et al., J. Virol. 66:1635-1640 (1992); Sommerfelt et al., Virol. 176:58-59 (1990); Wilson et al., J. Virol. 63:2374-2378 (1989); Miller et al., J. Virol. 65:2220-2224 (1991); PCT/US94/05700).

[0208] Retroviral vectors, especially lentiviral vectors, can require polynucleotide sequences smaller than a given length for efficient integration into a target cell. For example, retroviral vectors of length greater than 9 kb can result in low viral titers compared with those of smaller size. In some aspects, a system of the present disclosure is of sufficient size so as to enable efficient packaging and delivery into a target cell via a retroviral vector. In some cases, a large serine recombinase is of a size so as to allow efficient packing and delivery even when expressed together with heterologous DNA.

[0209] In applications where transient expression is preferred, adenoviral based systems can be used. Adenoviral based vectors are capable of very high transduction efficiency in many cell types and do not require cell division. With such vectors, high titer and levels of expression have been obtained. This vector can be produced in large quantities in a relatively simple system. Adeno-associated virus (“AAV”) vectors can also be used to transduce cells with target nucleic acids, e.g., in the in vitro production of nucleic acids and peptides, and for in vivo and ex vivo gene therapy procedures (See, e.g., West et al., Virology 160:38-47 (1987); U.S. Pat. No. 4,797,368; WO 93/24641; Kotin, Human Gene Therapy 5:793-801 (1994); Muzyczka, J. Clin. Invest. 94:1351 (1994). The construction of recombinant AAV vectors is described in a number of publications, including U.S. Pat. No. 5,173,414; Tratschin et al., Mol. Cell. Biol. 5:3251-3260 (1985); Tratschin, et al., Mol. Cell. Biol. 4:2072-2081 (1984); Hermonat & Muzyczka, PNAS 81:6466-6470 (1984); and Samulski et al., J. Virol. 63:03822-3828 (1989).

[0210] A large serine recombinase system described herein can therefore be delivered with viral vectors. One or more components of the large serine recombinase system can be encoded on one or more viral vectors. For example, a large serine recombinase and donor sequence can be encoded on a single viral vector. In other cases, the large serine recombinase and donor sequence are encoded on different viral vectors.

[0211] The combination of components encoded on a viral vector can be determined by the cargo size constraints of the chosen viral vector.

### Non-Viral Delivery

[0212] Non-viral delivery approaches for large serine recombinases are also available. One important category of non-viral nucleic acid vectors are nanoparticles, which can be organic or inorganic. Nanoparticles are well known in the art. Any suitable nanoparticle design can be used to deliver genome editing system components or nucleic acids encoding such components. For instance, organic (e.g. lipid and/or polymer) nanoparticles can be suitable for use as delivery vehicles in certain embodiments of this disclosure. Exemplary lipids for use in nanoparticle formulations, and/or gene transfer are shown in Table 1 (below).

TABLE 1
Lipids Used for Gene Transfer

| Lipid | Abbreviation | Feature |
|---|---|---|
| 1,2-Dioleoyl-sn-glycero-3-phosphatidylcholine | DOPC | Helper |
| 1,2-Dioleoyl-sn-glycero-3-phosphatidylethanolamine | DOPE | Helper |
| Cholesterol | | Helper |
| N-[1-(2,3-Dioleyloxy)prophyl]N,N,N-trimethylammonium | DOTMA | Cationic |
| chloride | | |
| 1,2-Dioleoyloxy-3-trimethylammonium-propane | DOTAP | Cationic |
| Dioctadecylamidoglycylspermine | DOGS | Cationic |
| N-(3-Aminopropyl)-N,N-dimethyl-2,3-bis(dodecyloxy)-1- | GAP-DLRIE | Cationic |
| propanaminium bromide | | |
| Cetyltrimethylammonium bromide | CTAB | Cationic |
| 6-Lauroxyhexyl ornithinate | LHON | Cationic |
| 1-(2,3-Dioleoyloxypropyl)-2,4,6-trimethylpyridinium | 2Oc | Cationic |
| 2,3-Dioleyloxy-N-[2(sperminecarboxamido-ethyl]-N,N- | DOSPA | Cationic |
| dimethyl-1-propanaminium trifluoroacetate | | |
| 1,2-Dioley1-3-trimethylammonium-propane | DOPA | Cationic |
| N-(2-Hydroxyethyl)-N,N-dimethyl-2,3-bis(tetradecyloxy)-1- | MDRIE | Cationic |
| propanaminium bromide | | |
| Dimyristooxypropyl dimethyl hydroxyethyl ammonium bromide | DMRI | Cationic |
| 3β-[N-(N′,N′-Dimethylaminoethane)-carbamoyl]cholesterol | DC-Chol | Cationic |
| Bis-guanidium-tren-cholesterol | BGTC | Cationic |
| 1,3-Diodeoxy-2-(6-carboxy-spermyl)-propylamide | DOSPER | Cationic |
| Dimethyloctadecylammonium bromide | DDAB | Cationic |
| Dioctadecylamidoglicylspermidin | DSL | Cationic |
| rac-[(2,3-Dioctadecyloxypropyl)(2-hydroxyethyl)]- | CLIP-1 | Cationic |
| dimethylammonium chloride | | |
| rac-[2(2,3-Dihexadecyloxypropyl- | CLIP-6 | Cationic |
| oxymethyloxy)ethyl]trimethylammoniun bromide | | |
| Ethyldimyristoylphosphatidylcholine | EDMPC | Cationic |
| 1,2-Distearyloxy-N,N-dimethyl-3-aminopropane | DSDMA | Cationic |
| 1,2-Dimyristoyl-trimethylammonium propane | DMTAP | Cationic |
| O,O′-Dimyristyl-N-lysyl aspartate | DMKE | Cationic |
| 1,2-Distearoyl-sn-glycero-3-ethylpho sphocholine | DSEPC | Cationic |
| N-Palmitoyl D-erythro-sphingosyl carbamoyl-spermine | CCS | Cationic |
| N-t-Butyl-N0-tetradecyl-3-tetradecylaminopropionamidine | diC14-amidine | Cationic |
| Octadecenolyoxy[ethyl-2-heptadecenyl-3 hydroxyethyl] | DOTIM | Cationic |
| imidazolinium chloride | | |
| N1-Cholesteryloxycarbonyl-3,7-diazanonane-1,9-diamine | CDAN | Cationic |
| 2-(3-[Bis(3-amino-propyl)-amino]propylamino)-N- | RPR209120 | Cationic |
| ditetradecylcarbamoylme-ethyl-acetamide | | |
| 1,2-dilinoleyloxy-3-dimethylaminopropane | DLinDMA | Cationic |
| 2,2-dilinoley1-4-dimethylaminoethyl-[1,3]-dioxolane | DLin-KC2- | Cationic |
| | DMA | |
| dilinoleyl-methyl-4-dimethylaminobutyrate | DLin-MC3- | Cationic |
| | DMA | |

[0213] Table 1 lists exemplary polymers for use in gene transfer and/or nanoparticle formulations.

TABLE 1
Polymers Used for Gene Transfer

| Polymer | Abbreviation |
|---|---|
| Poly(ethylene)glycol | PEG |
| Polyethylenimine | PEI |
| Dithiobis (succinimidylpropionate) | DSP |
| Dimethyl-3,3′-dithiobispropionimidate | DTBP |
| Poly(ethylene imine)biscarbamate | PEIC |
| Poly(L-lysine) | PLL |
| Histidine modified PLL | |
| Poly(N-vinylpyrrolidone) | PVP |
| Poly(propylenimine) | PPI |
| Poly(amidoamine) | PAMAM |
| Poly(amidoethylenimine) | SS-PAEI |
| Triethylenetetramine | TETA |
| Poly(β-aminoester) | |
| Poly(4-hydroxy-L-proline ester) | PHP |
| Poly(allylamine) | |
| Poly(α-[4-aminobutyl]-L-glycolic acid) | PAGA |
| Poly(D,L-lactic-co-glycolic acid) | PLGA |
| Poly(N-ethyl-4-vinylpyridinium bromide) | |
| Poly(phosphazene)s | PPZ |
| Poly(phosphoester)s | PPE |
| Poly(phosphoramidate)s | PPA |
| Poly(N-2-hydroxypropylmethacrylamide) | pHPMA |
| Poly (2-(dimethylamino)ethyl methacrylate) | pDMAEMA |
| Poly(2-aminoethyl propylene phosphate) | PPE-EA |
| Chitosan | |
| Galactosylated chitosan | |
| N-Dodacylated chitosan | |
| Histone | |
| Collagen | |
| Dextran-spermine | D-SPM |

[0214] Table 2 summarizes delivery methods for a polynucleotide encoding a large serine recombinase described herein.

TABLE 2

| | | Delivery into | | | Type of |
|---|---|---|---|---|---|
| | | Non-Dividing | Duration of | Genome | Molecule |
| Delivery | Vector/Mode | Cells | Expression | Integration | Delivered |
| Physical | (e.g., | YES | Transient | NO | Nucleic Acids |
| | electroporation, | | | | and Proteins |
| | particle gun, | | | | |
| | Calcium | | | | |
| | Phosphate | | | | |
| | transfection | | | | |
| Viral | Retrovirus | NO | Stable | YES | RNA |
| | Lentivirus | YES | Stable | YES/NO with | RNA |
| | | | | modification | |
| | Adenovirus | YES | Transient | NO | DNA |
| | Adeno- | YES | Stable | NO | DNA |
| | Associated | | | | |
| | Virus (AAV) | | | | |
| | Vaccinia Virus | YES | Very | NO | DNA |
| | | | Transient | | |
| | Herpes Simplex | YES | Stable | NO | DNA |
| | Virus | | | | |
| Non-Viral | Cationic | YES | Transient | Depends on | Nucleic Acids |
| | Liposomes | | | what is | and Proteins |
| | | | | delivered | |
| | Polymeric | YES | Transient | Depends on | Nucleic Acids |
| | Nanoparticles | | | what is | and Proteins |
| | | | | delivered | |
| Biological | Attenuated | YES | Transient | NO | Nucleic Acids |
| Non-Viral | Bacteria | | | | |
| Delivery | Engineered | YES | Transient | NO | Nucleic Acids |
| Vehicles | Bacteriophages | | | | |
| | Mammalian | YES | Transient | NO | Nucleic Acids |
| | Virus-like | | | | |
| | Particles | | | | |
| | Biological | YES | Transient | NO | Nucleic Acids |
| | liposomes: | | | | |
| | Erythrocyte | | | | |
| | Ghosts and | | | | |
| | Exosomes | | | | |

[0215] In some embodiments, the LSR system, or polynucleotides comprising a LSR system contemplated in the present disclosure, is encapsulated in a lipid nanoparticle for in vitro, ex vivo and/or in vivo delivery. In some examples, the LSR system or the polynucleotide comprising the LSR system is delivered into a cell by electroporation.

[0216] In some embodiments, the LSR system may be co-delivered into a cell, a tissue or a subject with a heterogeneous nucleic acid, e.g., a polynucleotide encoding a chimeric antigen receptor (CAR); the LSR system and the polynucleotide encoding the CAR are encapsulated into a single LNP, or into different LNPs separately.

[0217] In some embodiments, the LSR system comprises a circular nucleic acid molecule (e.g., circRNA and circDNA). In some embodiments, the circular nucleic acid molecule may be encapsulated in a LNP for delivery.

[0218] A promoter used to drive the system can include AAV ITR. This can be advantageous for eliminating the need for an additional promoter element, which can take up space in the vector. The additional space freed up can be used to drive the expression of additional elements, such as a guide nucleic acid or a selectable marker. ITR activity is relatively weak, so it can be used to reduce potential toxicity due to over expression of the chosen nuclease.

[0219] Any suitable promoter can be used to drive expression of the large serine recombinase. For ubiquitous expression, promoters that can be used include CMV, CAG, CBh, PGK, SV40, Ferritin heavy or light chains, etc. For brain or other CNS cell expression, suitable promoters can include: SynapsinI for all neurons, CaMKIIalpha for excitatory neurons, GAD67 or GAD65 or VGAT for GABAergic neurons, etc. For liver cell expression, suitable promoters include the Albumin promoter. For lung cell expression, suitable promoters can include SP-B. For endothelial cells, suitable promoters can include ICAM. For hematopoietic cells suitable promoters can include IFNbeta or CD45. For Osteoblasts suitable promoters can include OG-2.

[0220] In some cases, a large serine recombinase of the present disclosure is of small enough size to allow separate promoters to drive expression of the large serine recombinase and a compatible recognition sequence acid within the same nucleic acid molecule. For instance, a vector or viral vector can comprise a first promoter operably linked to a nucleic acid encoding the large serine recombinase and a second promoter operably linked to the heterologous nucleic acid.

[0221] The promoter used to drive expression of a guide nucleic acid can include: Pol III promoters such as U6 or H1 Use of Pol II promoter and intronic cassettes to express gRNA Adeno Associated Virus (AAV).

[0222] A large serine recombinase described herein with or without one or more guide nucleic can be delivered using adeno associated virus (AAV), lentivirus, adenovirus or other plasmid or viral vector types, in particular, using formulations and doses from, for example, U.S. Pat. No. 8,454,972 (formulations, doses for adenovirus), U.S. Pat. No. 8,404,658 (formulations, doses for AAV) and U.S. Pat. No. 5,846,946 (formulations, doses for DNA plasmids) and from clinical trials and publications regarding the clinical trials involving lentivirus, AAV and adenovirus. For example, for AAV, the route of administration, formulation and dose can be as in U.S. Pat. No. 8,454,972 and as in clinical trials involving AAV. For Adenovirus, the route of administration, formulation and dose can be as in U.S. Pat. No. 8,404,658 and as in clinical trials involving adenovirus. For plasmid delivery, the route of administration, formulation and dose can be as in U.S. Pat. No. 5,846,946 and as in clinical studies involving plasmids. Doses can be based on or extrapolated to an average 70 kg individual (e.g., a male adult human), and can be adjusted for patients, subjects, mammals of different weight and species. Frequency of administration is within the ambit of the medical or veterinary practitioner (e.g., physician, veterinarian), depending on usual factors including the age, sex, general health, other conditions of the patient or subject and the particular condition or symptoms being addressed. The viral vectors can be injected into the tissue of interest. For cell-type specific editing, the expression of the serine recombinase and optional donor nucleic acid can be driven by a cell-type specific promoter.

[0223] For in vivo delivery, AAV can be advantageous over other viral vectors. In some cases, AAV allows low toxicity, which can be due to the purification method not requiring ultra-centrifugation of cell particles that can activate the immune response. In some cases, AAV allows low probability of causing insertional mutagenesis because it doesn't integrate into the host genome.

[0224] AAV has a packaging limit of 4.5 or 4.75 Kb. Constructs larger than 4.5 or 4.75 Kb can lead to significantly reduced virus production.

[0225] An AAV can be AAV1, AAV2, AAV5 or any combination thereof. One can select the type of AAV with regard to the cells to be targeted; e.g., one can select AAV serotypes 1, 2, 5 or a hybrid capsid AAV1, AAV2, AAV5 or any combination thereof for targeting brain or neuronal cells; and one can select AAV4 for targeting cardiac tissue. AAV8 is useful for delivery to the liver. A tabulation of certain AAV serotypes as to these cells can be found in Grimm, D. et al, J. Virol. 82:5887-5911 (2008)).

[0226] Lentiviruses are complex retroviruses that have the ability to infect and express their genes in both mitotic and post-mitotic cells. The most commonly known lentivirus is the human immunodeficiency virus (HIV), which uses the envelope glycoproteins of other viruses to target a broad range of cell types.

[0227] Lentiviruses can be prepared as follows. After cloning pCasES10 (which contains a lentiviral transfer plasmid backbone), HEK293FT at low passage (p=5) were seeded in a T-75 flask to 50% confluence the day before transfection in DMEM with 10% fetal bovine serum and without antibiotics. After 20 hours, media is changed to OptiMEM (serum-free) media and transfection was done 4 hours later. Cells are transfected with 10 μg of lentiviral transfer plasmid (pCasES10) and the following packaging plasmids: 5 μg of pMD2.G (VSV-g pseudotype), and 7.5 μg of psPAX2 (gag/pol/rev/tat). Transfection can be done in 4 mL OptiMEM with a cationic lipid delivery agent (50 μl Lipofectamine 2000 and 100 ul Plus reagent). After 6 hours, the media is changed to antibiotic-free DMEM with 10% fetal bovine serum. These methods use serum during cell culture, but serum-free methods are preferred.

[0228] Lentivirus can be purified as follows. Viral supernatants are harvested after 48 hours. Supernatants are first cleared of debris and filtered through a 0.45 μm low protein binding (PVDF) filter. They are then spun in an ultracentrifuge for 2 hours at 24,000 rpm. Viral pellets are resuspended in 50 μl of DMEM overnight at 4° C. They are then aliquoted and immediately frozen at −80° C.

[0229] In another embodiment, minimal non-primate lentiviral vectors based on the equine infectious anemia virus (EIAV) are also contemplated. In another embodiment, RetinoStat®, an equine infectious anemia virus-based lentiviral gene therapy vector that expresses angiostatic proteins endostatin and angiostatin that is contemplated to be delivered via a subretinal injection. In another embodiment, use of self-inactivating lentiviral vectors is contemplated.

[0230] To enhance expression and reduce possible toxicity, the system can be modified to include one or more modified nucleoside e.g., using pseudo-U or 5-Methyl-C.

[0231] The disclosure in some embodiments comprehends a method of modifying a cell or organism. The cell can be a prokaryotic cell or a eukaryotic cell. The cell can be a mammalian cell. The mammalian cell many be a non-human primate, bovine, porcine, rodent or mouse cell. The modification introduced to the cell by the recombinase, compositions and methods of the present disclosure can be such that the cell and progeny of the cell are altered for improved production of biologic products such as an antibody, starch, alcohol or other desired cellular output. The modification introduced to the cell by the methods of the present disclosure can be such that the cell and progeny of the cell include an alteration that changes the biologic product produced.

[0232] The system can comprise one or more different vectors. In an aspect, the large serine recombinase and/or heterologous DNA is codon optimized for expression the desired cell type, preferentially a eukaryotic cell, preferably a mammalian cell or a human cell.

[0233] In general, codon optimization refers to a process of modifying a nucleic acid sequence for enhanced expression in the host cells of interest by replacing at least one codon (e.g. about or more than about 1, 2, 3, 4, 5, 10, 15, 20, 25, 50, or more codons) of the native sequence with codons that are more frequently or most frequently used in the genes of that host cell while maintaining the native amino acid sequence. Various species exhibit particular bias for certain codons of a particular amino acid. Codon bias (differences in codon usage between organisms) often correlates with the efficiency of translation of messenger RNA (mRNA), which is in turn believed to be dependent on, among other things, the properties of the codons being translated and the availability of particular transfer RNA (tRNA) molecules. The predominance of selected tRNAs in a cell is generally a reflection of the codons used most frequently in peptide synthesis. Accordingly, genes can be tailored for optimal gene expression in a given organism based on codon optimization. Codon usage tables are readily available, for example, at the “Codon Usage Database” available at www.kazusa.orjp/codon/(visited Jul. 9, 2002), and these tables can be adapted in a number of ways. See, Nakamura, Y., et al. “Codon usage tabulated from the international DNA sequence databases: status for the year 2000” Nucl. Acids Res. 28:292 (2000). Computer algorithms for codon optimizing a particular sequence for expression in a particular host cell are also available, such as Gene Forge (Aptagen; Jacobus, Pa.), are also available. In some embodiments, one or more codons (e.g., 1, 2, 3, 4, 5, 10, 15, 20, 25, 50, or more, or all codons) in a sequence encoding an engineered nuclease correspond to the most frequently used codon for a particular amino acid.

[0234] Packaging cells are typically used to form virus particles that are capable of infecting a host cell. Such cells include 293 cells, which package adenovirus, and psi.2 cells or PA317 cells, which package retrovirus. Viral vectors used in gene therapy are usually generated by producing a cell line that packages a nucleic acid vector into a viral particle. The vectors typically contain the minimal viral sequences required for packaging and subsequent integration into a host, other viral sequences being replaced by an expression cassette for the polynucleotide(s) to be expressed. The missing viral functions are typically supplied in trans by the packaging cell line. For example, AAV vectors used in gene therapy typically only possess ITR sequences from the AAV genome which are required for packaging and integration into the host genome. Viral DNA can be packaged in a cell line, which contains a helper plasmid encoding the other AAV genes, namely rep and cap, but lacking ITR sequences. The cell line can also be infected with adenovirus as a helper. The helper virus can promote replication of the AAV vector and expression of AAV genes from the helper plasmid. The helper plasmid in some cases is not packaged in significant amounts due to a lack of ITR sequences. Contamination with adenovirus can be reduced by, e.g., heat treatment to which adenovirus is more sensitive than AAV.

### Applications and Methods of Use

[0235] Using the systems described herein, optionally using any of compositions and delivery modalities described herein (including nanoparticle delivery modalities, such as lipid nanoparticles, and viral delivery modalities, such as AAVs), the invention also provides applications for modifying a DNA molecule in the genome of a cell, whether in vitro, ex vivo, in situ, or in vivo, e.g.,, in a tissue in an organism, such as a subject including mammalian subjects, such as a human. In accordance, one aspect of the present invention provides a method for modifying a DNA sequence in a target genome; the method comprising introducing into the target genome a serine recombinase as described herein or a variant thereof, or a system comprising a serine recombinase.

[0236] In some embodiments, the target genome is a human genome.

[0237] In some embodiments, the method or system is used to control the expression of a target coding mRNA (i.e., a protein encoding gene) where binding results in increased or decreased gene expression. In some embodiments, the method or system is used to control gene regulation by integrating heterologous DNA into genetic regulatory elements such as promoters or enhancers, or integrating heterologous promoters at other target locations.

[0238] In accordance, a heterogeneous sequence to be inserted into a host genome is also provided. In some embodiments, the heterogeneous sequence and the LSR system are delivered into the host genome simultaneously. In other embodiments, the heterogeneous sequence and the LSR system are delivered into the host genome separately. In some embodiments, the heterogeneous sequence is inserted at the cleavage site induced by the LSR.

[0239] As non-limiting examples, the method or system is used to generate CAR expressing cells; the method and/or system can be used to control the expression of a CAR targeting a tumor specific antigen.

[0240] The heterogeneous sequence may be provided to the cell as single-stranded DNA, single-stranded RNA, double-stranded DNA, double-stranded RNA, circular RNA circular DNA, nanoplasmid, minicircle DNA or doggybone DNA (dbDNA™). It may be introduced into a cell in linear or circular form. If introduced in linear form, the ends of the donor sequence may be protected (e.g., from exonucleolytic degradation) by methods known to those of skill in the art. For example, one or more dideoxynucleotide residues are added to the 3′ terminus of a linear molecule and/or self-complementary oligonucleotides are ligated to one or both ends. Additional methods for protecting exogenous polynucleotides from degradation include, but are not limited to, addition of terminal amino group(s) and the use of modified internucleotide linkages such as, for example, phosphorothioates, phosphor amidates, and O-methyl ribose or deoxyribose residues. As an alternative to protecting the termini of a linear donor sequence, additional lengths of sequence may be included outside of the regions of homology that can be degraded without impacting recombination. A donor sequence can be introduced into a cell as part of a vector molecule having additional sequences such as, for example, replication origins, promoters and genes encoding antibiotic resistance. Moreover, donor sequences can be introduced as naked nucleic acid, as nucleic acid complexed with an agent such as a liposome or poloxamer, or can be delivered by viruses (e.g., adenovirus, AAV), as described above for nucleic acids encoding a DNA-targeting RNA and/or site-directed modifying polypeptide and/or donor polynucleotide.

[0241] In some embodiments, the method or system is used to control the expression of a target non-coding RNA, including tRNA, rRNA, snoRNA, siRNA, miRNA, and long ncRNA.

[0242] In some embodiments, the method or system is used for site-specific editing of a target DNA, e.g., insertion of template DNA into a target DNA. In some embodiments, the system is used for of generating an edit, e.g., an insertion, that is present at the target site with a higher frequency than any other site in the genome, e.g., an insertion in a target site at a frequency of at least 2, 3, 4, 5, 10, 50, 100, or 1000-fold that of the frequency at all other sites in the genome.

[0243] In some embodiments, the large serine recombinase method or system is used for correction of pathogenic mutations by insertion of beneficial clinical variants or suppressor mutations.

[0244] In some embodiments, the system is able to modify a target genome without introducing undesirable mutations.

[0245] In some embodiments, efficiency of integration events can be used as a measure of editing of target sites by a LSR system of the present invention. In some examples, the LSR system described herein can integrate a heterologous sequence in a fraction of target sites. The LSR system is capable of editing at least 1%, 2%, 5%, 10%, 20%, 30%, 40%, 50%, 60%, 70%, 80%, 90%, 95%, 96%, 97%, 98%, 99%, 99.5%, 99.9% or 100% of target loci as measured by the present assay (e.g., NGS).

[0246] In some embodiments, a LSR system is capable of editing cells at an average copy number of at least 0.1, e.g., at least 0.1, 0.5, 1, 2, 3, 4, 5, 10, or 100 copies per genome as normalized to a reference gene.

[0247] In some embodiments, a ratio of on-target integration and off-target integration is measured for determining the efficacy of a LSR system.

### Therapeutic Applications

[0248] The large serine recombinase methods or systems described herein can have various therapeutic applications. Accordingly, in some embodiments, a method of treating a disorder or a disease in a subject in need thereof is provided; the method comprising administering to the subject a large serine recombinase system for modifying a DNA sequence template in the subject in need. Exemplary therapeutic modifications include integrating therapeutic nucleic acid molecules into a DNA sequence template, providing expression of a therapeutic transgene in individuals with loss-of-function mutations, replacing gain-of-function mutations with normal transgenes, providing regulatory sequences to eliminate gain-of-function mutation expression, and/or controlling the expression of operably linked genes, transgenes and systems thereof.

[0249] In some embodiments, the heterologous sequence is a therapeutic agent, e.g., a therapeutic transgene expressing a therapeutic agent/protein.

[0250] Exemplary therapeutic proteins include replacement blood factors (e.g., Factor II, V, VII, X, XI, XII or XIII) and replacement enzymes, e.g., lysosomal enzymes. In some examples, the compositions, LSR systems and methods described herein are useful to express, in a target human genome, agalsidase alpha or beta for treatment of Fabry Disease; imiglucerase, taliglucerase alfa, velaglucerase alfa, or alglucerase for Gaucher Disease; sebelipase alpha for lysosomal acid lipase deficiency (Wolman disease/CESD); laronidase, idursulfase, elosulfase alpha, or galsulfase for mucopolysaccharidoses; alglucosidase alpha for Pompe disease, factor I, II, V, VII, X, XI, XII or XIII for blood factor deficiencies.

[0251] In some embodiments, the compositions, LSR systems and methods described herein can be used to modify the genome in the subject to express a heterologous sequence encoding an intracellular protein (e.g., a cytoplasmic protein, a nuclear protein, an organellar protein such as a mitochondrial protein or lysosomal protein, or a membrane protein). In some examples, the heterologous sequence encode a membrane protein, e.g., a membrane protein other than a CAR, and/or an endogenous human membrane protein, an extracellular protein, an enzyme, a structural protein, a signaling protein, a regulatory protein, a transport protein, a sensory protein, a motor protein, a defense protein, or a storage protein.

[0252] In some embodiments, the compositions, LSR systems and methods described herein can be used to modify the genome in the subject to express a heterologous sequence encoding a chimeric antigen receptor (CAR), a T cell receptor, a B cell receptor, or an antibody.

[0253] In some embodiments, the compositions, LSR systems and methods described herein are used for immunotherapy, for example by modifying an immune cell to express a CAR or a TCR against a cancer specific antigen. The immune cells may be T cells, including any subpopulation of T-cells, e.g., CD4+, CD8+, gamma-delta, naive T cells, stem cell memory T cells, central memory T cells, or a mixture of subpopulations. In some embodiments, the immune cells are NK cells. In other examples, the compositions, LSR systems and methods described herein can be used to deliver a CAR or TCR to natural killer T (NKT) cells, and progenitor cells, e.g., progenitor cells of T, NK, or NKT cells.

[0254] In some embodiments, the immune cells comprise a CAR specific to a tumor or a pathogen antigen selected from a group consisting of AChR (fetal acetylcholine receptor), ADGRE2, AFP (alpha fetoprotein), BAFF-R, BCMA, CAIX (carbonic anhydrase IX), CCR1, CCR4, CEA (carcinoembryonic antigen), CD3, CD5, CD8, CD7, CD10, CD13, CD14, CD15, CD19, CD20, CD22, CD30, CD33, CFFI, CD34, CD38, CD41, CD44, CD49f, CD56, CD61, CD64, CD68, CD70,CD74, CD99,CD117, CD123, CD133, CD138, CD44v6, CD267, CD269, CDS, CFEC12A, CS1, EGP-2 (epithelial glycoprotein-2), EGP-40 (epithelial glycoprotein-40), EGFR (HERI), EGFR-VIII, EpCAM (epithelial cell adhesion molecule), EphA2, ERBB2 (HER2, human epidermal growth factor receptor 2), ERBB3, ERBB4, FBP (folate-binding protein), Flt3 receptor, folate receptor-a, GD2 (ganglioside G2), GD3 (ganglioside G3), GPC3 (glypican-3), GPI00, hTERT (human telomerase reverse transcriptase), ICAM-1, integrin B7, interleukin 6 receptor, IF13Ra2 (interleukin-13 receptor 30 subunit alpha-2), kappa-light chain, KDR (kinase insert domain receptor), FeY (Fewis Y), FICAM (FI cell adhesion molecule), FIFRB2 (leukocyte immunoglobulin like receptor B2), MARTI, MAGE-A1 (melanoma associated antigen Al), MAGE-A3, MSLN (mesothelin), MUC16 (mucin 16), MUCI (mucin I), KG2D ligands, NY-ESO-1 (cancer-testis antigen), PRI (proteinase 3), TRBCI, TRBC2, TFM-3, TACI, tyrosinase, survivin, hTERT, oncofetal antigen (h5T4), p53, PSCA (prostate stem cell antigen), PSMA (pro state-specific membrane antigen), hRORI, TAG-72 (tumor-associated glycoprotein 72), VEGF-R2 (vascular endothelial growth factor R2), WT-1 (Wilms tumor protein), and antigens of HIV (human immunodeficiency virus), hepatitis B, hepatitis C, CMV (cytomegalovirus), EBV (Epstein-Barr virus), HPV (human papilloma virus).

[0255] In some embodiments, immune cells, e.g., T-cells, NK cells, NKT cells, or progenitor cells are modified ex vivo and then delivered to a patient. In some embodiments, a LSR system is delivered by one of the methods mentioned herein, and immune cells, e.g., T-cells, NK cells, NKT cells, or progenitor cells are modified in vivo in the patient.

[0256] In one aspect, the methods or systems described herein can be used for treating a disease caused by overexpression of a disease gene, mutations in a disease gene and altered function of a disease gene.

[0257] The methods or systems described herein can also be used to treat a cancer in a subject (e.g., a human subject). For example, the large serine recombinases can integrate a lethal gene or a conditional lethal gene in cancer cells to induce cell death in the cancer cells (e.g., via apoptosis).

[0258] In some embodiments, a LSR system of the present invention can be used to make multiple modifications to a target cell, either simultaneously or sequentially. In some embodiments, a LSR system of the present invention can be used to further modify an already modified cell.

[0259] In some embodiments, a LSR system of the present invention can be used to modify a cell edited by a complementary technology, e.g., a gene edited cell, e.g., a cell with one or more CRISPR knockouts, and a base-edited cell. In some embodiments, the previously edited cell is a T-cell. In some embodiments, the previous modifications comprise gene knockouts in a T-cell, e.g., endogenous TCR (e.g., TRAC, TRBC), HLA Class I (B2M), PD1, CD52, CTLA-4, TIM-3, LAG-3, DGK. In some embodiments, a LSR system of the present invention is used to insert a TCR or CAR into a T-cell that has been previously modified. In some embodiments, the immune cells (e.g., T cells and NK cells) are previously modified with increased cytotoxic activities. As non-limiting examples, the T cells are genetically modified by a gene editing system, e.g., CRISPR/Cas system and base editing system. One or more genes (e.g., a TCR receptor gene, e.g., TRAC and TRBC) are inhibited in the modified T cells.

[0260] Exemplary diseases, disorders and clinical indications that can be treated using the present recombinases, systems and compositions include a hematopoietic stem cell (HSC) disease, disorder, or condition; a kidney disease, disorder, or condition; a liver disease, disorder, or condition; a lung disease, disorder, or condition; a skeletal muscle disease, disorder, or condition; a skin disease, disorder, or condition; a neurological disease, disorder, or condition; a heart disease, disorder, or condition; a spinal disease, an inflammatory disease, an infectious disease, a genetic defect, and a cancer. A cancer can be cancer of the cerebrum, cerebellum, adrenal gland, ovary, pancreas, parathyroid gland, hypophysis, testis, thyroid gland, breast, spleen, tonsil, thymus, lymph node, bone marrow, lung, cardiac muscle, esophagus, stomach, small intestine, colon, liver, salivary gland, kidney, prostate, blood, or other cell or tissue type, and can include multiple cancers.

### Administration

[0261] The composition and systems described herein may be used in vitro or in vivo. In some embodiments the system or components of the system are delivered to cells (e.g., mammalian cells, e.g., human cells), e.g., in vitro or in vivo. The skilled artisan will understand that the components of the LSR system may be delivered in the form of polypeptide, nucleic acid (e.g., DNA, RNA), and combinations thereof.

[0262] In some embodiments, the LSR system and/or components of the system are delivered as nucleic acids, e.g., DNA or mRNA. In some embodiments the system or components of the system are delivered as a combination of DNA and protein. In some embodiments the system or components of the system are delivered as a combination of RNA and protein. In some embodiments the recombinase polypeptide is delivered as a protein.

[0263] In some embodiments the system or components of the system are delivered to cells, e.g., mammalian cells or human cells, using a vector. The vector may be, e.g., a plasmid or a virus such as adenovirus, an AAV, a lentivirus or a retrovirus. In some embodiments delivery is in vivo, in vitro, ex vivo, or in situ.

[0264] In one embodiment, the compositions and systems described herein can be formulated in liposomes or other similar vesicles. Liposomes are spherical vesicle structures composed of a uni-or multilamellar lipid bilayer surrounding internal aqueous compartments and a relatively impermeable outer lipophilic phospholipid bilayer. Liposomes may be anionic, neutral or cationic. Liposomes are biocompatible, nontoxic, can deliver both hydrophilic and lipophilic drug molecules, protect their cargo from degradation by plasma enzymes, and transport their load across biological membranes and the blood brain barrier (BBB).

[0265] In some embodiments, a LSR system described herein is delivered to a tissue or cell from the cerebrum, cerebellum, adrenal gland, ovary, pancreas, parathyroid gland, hypophysis, testis, thyroid gland, breast, spleen, tonsil, thymus, lymph node, bone marrow, lung, cardiac muscle, esophagus, stomach, small intestine, colon, liver, salivary gland, kidney, prostate, blood, or other cell or tissue type.

[0266] In some embodiments, a LSR system described herein described herein is administered by enteral administration (e.g., oral, rectal, gastrointestinal, sublingual, sublabial, or buccal administration). In some embodiments, a Gene Writer™ system described herein is administered by parenteral administration (e.g., intravenous, intramuscular, subcutaneous, intradermal, epidural, intracerebral, intracerebroventricular, epicutaneous, nasal, intra-arterial, intra-articular, intracavernous, intraocular, intraosseous infusion, intraperitoneal, intrathecal, intrauterine, intravaginal, intravesical, perivascular, or transmucosal administration). In some embodiments, a LSR system described herein is administered by topical administration (e.g., transdermal administration).

### Kits

[0267] In one aspect, the invention provides kits containing any one or more of the elements disclosed in the above methods and compositions. In some embodiments, the kit comprises a vector system and instructions for using the kit. In some embodiments, the vector system comprises one or more insertion sites for inserting a guide sequence, wherein when expressed, the attP (or attB) sequence directs sequence-specific recombination by a large serine recombinase of heterologous DNA within a target sequence in a eukaryotic cell. Elements may be provided individually or in combinations, and may be provided in any suitable container, such as a vial, a bottle, or a tube. In some embodiments, the kit includes instructions in one or more languages, for example in more than one language.

[0268] In some embodiments, a kit comprises one or more reagents for use in a process utilizing one or more of the elements described herein. Reagents may be provided in any suitable container. For example, a kit may provide one or more reaction or storage buffers. Reagents may be provided in a form that is usable in a particular assay, or in a form that requires addition of one or more other components before use (e.g., in concentrate or lyophilized form). A buffer can be any buffer, including but not limited to a sodium carbonate buffer, a sodium bicarbonate buffer, a borate buffer, a Tris buffer, a MOPS buffer, a HEPES buffer, and combinations thereof. In some embodiments, the buffer is alkaline. In some embodiments, the buffer has a pH from about 7 to about 10. In some embodiments, the kit comprises one or more oligonucleotides corresponding to a guide sequence for insertion into a vector so as to operably link the guide sequence and a regulatory element. In some embodiments, the kit comprises a homologous recombination template polynucleotide.

[0269] All publications, patent applications, patents, and other references mentioned herein are incorporated by reference in their entirety. In addition, the materials, methods, and examples are illustrative only and not intended to be limiting. Unless otherwise defined, all technical and scientific terms used herein have the same meaning as commonly understood by one of ordinary skill in the art to which this invention belongs. Although methods and materials similar or equivalent to those described herein can be used in the practice or testing of the present invention, suitable methods and materials are described herein.

### EXAMPLES

[0270] The following examples describe some of the preferred modes of making and practicing the present invention. However, it should be understood that these examples are for illustrative purposes only and are not meant to limit the scope of the invention.

### Example 1. Screening Novel Recombinant Large Serine Recombinases

[0271] A large number of large serine recombinases are sequenced from bacteriophages and the enzyme polypeptides are gathered for preparing a library of large serine recombinases. As described herein, novel large serine recombinases are derived from human gut metagenomes (Camarillo-Guerrero et al., Massive expansion of human gut bacteriophage diversity; Cell, 2021, 184:1098-1109;http://ftp.ebi.ac.uk/pub/databases/metagenomics/genome_sets/gut_phage_database/; the contents of which are incorporated herein by reference).

[0272] A library of vectors were prepared, each of which was designed to include an open reading frame of a candidate large serine recombinase from genomes in the Gut Phage Genome database (sequence identifiers are provided in Table 3), a nucleic acid sequence comprising about 300 bp downstream of the LSR encoding sequence in the phage genome and about 300 bp upstream of the LSR encoding sequence in the phase genome and a unique barcode that correlates to the LSR in the vector. The expression was controlled using a CMV promoter and a GFP reporter gene was incorporated to the vector. The vectors for different LSRs (e.g., LSRs defined by any one of SEQ ID NOs: 1-774 or codon-optimized LSR defined by any one of SEQ ID NOs: 775-1548) were pooled together for screening and identifying an active recombinase in the pooled library.

[0273] The vectors were transfected with HEK293 cells. Cells were cultured and harvested 1 week, 2 weeks or 3 weeks after the transfection. GFP expression indicated integration or recombinase activity. FIG. 1 illustrates exemplary large serine recombinases with high recombination or integration activity as measured by a GFP reporter assay.

[0274] Samples were prepared and sequenced using next-generation sequencing (NGS). Large serine recombinases showing high activity were identified by sequencing barcodes of the vectors. Using this approach, novel large serine recombinase enzymes were identified from different phage genomes

### Example 2. Evaluating Integration or Recombination Activity of Large Serine Recombinases in Human Cells

[0275] In this example, novel engineered large serine recombinase enzymes were recombinantly produced and tested for activity. The recombination or integration activity of novel large serine recombinases was tested in human cells. The large serine recombinases were used to target loci in HEK293T cells by transfection and tested for integration or recombination.

[0276] Briefly, HEK293T cells were plated in a 96-well plate. Cells were transfected with expression vectors comprising large serine recombinase under the control of a promoter and a cognate attP (or attB) site, 24 hours after plating. The vector further comprised a GFP reporter gene and a barcode for next generation sequencing.

[0277] GFP expression was evaluated and the presence of positive GFP expression validated serine recombinase activity in the target cell. Integration efficiency was identified by % GFP expression. As shown in FIG. 1A, several exemplary large serine recombinases showed integration as seen by GFP expression.

[0278] GFP expressing cells were harvested 72 hours post-transfection and total DNA was extracted. Sequencing was carried out and reads from each sample were identified on the basis of their associated unique barcode and aligned to a reference sequence. The barcodes were engineered to be situated between the attP and large serine recombinase sequences and sequencing is used to identify the cognate attB sites in the target genome. For example, as shown in FIG. 1B, exemplary pseudo attB sites were identified in human cells. PCR was used to amplify targeted insertions in the human genome.

[0279] The results showed that active large serine recombinases could integrate into the genome in human cells and lead to expression of heterologous DNA.

[0280] Similarly, in some embodiments, the barcodes are engineered to be situated between attB and large serine recombinase sequences and sequencing is used to identify the cognate attP sites in the target genome.

### Example 3: Mapping the Integration Sites of a Large Serine Recombinase

[0281] Active large serine recombinases identified from a database, e.g., using methods of examples 1 and 2, are further tested for the integration sites in a target genome.

[0282] A vector that expresses a large serine recombinase is transfected into target cells, with or without a heterologous sequence. After transfection, cells are harvested and genomic DNA samples are collected. The targeted insertions (TI) integrated randomly in human genome are amplified using PCR. The inserts are amplified and tested for sites of integration by flanking sequences, and recombinase activity is assayed.

[0283] Overall, the results from this example will show the sites of integration.

### Example 4: Testing Integration Efficiency Upon Cotransfection of Donor Containing attP Sites and LSR mRNA

[0284] In this example, exemplary LSR mRNA about 1.5 kb in length (SEQ ID NO: 377) and an exemplary DNA donor with attP sites that was about 6 kb in length were cotransfected into HEK293T cells. Briefly, 25,000 HEK293T cells per well of a 96 well plate were seeded and 24 h later, cells were transfected using varying amounts of plasmid donor (e.g., 50 ng or 200 ng) and varying amounts of LSR mRNA (e.g., 0, 10, 25, 50, 100 or 200 ng).

[0285] Transfection was carried out using exemplary transfection reagents and standard protocols, for example, 400 uL OPTIMEM, 100 uL of MessengerMax are mixed in a tube. In a second tube, X uL mRNA, y uL dsDNA donor without LSR is mixed with 5 uL-(x+y) uL of OPTIMEM. The contents of both tubes are mixed and incubated at room temperature for 5 minutes to add to cells.

[0286] Media is changed the day after transfection, and cells are split every 2-3 days. After 2 weeks of culturing, cells are harvested by trypsinizination and resuspended in PBS after washing. Flow cytometry was carried out (e.g., on an Attune instrument). Data was analyzed using FlowJo, gating on the forward and side scatter and gating on the GFP channel. WT untransfected cells were used as a negative control.

[0287] The results in FIG. 2 showed a dose dependent increase in integration of exemplary LSR-484. The highest activity observed was ˜60% insertion activity.

[0288] Overall, the results showed dose dependent increase in integration of LSR and up to about 60% integration efficiency was achieved.

### Example 5: Integration Efficiency Upon Nucleofection of LSR mRNA at High Doses in HEK293T Cells

[0289] In this example, 2×10⁵ HEK293T cells were nucleofected with an exemplary LSR mRNA of about 1.5 kb length (SEQ ID NO: 377) and a DNA donor with attP sites about 6 kb long. HEK293T cells were trypsinized and resuspending to single cell suspension. In some embodiments, other cell types such as K562 which grow in suspension are used without trypsizination.

[0290] Briefly, cells are counted and nucleofected using the RNA-DNA mix as described in Example 4 using standard protocols in a nucleofector, for example, Lonza. Varying amounts of mRNA (0, 100, 250, 500, 1000 or 2000 ng) and DNA donor (e.g., 1 μg, 2 μg or 3 μg). After nucleofection, cells are plated in 6 well plates and split every 2-3 days. After 2 weeks of culturing, cells are harvested, trypsinized, mixed, washed, spun, and resuspended in PBS. Flow cytometry was performed, for example, using an Attune instrument.

[0291] Flow cytometry data was analyzed using FlowJo, by gating on the forward and side scatter and then gating on the GFP channel. WT untransfected cells were used as a negative control. The results in FIG. 3 showed a dose dependent increase in integration, dependent on both the amount of mRNA and donor DNA.

[0292] About 50% integration was observed with 3 μg DNA.

[0293] Overall, nucleofection resulted in high integration in a dose-dependent manner.

### Example 6: Testing Integration Activity in Human Cells Using Exemplary LSRs

[0294] This Example evaluated integration activity in human K562 cells. Nucleofection assay was carried out in K562 cells using exemplary BLSRb-484 (SEQ ID NO: 377; pTI94 pMaxGFP core attP 70 bp, no LSR; mRNA 3435) and BLSRb-310 (SEQ ID NO: 239; pTI96 pMaxGFP core attP 70 bp, no LSR; mRNA 3432) recombinase.

[0295] 2×10⁵ suspension cells were nucleofected using standard protocols in a nucleofector (e.g. Lonza). Cells were plated in 6 well plates and split every 2-3 days. After culture for about 2 weeks, cells were harvested, washed and resuspended in PBS. Flow cytometry was performed, for example, using an Attune instrument.

[0296] Flow cytometry data was analyzed using FlowJo, by garting on the forward and side scatter and then gating on the GFP channel. WT untransfected cells were used as a negative control. The results in FIG. 4 showed a dose dependent increase in integration, dependent on both the amount of mRNA and donor DNA.

[0297] The results showed that there was a dose dependent increase in integration activity, dependent on both amount of mRNA and donor DNA.

[0298] About 70% integration was observed with 4 μg DNA donor for LSR-484 and up to 35% integration with 4 μg DNA donor for LSR-310.

### Equivalents and Scope

[0299] Those skilled in the art will recognize, or be able to ascertain using no more than routine experimentation, many equivalents to the specific embodiments of the invention described herein. The scope of the present invention is not intended to be limited to the above Description, but rather is as set forth in the following claims.

The application's sequence listing, which the Patent Office published only in electronic form, follows.

SEQUENCE LISTING (2323 sequences)

SEQ ID NO: 1 - protein, 500 aa, unidentified [sequence omitted]

SEQ ID NO: 2 - protein, 474 aa, unidentified
MKCVAYIRVSTDEQAKHGYSIAAQKERLEAYCVSQEWDLIDTFVDDGYSAKDLNRPHFKEMMERVKNDDIDVLLVYRLDRLTRSVLDLYEILKILDTHNCMFKSATEVYDTTNAMGRLFITLVAAIAQWERENTAERVKLGMEKKTKLGKWKGGMPPYGYKILNKELEVNQDEEPLIKYIFHLSKTLGFYTIAKKLTEQGFTTRKGGDWHVDTVRDIANNPIYAGYLTFNDPKDSKKPPRQQTLYDGQHSRIIPREEFWSLQDLLDKRRTFGGKRETSNYYFSSVLRCARCGSSMSGHKGSQGVKTYRCSGKKAGKKCTSHIIKEDNLVLTVLNSLEEITKQIIGDTNQNNISQQKITELETELKLIQKLMKKQKVMFENDVISINELIAKTENLRHQEKQLSEEISKYQKANNTNTEEIKFIMENIHSLWNDANDFERKQIISTIFNQLVIDTEDEYKRGTGASRKIIIVSAK

SEQ ID NO: 3 - protein, 544 aa, unidentified
MELKNIVNSYNITNILGYLRRSRQDMEREKRTGEDTLTEQKELMNKILTAIEIPYELKMEIGSGESIEGRPVFKECLKDLEEGKYQAIAVKEITRLSRGSYSDAGQIVNLLQSKRLIIITPYKVYDPRNPVDMRQIRFELFMAREEFEMTRERMTGAKYTYAAQGKWISGLAPYGYQLNKKTSKLDPVEDEAKVVELIFDLFLNGLNGKDYSYNAIATHLTNLQIPSPAGKKKWNRFTVKAILENEAYIGTVKYKVREKEKDGKRTIRPENEQIIVPDAHTPIIDKDQFQEANKKIENKIPLLPNRSDYKLNELAGVCICADCGGPLSKYEAKRKRQNKNGTESLYHVKVLRCLNNKCMNVRYNDVEEAILDYLKYLQALNDNDLTKHLGSVIQSHENKNNIRSKKQMNEQFEQREKELKNKLNFIFDKYESGIYSDEIFLQRKSVLDKELQELKKAKDEINGLVDFKGGLDINQLKENIKNAIELYESSENREEKNKLLRIMLQKVIVKMTAKRKGPIPAQFEITPILRYNFLIGETVSSYES

SEQ ID NO: 4 - protein, 473 aa, unidentified
MKCIAYVRVSTEEQAKHGYSIAAQTEKLEAYCVSQSWDLVETVVDDGYSAKDMDRPYFQKMINRIKQGGIDVLLVYRLDRLTRSVLDLYNILQILDDHNCKFKSATEVYDTTNAMGRLFITLVAAIAQWERENLAERVKMGIEKKVKLGKWKGGTPPYGYNYENDLLTINEDEEPVVKKIFKLAKQLGFYTIAKMLTELGYPTKKGGDWHVDTVRDIANNPVYAGYVTNNTKEESKKPPREQNLYEGIHPRIIPREDFWALQDELDKRRTFGGKRETSNYYFSSILKCARCGSSMSGHKGSNGIKTYRCSGKKAGKKCTSHIISEKNLTQNILTSLDRLIKGSIKSSNTSLRNISELEKELKSIQRLIDKQKTMFKKDIIDIDELISETDALRVQEKKIAKELNAYYQSRNSNQDDLNYVIENIDALWEAADDHDKKELMTRLFKQIVVDTKDEYKRGTGKAREIIIVSASAK

SEQ ID NO: 5 - protein, 545 aa, unidentified
  source 1..545: note = Bacteriophage uvig_401611 from the Index of /pub/databases/metagenomics/genome_sets/gut_phage_database (ebi.ac.uk)
MSGATNKITALYCRLSQEDARLGESLSIENQKAILLEYAKKNHFPNPVFFVDDGYSGTNYDRPGFQSMLTEIEAGHIGIVITKDLSRLGRNSALTGLYTNFTFPQYGVRYIAINDNYDTIDPNSVNNDFAGIKNWFNEFYARDTSRKIRAVQKAKGERGVPLTVNVPYGYVKDPENPKHWLVDPEAAAIVKRIFSMCMEGRGPTQIANQLWVDKVLTPTAYKLSHGLSTNSPAPEDPYRWDKRAVSSILERLEYTGCTVNFKTYTNSIWDKKRHLNPVENQAIFPDTHERIIDDDVFEKVQEIRSQRHRMTRTGKSSIFSGMVYCADCGSKMQYGSSNHRDFSQDFFDCSLHKKNGSKCKGHFIRVKVLEGRVLSHVQRVTDYILCHEDYFRKVMEEQLRVESTEKLTVLKKQLARNEKRIADLKRLFMKIYEDNVNGKLSDDRFDMMSQSYDAEQKQLEEEVLSIQQEIEVQEQQIENIEKFVQKAHKYVHIEELTPYALRELVSAIYVDAPDKSSGKRVQHIHIKYDGLGYIPLDELEAKEKA

SEQ ID NO: 6 - protein, 517 aa, unidentified
  source 1..517: note = Bacteriophage uvig_576757 from the Index of /pub/databases/metagenomics/genome_sets/gut_phage_database (ebi.ac.uk)
MKMKELIDILEDQGFSIGNIRESIFYKKEKDKHVRMGIYGRLSKADKKVIIRQMRALEDIALYEFNIPIEDIKKYVDNGFSGTNDKRPKYLEMLRDLNKNDINVIFTTHIDRFGRAVEQVINNIYPRGITEHLYIAFDNKLINSPDNIGKVKEIAIAADKYAEDFGNKSRRGIYSQMRNGSVISAKELYGYKIEFDEDEGIRRIVIGDEYKVSVIKDIFEMYLTGKSLNDIKLYLEHKKIKSPSGNKKWSKGTIVSILSNPLYTGHLYQRRYKKLNYTYSGEGNRIVKLPKKEWINGGRFKGIIDEKVFNCIQQMLEENKSSRSSGGNRYAFTGVLKCGECGKALVYRKQSRGYKCSSSQQKGDIKCTTHFIKEDELYEIVSEKILNKLLQNRDYIRDKVEQKIINDGLMKNKIDRKNRIVKEKENALNKLADMYLNIDEIKYGEEVVKKMEKKIELLNRDKEVIDSEINYINSRIGNEKEVLYNIEKYIKKENWIIRLFIKRITIYEENRISIEWR

SEQ ID NO: 7 - protein, 586 aa, unidentified
  source 1..586: note = Bacteriophage uvig_205537 from the Index of /pub/databases/metagenomics/genome_sets/gut_phage_database (ebi.ac.uk)
MDRTTGKVLNRKLRVAAYARVSTMGAEQLNSYESQKKYYYEKINNNPEWQYVDIYADEGISGTTDYRRASFMKMIQDALSGKIDLILTKSISRFGRNTMDVLKNVRLLRDNNVAVLFEENNLNTLDTKTSEMLLTTLSAVAQQESENISEHVKLGLQMKMNRGELIGFNRCYGYRNENDKLEIIDEEAEVVKFIFDKYCDGHGANGIAKMLTEQGIKSPKGNNKWNDSTIRGILRNEKYKGDVLQGKTYTADPLSHKRYKNLGEADQFYVSEHHEPIISPERFDMVQEILKERCGARANGRRIGNVGRKFAFSSRIRCGFCGNCFTRRTVVGKDREKIPSWSCTSFAKNGKENCTDSKTIREEMIKEAFVDSYKLLSSNTNFETDEFLNLMQDTMNENNKQDELERYKKEFSNIKSKKSKLIDLMVEDKISENDYNEKVEKYNRKLEILENKIEQLKLLAEDKKSISEGLQKVKELLNSKDIMDQFDQEIFNAIVDYIIVGGYDENGLIDPYLIRFILKREFDLSVPKDVSDEVVIQNNKIDLNSNNVLVDFINTRKYFSYERDENGKLNKVLRNGLRIRVECDIT

SEQ ID NO: 8 - protein, 485 aa, unidentified
  source 1..485: note = Bacteriophage uvig_281475 from the Index of /pub/databases/metagenomics/genome_sets/gut_phage_database (ebi.ac.uk)
MNAVIYARYSSDNQSEESIQAQLRACNEYAERNRINIVHEYIDRAQSARSDKRTNFQNMITDSKKRTFEAVIVHKLDRFSRDRYDHAIYRKKLRDNGVKLISVLENLDDSPESVVLESVLEGFSEYYSKNLARETRKGLKEIALKAKFTGGCPPFGFDIDENNNYIINEREAVAVRKIFDACLNNTGYNQLLIEFDKQGIRTKFNKPFGKSSFNAILKNRKYIGDYIYYPVGTYREKKSEPIIIENALPQIVESEIFWEVQKKMKERKHSGRVKAIEPYLLSGVLVCGECGETMSGHRHSKNGNHYYDYECSRNARTKQCSNRTFSRDKLEKLVCDYIRELLSDEAINEIRKFLLDNAKLINDNNDESITLIKREINSLERKINSVIDLLIENPSDKLKERLKTLEAQQKEAELELKKLKNSAITEEKLDHYIVKIKDFDDLSREQKQLFIKRLIEKVTIYKNGNFKIATTYGKVAAAVGGATQI

SEQ ID NO: 9 - protein, 481 aa, unidentified
  source 1..481: note = Bacteriophage uvig_22285 from the Index of /pub/databases/metagenomics/genome_sets/gut_phage_database (ebi.ac.uk)
MGLKIGAAYIRVSDERQDEYSPDSQLKLIRKYAKNNDYIIPDEYIFYDDGISAKSTKKRAEFNRMIALAKSDDKPFESIFVWKFSRFARNQEESIVYKSLLKKKGVSVISISEPIVDDVFGSLIERIIEWMDEYYLIRLSGEVKRGMTEKASRGEPMCHPALGYDLINNQYVPNAESVYIRRIFESYLNGMGEREIARNLALQGMRTHRGNPPDNRLIDYILHNPVYIGKIRWSTNGRAASTRDYDNENIMIVDGTHEPLIDLDTWNEVQELLMENKHKYKRYQRREQPVQFMLKGLVRCDHCGATLVMQSTKCPSIQCHNYARGSCGVSHSLSINKANKAVIEALEAAVNTLQFTIEPAAVKSESPGLDFDKLISSERNKLKKIKEAYLSGVDTLEEYQQSKAEIQETIDRLENEQKASQEKADCNKVSKKEFSKRVINVLDFIKSPDVSEQAKNEALRTIISKIIYVKPENRLDIIFYT

SEQ ID NO: 10 - protein, 706 aa, unidentified
  source 1..706: note = Bacteriophage uvig_274113 from the Index of /pub/databases/metagenomics/genome_sets/gut_phage_database (ebi.ac.uk)
MSRSSKITALYERLSRDDDLNGESNSITNQKQYLEDYARRNGFTNIRHFTDDGFSGVNFNRPSFQELIKEVEAGNVATIIVKDMSRLGRNYLQVGFYTEVLFQQKDVRFLAINNSIDSNNASDNDFAPFLNIMNEWYAKDTSNKIKAVFDARMKDGKRCSGSIPYGYNRLATDKQTLVVDPVASAVVKRIFLLANEGKSPRAIAELLTEEKVLIPAAHAKEYHPEQYNGTKFSDPYLWGMSTIRAILSRQEYLGHTVLRKSVSTNFKLHKRKNTDEDEQYVFYNTHEPIISQELWDSVQKRKKRANRTAARGTHSNRLSGYLYCADCGRRMTLQTHYSKKDRSVQYSYRCGGYASKVNSCSAHSISADNVEALILSAVKRLSRFVLNDEEAFAKELQALWNEKQTEKPKHNKSELHRFQKRYDELSKLIRGLYENLVSGLLPERQYKQLMKQYDDEQAELETKIEEMEKELTEEKVNAVDIKHFISLIRKCKEPTEISDLMFAELIDKIVVYEAEGVGKARTQKVDIYFNYVGQVDIAYTEEELAEIKAQEEQEEKKRMDKQREREKAYREKRKAKKIAENGGEIVKTKVCPHCQKEFVPTSNRQIFCSRDCCYQARQDRKKADREAEKGNHYYRQRVCAVCGSTYWPTHSQQKLCSEECQKQNHNEKSLEFYHKKQKEKSECNDLLQTKELVSSTNSSEIITIPA

SEQ ID NO: 11 - protein, 580 aa, unidentified
  source 1..580: note = Bacteriophage uvig_176095 from the Index of /pub/databases/metagenomics/genome_sets/gut_phage_database (ebi.ac.uk)
MKKAAIYLRVSTSDQNYDRQEIELRQLASALGYEVKYVFEEKKSAVLKMDTREQLSEMRKLTNKDVDRIFIWDITRLSRRAIDFISLINEFADKGICLHFKDKNIITLEEDGSLNVLTGMYLYLLGVFAQMDAENLKAKMKSGKEAALLKGNSYTNNPPFGYELRNKHLYINEDEAKYVKMAYELYREGKDTQYIADMFNANNVPLKSGKKDIIWVKGTISQILNNTAYYGKGKRSTTIKKATANIPAEVKVSYFDTPAIISKELFEECRKIAMANICKQDKSRNLICLLRGLLKCGRCGKFYVLGNNNKQREYRDGDIRANVNNRVGCKNGSIKAMIADELVWKAIQNIYKYKKFKEKCIAEKEKYRLEIANNDNSITNMEKELKQLSIQSENLVKFAIKGLLSEEEFAKQKLYLESEKVRKNNILEELRATNLILQRKINAEFDYNILNEGVSLSLEEKKQICNDLIEDVFIYGYGAYKKLLQVNLKMDITYNILINTQHSISSYCIFDDEVATFSNPFKSDTLIKDMNLDIKIPDFDVTSDNNSLFSEEVFGVYSFDDMWNIMKKYGYIKKIDGDSN

SEQ ID NO: 12 - protein, 525 aa, unidentified
  source 1..525: note = Bacteriophage ivig_2328 from the Index of /pub/databases/metagenomics/genome_sets/gut_phage_database (ebi.ac.uk)
MKRIGIYGRKSVFSDKSESIEHQFTLGKEYAYANYDNPEIIYYKDEGESGSYLERPDFQILLNDVINDNLDIVICYKLDRISRDVADFGAVYKLFMAHNTEIIPLRDNIVINENMSPIEKAMMYINTVFSQVERENTIIRVTDNMIELAKDGYWTGGRAPLGFSSKEIIVGGKKHHILSHNPTEIEFYTMVADTFLNGFTLSGLETYFRKNNVKTLRNAYLSSTQIWTILKSPFAAPADEATYDYFSSLGCKMVHDRSKYDGSHGLLVYGRTSGGRKRKHVTNPPDKWLVSIGLHTPIITSDKWLSIQKCFGNNTFCKTRKYKVGILNDILRCSCGSYMKVKHKYDKQYNVHYYHYRCLQRERRGSEYCASQMISVETLDNEVIEILKGIKLDKTLIDNYTTPASFFPLFRKPETINREIENEGKKIQNLTMSLAEASGSSAAKYIIKDIESHDKRIDELKEELKKSRLAMQNVKELQINKEDKYNAVCKIVDCIETATYDEINALLKETLTECVYDGEVLHIKL

SEQ ID NO: 13 - protein, 637 aa, unidentified
  source 1..637: note = Bacteriophage uvig_594158 from the Index of /pub/databases/metagenomics/genome_sets/gut_phage_database (ebi.ac.uk)
MIKEVIYLGINVGYARLSRDDGDDESSSIFNQKRIIIEFAKQHGIHIDKFYIDDGVSGYTMDRPDFDRLKIALNNDEVDIIIVKNLSRLGRRNSMVQLFLENIEESGKRVIAIDDNYDTWNESSHETVGITTWINERYVKDTSKNVRRAIDIMQKEGRYVSNVPYGYELDLFNKGSYHIDETCAMYVKEIFDLYLSGYGVLYIARLFTERGVPNSTMITKQRMERRGQTYKGKISYKWAPNVILNMLRNDFYIGTLTLGKTKRRTINGKRIFQPEENLIRFENAHEPIIDKQTFKLVQEMIIERSRDNYRGQKDRKRPNIFAGKLYCSTCGVKMTSGGGTRNSSNTKYICKTYNIYGKTHCTSHIVSENELKDTLVYFLEHCRENLSEAIIDLDKIIKRDCSKKTGDVIEDLEKNLAKAENEVKALLEQKIKDMIANPSMSDIIDKTYSNMVNEKYNEIKILTTQVDDKRKEILSGNEIRKDLNNALEIFDNIISTKNITKKQIATIVDHIVVHEDGGVDIFLKGDLHELCTNYIMCKKTNKTLVVDATIKYIKKNPEQVMISKAGDYVRLCGHHISRTNYEKIFKNFIEKGYLVENEGYHNGYRVVDLNKLIHDAENNIIIDDAPRVHNNNVNIAL

SEQ ID NO: 14 - protein, 519 aa, unidentified
  source 1..519: note = Bacteriophage uvig_181433 from the Index of /pub/databases/metagenomics/genome_sets/gut_phage_database (ebi.ac.uk)
MKRVYCLYRVSTVGQVDHDDIPLQRISCRQYAQQKGWTILRELYECGVSGYKVSSEARDAIQELKDEALLQRFDILLVFMFDRLGRRDDETPFVVEWFVKHGIAVWSVNEGEQRFDTHVDKLMNYIRYWQASGESEKTSIRVRLRQEQMIQDGHFRGGMIPYGYRLEYTGRANKKNQPVHDLVIDPFTSENVKLIFSLVSSQGYGANRIAMYLNERNILPRTANAHWHASSIRAILRNPIYIGIMRMGACCSERSFAQYRIISDEQYEAVQKIMLERSLSHTLTRSIPYRTDNAYLLTGLLRCGSCGSRLCGATMSSKGASTQCHRRYYRCYTSSVHRGVCNGQRCYAANRIERMVEQRVVDVLNEILSTPVGVLAEQMDALAYCDDQSALQAAQFEITAIEREVEKLEQQLVKSVIKNDRTLTDAINDAVVKKRQAYIEAEREYRKLADAIAQSAERRENMMLEIRNIRSWAVNYKLLKPEEKRMILPQMIERIVVLKGYGVEIVFRSVIKELCQMKV

SEQ ID NO: 15 - protein, 532 aa, unidentified
  source 1..532: note = Bacteriophage uvig_154782 from the Index of /pub/databases/metagenomics/genome_sets/gut_phage_database (ebi.ac.uk)
MKGVIYARYSSDKQTEQSIEGQIRECTKFAEENRIEIIKIYTDRALSGKTADREEFQQMISDSADGEFEAIVVYKLDRFARNRYDSAIYKSRLKSNGVKVLSAKENITDSPEGVILESLLEGMAEYYSLDLAQKTSRGMMENALKCRHTGGRPLLGYKLNPDKTYCIDETTAPIVRKIFEMYAQGSSYNQIIDALNKTGAKTGSGKTFGKNSIHDLLKNERYSGVYIYNRIPRDSTGKRNSHGTKEDGMIRIEGGMPAIIDRELWEEVQKKMEGNKKSPARNKAKIDYLLSGKLFCGHCGSAMVGQSSTTRGVVYPYYVCNHKVRLRTCDKKNVKKDDIEDLVIDETVHRVLADEAIDNIADQVAALSFQEGMDTSRMDHLKSQLKSTEEIIINICNAIAQGVLTPSTKKMLEEAEEKKEHLSLELEQEKVIQKNVITKEQVLFWLSQFQNGDTNDPEYRKKLVDVFINKIFVYDDKFVITYNFSGDNNTVELSDVNIALSDLSQSGPPAPQKPKIFVVKNIFGIVKRFIER

SEQ ID NO: 16 - protein, 541 aa, unidentified
  source 1..541: note = Bacteriophage uvig_569447 from the Index of /pub/databases/metagenomics/genome_sets/gut_phage_database (ebi.ac.uk)
MEKDKKVTALYCRLSKDDGSNSESLSIRTQKSMLMEYATRNGFGNCQYYVDDGYSGTNSDRPAFQELLDDIREGKVATVITKDQSRLGRNHIETGTYMEIFFPEHGVRYIAINDGYDSNEQSQMDIAPFRNIINEMYAKDTSRKIKSALRTRKKSGKYISSGAPFGYQKDPADHNHLVIDPNTAPVVEYIYSMAEEGLGLHRIAKRLHDEKVLKPCYYKKEMFGRFIDDEKMYDWDSAYISQVLHSPVYAGHIIYEAKPTVSMKSKKRRYIPFEERAIVPNTHEAIIPQDRWENVQRILYSRSSSFMCDKTDYDNIFKGIVRCADCGRTMLVKVEHRRKRNSVLDQTFYCCSTYRKYGAKACDSHNLEARVLHEAVFADIQAHAKAAVSNREALVKKIANQMHLRVSSDRAQHKRDLKQCKARIAEIEDLYAKLYEDVSKGLLPEKRFQMLADRYDKEQAELTEKIEQYEREGRAEHDQLDKIQDFIDEVSKYAGITELNYKILHQLIDKILVSRAEKVDGEYVQKIQIFYRFIGPLDAIE

SEQ ID NO: 17 - protein, 566 aa, unidentified
  source 1..566: note = Bacteriophage uvig_187460 from the Index of /pub/databases/metagenomics/genome_sets/gut_phage_database (ebi.ac.uk)
MARKSRKVDYVNVGNKENLVTEAENQCEKVSHAALYARLSYESEKNRERNTIETQMVLLHNFVKEQKDIVVAKEYYDISKTGTNFERDGFNEMMQDIKEGNIDCVIVKDLSRLGRNYVEAGSYIERVFPFFNVRFISVNDHYDSFRDDISLLISMSNVYNEFYSRDLAKKIRSSYRTSWANGEFPSGQMAYGYEKDKDNPHQLIPDPVAAPVVKKIFQYFIDGMTYAEIARKLNADGYLCPKAYKLDKAGKANEKSATWTWSGGTVHKILENQYYAGDSVHNQFTNDSWAAQRQKMNQKEEWIIIKNTHEALVSRKDFDEVQEKIGHIVKRVNEARKSNGNNVRDFNFFKQKIVCADCGKTMYLYGKTKGNHRRFYCGNNKLHGKCTPHSITDLEVNDYVLRVIRAHINVYVENVDLIRRLNQRQESIKKYDVFNREIKKCRKELEKVAVHRERLFEDYVCRIIDAEQYETFSKQDAETEKEIQNNMEILLKHQVGYEKNFHTEEEWETLINKYRNTRTLTKEMVNAFVEKIEIHESGSITVRLVYDDMLEELRKYAKEREAELCQ

SEQ ID NO: 18 - protein, 533 aa, unidentified
  source 1..533: note = Bacteriophage uvig_166991 from the Index of /pub/databases/metagenomics/genome_sets/gut_phage_database (ebi.ac.uk)
MEYYIYLRKSRKDREAEMQGEGETLARHQKTLLDLASKMHLNITRIYKEVVSGETIASRPEMQRLLHDIEDGNCAGVLVMEVERLARGDTKDQGVVAEAFKYSGTKIITPIKTYDPADEYDEEYFEFGLFMSRREYKTINRRIQRGRITSAKEGKFISSTAPYGYRKVKIKNGKGYTLEIVPDQANVVRMIYDWYTKGVTNENGICQPIGATSICRKLDMMHIQPMVNATWSKASVSDILKNPVYTGKIRWSYRKEVKKIKDGKVVKTRPDNHDDYILVDGLHQSIISEETFTAAQRMSAKNRKMPLKNNTQLQNPLSGVIRCSICGCTMTRLGPTSHTPYATLKCSNRYCKNISSPLYLVEQKLLIFLEDWLKNYSLDWSNCRSPFATDAEIKMKEHAINSVAESLNTLQEQLNNTYTFLEKGIYTTEIFLERNKLLTEQINSTKCNLDQLNQEYNDILLLQKSQNEFMPRVQNIIDTYWDVKNMKTRNDMLKEILEKVEYTKDKPNTRGKREVANFTLDIYPKIPRKLPMS

SEQ ID NO: 19 - protein, 443 aa, unidentified
  source 1..443: note = Bacteriophage uvig_169676 from the Index of /pub/databases/metagenomics/genome_sets/gut_phage_database (ebi.ac.uk)
MSHTKGVNYMERVVKRVGTLIPAQPKALLVCAYARVSTGKDAMLHSLSAQVSYYSKMIQDHCGWVYCGVYTDEAVTGTKEERAGFQRMIQECRQGHIDLVITKSISRFARNTVMLLETVRELKSLGVDVFFEEQNIHTMSADGELMLTILASYAQEESLSASENQKWRIRKAFENGELANLRFLFGYNITADGVQVNEKDAAIVREIFARFNEGESMRSIGRDLDARGYRGVLGGTWCAERMRNTLSNEKYLGNALLQKQYRNNHIEKKLLPNRGELPMYYAEGTHEPIIDQATFDKAQKRLKMLAQQTANRKKPTHSAFTGLIHCGLCGNTYKRVTYRKKHYWNCTTFQTKGKSECAAKRIPEETLDALTCEVLRVAHLDPDTVRSKITAIRAENNNVVVFCMDDGSEIVERWADRSRAESWTPEMKEQARQRALQARRSKK

SEQ ID NO: 20 - protein, 477 aa, unidentified
  source 1..477: note = Bacteriophage uvig_284816 from the Index of /pub/databases/metagenomics/genome_sets/gut_phage_database (ebi.ac.uk)
MSNSSSFPAKISAIYCRESTEKQNIQSLIDMCKKAAKKINLQNIKVYYDVASGYNKDREQYSKLKEDIQNNLVDTLVLYESSRLTRDELEHHIFYGLLRVHNVKVYTVTHGWLDLQDADDTFLTNLLNLLDAREGRKTAKRSKDRMTELAEQGRWTGGPAPLGYKLVNKELVIVPEDAEKVKTIFKLFLDGKTRQSIANFFGYEVKKVRRLLENPVYIGKLKFHSVEIINKKKIHHKDYKVLDGIHEPIIDESTFSLVQGKLKNIKVERNTDVYIFKDLIKCTCGRKMYRVVNKYNYLKKSTNEISQKTENLYYCRTSDKYKSIGCGAIGIHEEELFEEVMASLQKIIFSLEVENIDTKFDDYQSQLALYKKELASLSRKEELLARQLLNSLISEEVFEKLMKELKEKKAFLEEKIKNLTTLITNKKNTNKNSEILKKYFFKLEKEKAPEKINNFLKLIIDEIEMVNDYRFYIHLKF

SEQ ID NO: 21 - protein, 434 aa, unidentified
  source 1..434: note = Bacteriophage uvig_366143 from the Index of /pub/databases/metagenomics/genome_sets/gut_phage_database (ebi.ac.uk)
MRVALYERVSSEEQALHGYSLEAQDSALRKFAEDNGHIIVDVYKDEGISAHKPYTARPELLRLLNDTDKIDLILFVKLDRWFRNVQEYYKVQEILDRNHTYWQAITEDYETITANGRFTVTVMLAIAQQEAEKTGERIKFVFNSKLQKNQPITGNYGFGFKTIEQDGLKTVSHDENEAAVYDMFDYFSKVQNVSLLNDYMKEKYGIIAANQTWSRRLRSEKYAGIAHGIANFLPPYITMEKHYELLDILESRRSRRSRNRIYLFSGILKCPECGGAMAGCTCIQNGKEYPYYRCSKCWNKGGCSNKKSTYESVVEKFLLENLEAQARVQIEEEPKKAKSTKSLEDRLSRLNDIYLMGNMEKSIYEEKTKEIKEKIIKIQMENKKHGECSGANRILSMDFKNVYETLSRDAKKVFWRNTLGKILVGDTISFTFRG

SEQ ID NO: 22 - protein, 542 aa, unidentified
  source 1..542: note = Bacteriophage uvig_121245 from the Index of /pub/databases/metagenomics/genome_sets/gut_phage_database (ebi.ac.uk)
MMMENRMMTGNRVDCLYRVSTDKQVDYNDKSQADIPMQRRECHRFCEKMGWTIVHEEQEDGVSGHKVRAENRDKLQIIKERAKQGKFDILLVFMFDRIGRIADETPFVVEWFVKNGIRVWSTQEGEQRFDNHTDKLTNYIRFWQADGESEKTSIRTKTALGQLVEDGGFKGGLAPYGYDLVKSGRFNKRKHEVFELAINEAEAAVVRIIFDKYVHEGFGAQRIATYLNNLGYRARTGKMWHHASIRGIICNLTYTGVLRSGESRSQTLPHLQIITPELFEAAQHIRTSRANSAEQERRVPLNTRGQSLLAGNVFCGHCGSRLALTTNGKAYPCKENAHRIVKRVRYICYGKTRKQTECDGQTGYTAHILDGIIDKVVRQIFERMKAIPKSEIVNIRYREKMEERKTLLKSAKSDYAKAAAELDTLRAEVIKSLRGESAFSQDLLGSLISDCETKCLEVQHTMEAAQAAYDEGQAMLDALNAQYDDIISWADMYDSASTESKKMIVSCLIRRVEVYRDYRLHIDFNIDFEQFSAGLDISAIAA

SEQ ID NO: 23 - protein, 558 aa, unidentified
  source 1..558: note = Bacteriophage uvig_190766 from the Index of /pub/databases/metagenomics/genome_sets/gut_phage_database (ebi.ac.uk)
MSKRVRTLLRVSSRQQLHDDDIPIQRAEATEFIAKHEDWVFDREYLEKGVSAYHNGVEDREILQEIVKDAKNKEFEILLAYMSDRIGRQEEYSFYVAELNRMGIEVWTIKDGQLKTEEHIDKLLNYIRFWQNEGESKKTGMRVHDTMVEMVKDGKFVGGKAPYGYKLVLSGEISNHGRALHKFVIVPEQADNVRKIFSYAVNQGMGFQKIAKTLNEENIPAPILAEWKSGTVRSILTNPIYMGYIAYNRRKNSHSSSTYLDRKEWTYSRERNPEITIVSQDIWERAQEIREARKKRINASKQATNELYMEQYNVPFSTRGRLALTGLVYCGYCGKKLKNTGYANHWTCKKTGEKKVAYVGRYGCPNQCKPRHTYTQKYLEEVVFATVGTYLENLKKIDISDELEEMQSQQDKNIKREIKDLEREIKGLSADIMTLEEKLPEAIRGEFAFSVDKLSAIISDKESLKKEKEAGKNKLQKQLDEINVQGSELKAFIDAMPKWDEIFFESDVQTKQMILSTLIDRIIVKDDNITINFKIRLENFLDEKLLENNGSDLSRKGL

SEQ ID NO: 24 - protein, 504 aa, unidentified
  source 1..504: note = Bacteriophage uvig_152630 from the Index of /pub/databases/metagenomics/genome_sets/gut_phage_database (ebi.ac.uk)
MQKYLMYLRKSRADGEHETIEEILARHEKILQEYAEKNIRKAVPEENIFREIVSGETIKDRPLMNKLLKCIQNEQITGVLVIEPQRLSRGDLHDCGTIIRAFQYTNTLVYTPTKTYDLSEKYDRKFFEMELMRGNDYLEYVKEILMRGRLASVSDGNYIGSIPPFGYSKEKIDKNYVLVENDESNVVRLIFDLFVNQNMGTSKIANHLNSIGIKPRKNNYWSDSTIRDILRNPVYIGKIRWNWRKTVKTYKDGEIVCSRPKSTPDSWIIIDGKHNGLISEEVFNAAQKRFGQNPRVKKEYEIVNPFAGLVKCECGKSMVYKKFNKSSPRIICPNQPRCENRSVLYSEFESEVIIALKKYINDFKIKISNGDNQSESIQNGILECLIKELKTIENQQDKLYELLEQGIYTNAIFIKRNTALAEKRKKITSEIENLKTSIPNSINYEEKIVQLSNALNTLQNPDIHPKIKNEFLKVIINNIYYTRKNDNRTRNDDSPFTIKIILNL

SEQ ID NO: 25 - protein, 579 aa, unidentified
  source 1..579: note = Bacteriophage uvig_500555 from the Index of /pub/databases/metagenomics/genome_sets/gut_phage_database (ebi.ac.uk)
MTNSQNLGTIEATNPVLAVAPLKEETEMLRATDKITALYCRLSVEDMKEDKKGGKEDVSNSIQNQKMILLQYAKENRFPNPTFFVDDGYSGTNYDRPGFQAMLAEIEAGRVAVCITKDLSRLGRNSSLTGLYINFTFPKYNVRYIAINDHFDTIDPNSTDSDIAGIKNWFNEFFAKDTSRKIRAVQKAKGERGVPLTTNVPFGYLKDPADKTKWIVDEAAAMVVRRIFKLCMEGRGPMQIAKLLQEEKVLNPTAYKRRAGIKTPSPETDVPYHWNTNTVVHILERREYTGCTVNFKTYTNSIWDKKQRETPLDKQAVFYNTHPAIIEQEVFDKVQEIRQQRHRRTKTGKSSLFSGMVYCADCGAKMRYCTTNYFEKRQDHFVCANYRSNTGSCSAHFIRAVVLEDLVWMHMKAVIFYVTRYENHFRAVMEHKLLLSSEEKICASVKRLEQAQRRMGELDRLFIRIYEDNVAGRINDERFSMMSRSYETEQEQLKVEIQTLQQDIEVQERQIENLEQFIQRVHKYKDLDELTPYALRELVKGVYIEAPDKSSGKRRQNIRISYDLVGFIPLNELMKEETA

SEQ ID NO: 26 - protein, 530 aa, unidentified
  source 1..530: note = Bacteriophage uvig_356689 from the Index of /pub/databases/metagenomics/genome_sets/gut_phage_database (ebi.ac.uk)
MMYQMGVYCRLSKDDGENKVSESIENQMKLIREYVTKSEDLEIADIYIDDGYSGLYFANRPEFQRMMEDIYKGKIQGVITKDISRLGREHIETSNYIERVFPSLGVRYIAILDGVDSVHHSNEELAQFKTLFNDMYSRDISKKIRGALTAQKKRGQFMSGFAPYGYVKDPADKHHFLVDEEAAKVVRRIFYMSLEGYSRDGIAKKLNQEGILTPSEYKRKVQGLKYANALEKAGAKGWAYPTINVILRNRVYTGAMVQHKSEKISYKVEKYQYIPEEQQYIVEGMHEAIISKDTFEQVQELMKKRTRTPGFNSEVRKVNPYAGIIVCGDCGYNFQRVTCRDGYECGTYHKKGNTVCYSHFIKKEVLDSIVKNEIQRQAELALKESDKDEILKVADRKKEVQRRCAEADQQIERLQKELAAVQKYKKKTYENYVDGVLDKEEYLSYKAEYEKQDKDIRAKIQLAEQEKDSFGEAEESYENWIEKFIKYGTLSEVTREIVTELIEKIVVNGDKSIDIVFKYQSPYPVEKQAV

SEQ ID NO: 27 - protein, 487 aa, unidentified
  source 1..487: note = Bacteriophage uvig_527188 from the Index of /pub/databases/metagenomics/genome_sets/gut_phage_database (ebi.ac.uk)
MTLKNACAYIRVSTDKQEELSPDAQKRLIIDYCKKNGYTITNENIFIENGISGKKADKRPEFKRMIAIAKSKEHPFDVILVWKFSRFARNQEESIVYKSMLKKANVDVVSVSEPVIDGPFGSLIERIIEWMDEYYSIRLSGEVIRGMTEKALKGGYNAQPPLGYRKNSDTSIPEIYEPEAVIVRNIFSFISQGLSLIDTARSINNMGFHTRRGGMFEQRTIRYIIENPFYYGYVRWNRQNPSEHTIKDKSEWIIAPGAHPVLINKESWDFANEQLIKISRPYKERGTSGIKHWLSGIVKCSSCGSSLVSNSLWKGHSTSFQCSGYNKCKCKVSHYIKTERLEAGIYEGFLKVLSSKNVTYEKVSEHSYEEKVDTAALLKNIEDKERRIKQAYRDGIDTLEEYKDNKAILQKEREKVMEIISRQQPAVQDENNETMLRQIKNAYEIIKNVALDKLTRANAIRSVVSKAVYDNEKDTLDIYFRLIEKSP

SEQ ID NO: 28 - protein, 500 aa, unidentified
  source 1..500: note = Bacteriophage uvig_415064 from the Index of /pub/databases/metagenomics/genome_sets/gut_phage_database (ebi.ac.uk)
MKAAAYARYSTDKQTENSIAYQMNAITKYCLDHDIDLISAFSDEAESGTNTDREGFQNLVRAAQNKEFEAVVIYDISRGSRDVADWFQFRKTMRALGVQVISTNQQLGDITNPNDFLIELINVGLGQHMVLDTRKKSMAGMLERAKKGLYCGGNCPLGYKIENGRYVIEEKEAKVVRQIFNRYAQGESYNQIIDGLNGAVGKFGRPIGKNSLHSILANERYTGVYIWNERNVRIMRKWAGGKKNPNPVIIEGIIPQIIDKTTWERVKKRMETRKNGTNKAKREYLLTGLIECAECGATYVGHCNVAHRKDGSVRENRYYECGNKYRTRTCHSKNLNADELELFVVTQIQDTLRNWDPSEVARKYIKEIQGATADCTEEKRELVDVERQINNGVKAVLSGMRVPELDKEIDRLRQRKLDLENIIAEKSQQTNHSYSADEIEAALSGLIKNFDPKEAVKQLVQKIYANADGSCTVHIGVHKIGAGDPSYSICTFFFPAKSKT

SEQ ID NO: 29 - protein, 530 aa, unidentified
  source 1..530: note = Bacteriophage uvig_593675 from the Index of /pub/databases/metagenomics/genome_sets/gut_phage_database (ebi.ac.uk)
MSKADILARYSTDNQNADSIEVQVEKCTEWCKQHGYAIVNVYADYAVSGMKDTRPQYNQMMQNLRAGEADTVVIYDQSRMFRKMTAWFAFRDELTEMGIKVISITQPMIGKDLRDPANFLVESNMAVFNQMWVLQTRQKVMEKMRYMAATQQHTGGKPALGYKVVLDGDKKRLAIDEAEAQIVHRIFDAYASGQSYREIIAGLNRDGIKTKRGSAYGVNSLHDLLKNKKYIGIVEYGAHPYSESGRRNTHGSVDENVIRVEIPDLAIIDRKTFDTVQQRMKENKKNQGGRPATRREYPLKGKIFCAECKSSMTVRISKGNLFYYVCAAQKRQHQCTARPIRCDYLEQRVADAVRAALGTPENKQFLIRILREQSEAIQGTAASSLLALIDEERNTTAQLNNAINAVLAGLMSDQLKAKIAELETRKSDIEKKITALKRQVDASRIPEENLTQMLDYIISSDSESAALFAIVARVEVGPDDITIWTIFDADPNGHIDFDSKEDVLITHGVPSGVPLVFITAFGMLKIQVRR

SEQ ID NO: 30 - protein, 526 aa, unidentified
  source 1..526: note = Bacteriophage uvig_200526 from the Index of /pub/databases/metagenomics/genome_sets/gut_phage_database (ebi.ac.uk)
MGKVRVIPSTINPLTHQSIVANVKRKVAAYARVSTDSDEQYTSYEAQVNYYTGYIQSRVDWEYINVYADEGISGTNTKKRVQFNKMIEDALEGKINLIITKSISRFARNTLDTISYIRKLKAAGVEVFFEKENLWTFDSKSEMVLSMLAAIAQEESRSISENVKIGKRWGFKEGKVSMPYKIFLGYDKVDGKIVINEEQAKVVRLIYRLYAREGYSRAAIADYLNEMKVPKPSNPEGKWSINNITAILTNEKYKGDALLQKGYVDNYLDHTVKKNKGVLPQYYVENSHPAIIDKDEWNMVQEELKKRDKFRYAYSKNNPFSSKLICGCCGHFYGLKVWHSNTQYRKEIMQCNKKYSTKDDKCDTPSVLREDVNKRFIEAYNAIMINKEEVIKSAKELIGLLTDTTKIDKRIEELNGNISDTKTLVENLIHDNALKAQDQDAYIKKCNSMTAQYDILKQQLDEAISERDSREIKSKSMNLFITDIKEAPIMINEFDLTLWNIMLDEAIVNKDGSITFKFKNGMEYKN

SEQ ID NO: 31 - protein, 589 aa, unidentified
  source 1..589: note = Bacteriophage uvig_188594 from the Index of /pub/databases/metagenomics/genome_sets/gut_phage_database (ebi.ac.uk)
MTKTIRRIEAQIPITTKKKRVAAYARVSLDTERLENSLSAQISYYSAFIQRNPSWEYAGVFADNGISGTSTDRTEFQRLMAECEAGHIDIILTKSISRFARNTLDTLTAVRRLRELGIEVQFEKEHIHTLSDKGELLLTLLASFAQEESRSISENVKWGVRKRMKKGIPNGRFRILGYRWQGDKLVIVPEEAAVVRRIYQDFLDGKSRLETERALNAEGIRTINGCRFQDSSLKVILTNVTYTGNLLLQKEYITDPINGKRRKNHGELPQYYVENTHEAIIDQATFDYVQQEMTRRKALGAQANKSLNLTCFSGKIKCPYCHVSYMHNPHRRKSNIDYWICGSRKKKKVGDGCPVKGAMSEVALKKCCAEVLGIEEFDEIVFAEKIEHLEVPEKGHLTFFMRDGSVFTRECRNTGHQDCWTKEHRAVASEYRLKHSSERSGSTCFTGKIKCGFCSMNYQRATQSNAGKKTRYWRCPSKGEPDKKGLREDHLRELCAEVLHIDTFDEAAFTQAIDHITVSPDAVLEFQFNDGHAEIHNWSYERHGHKWTAAQRARFSETMKRHYTPERRQTMSEKMKQIRKERGAQWRKE

SEQ ID NO: 32 - protein, 591 aa, unidentified
  source 1..591: note = Bacteriophage uvig_323580 from the Index of /pub/databases/metagenomics/genome_sets/gut_phage_database (ebi.ac.uk)
MAKITRVEQAVPTIKTKKKVAAYARISMESERMNHSLSAQISYYSSLIQKNPDWQYAGVFADDGISGTGIAKRDEFKRMIEAADNGEIDIILTKSIQRFARNTVDLLETVRHLKDIGVEVRFEKEHINSMSGDGELMLTILASFAQEESRSLSENCKWGIRKRFEKGIPNGHFRVYGYRWEDDELVIVQEEAEVVRRIFQNFLDGKSRLETEREFAAEGITTREGCRWVDSNIKVVLTNVTYTGNLLLQKEFISDPISKQRKKNKGQLPQYYVEDTHPAIIDKATFDYVQSEIARRKELGPRANKSLNLTCFSGKLKCPFCGISYAHNKRTDRGFMEYWACGSRKKKGGRCPVGGSINHENLKKACAEVLGLDEFDEDAFSDMVDYINVPEREMLEFHLKSGEVITKDCPNTGHKDCWTAEYRAKTSEKRRKKPNCKGSSVMTGKIKCVGCGCNFRRATQPSSTAESGKAYYWRCAERDGCGTVGLREDVLKPFIAETLGIDEFDDAEFEKQIDHIDVLSATEMVFHFKDGRTVSRTWEQPKRVGRPWTDEQRAKFKESIKGRYTPEVRQRMSEHMKQLRKERGKAWRKEK

SEQ ID NO: 33 - protein, 549 aa, unidentified
  source 1..549: note = Bacteriophage uvig_81430 from the Index of /pub/databases/metagenomics/genome_sets/gut_phage_database (ebi.ac.uk)
MSEMKYRACAYLRLSREDDDKRGSTDESNSIKSQRMMIESFVRGFPDVELVKEVCDDGFSGTDYERPAFMEMIAMVEKGEIDCIIVKDLSRLGREYIGAGNYIQKYFPQKNVRFIAINDNYDSLTANSSDRYMVVPVKNFVNESYCRDISIKSRSNQQVKRMNGEYIGSFVCYGYRKDEKDKNKIVPDEEAARVVQDIFAWKLMGLSANSIAAKLNERGTLSPAEYKKAHGEKFKTSFQRNPEAKWTPKAVLRILSNEIYIGVLEQGKREKVSYKVKKTIEKPKSQWIRVENNHTPIITEADFKAVQELLKRDTRAKERMTEPKLYAGLLFCGDCGRGLVSRNVPYKDTVNEYYICSGYNRGKECTRHSIKVDVLNEIVLGEVRKYVKQLTDTKKLLSILDAKQIRFEEALNRDKEIAMLKEKEQEYSAMKSALYTDLQEKLITQEQFNRYREIYSNKLSEIAAAIKVQETTVKSIYENGIAAGQWLDDLRENMEIEKLDRMLLVSLIDKILVYEDKTVEIVFKYRNEMAKAVELVKGELEAEAMREVS

SEQ ID NO: 34 - protein, 386 aa, unidentified
  source 1..386: note = Bacteriophage uvig_395648 from the Index of /pub/databases/metagenomics/genome_sets/gut_phage_database (ebi.ac.uk)
MSENTIQIIKIAQGIPGRNHEYTEMVIRGDIMIEEKRYCIYLRKSRADADAEARGEGETLLRHEKTLLELSERMHIKVEKIYREIVSGDTIAARPVMQELLTDVESMTWTGVLVMEVERLARGDTIDQGIVARTFQITNTQIITPLKTYDPQNESDEEYFEFGLFMSRREYKTINRRLNRGRIQSVKEGKYIASVAPYGYIRVKLPNEKGYTLSPHPEQADVVRMIFDLYVNGLNGEEYGATKIARYLDSLGIKPMVADKWSPASIRDILQNEVYVNKIVWGKRKEVKTVENGVVKIMRPTAADYLCNNALHEGLVTQEIFDKAQYKRTHSPHSIKVNVKKPLQNPLAGLIYCDKCGSLMTRLGESKKTPYAFLKCPNRYCDNVSV

SEQ ID NO: 35 - protein, 498 aa, unidentified
  source 1..498: note = Bacteriophage uvig_255494 from the Index of /pub/databases/metagenomics/genome_sets/gut_phage_database (ebi.ac.uk)
MAKQQAVIYVRVSSKEQEEGGFSIPAQLKYLKDYAAKNNFEIIHIFAESTTAKEAGRKEFTKMLKFLRTQKKACHLLCEKNDRLLRNEDDAATVKNLFMKTEVSVHLVKDNMILNKNSTPYEIFIFMMFSAVSSLYPRNLSNEVKKGMIEAAEEGHFPARVPIGYINHRTSKKKTCILVDTDKAHYVIRAFELYSTGLYSYETLAQKLASEGFMIGKRKCYKRNIELILNNPFYMGEFNYKGKRYYDAKHTPLISKELFYTVQKLIHSRTSPHLKKHDFLYSGLIKSPNGYSLVGDIKKGKYIYYRSTDVKDKGLKLLKEEYVDEMVETMLKNISCPPEFVENVMNTLKSMLQGKEKYETNSLEEMQKKINILKKRLNQLYVDKLDGTITEEFYFDKHEEWQTELDELRVQFDYLSSESDEILDRAETILTLCKNAYSVYMKNNNEQKRILLKLLTSHFLWDGENLTIEVKNTVKPMFNSVIFNMVGVERLELPTSSL

SEQ ID NO: 36 - protein, 445 aa, unidentified
  source 1..445: note = Bacteriophage ivig_2835 from the Index of /pub/databases/metagenomics/genome_sets/gut_phage_database (ebi.ac.uk)
MNVIRGVGYIRVSTAEQATRGLSLDAQEAEIRTYAKAHGIELFNIYVDAGITARKRLDRREAFGQMMKDVDSGLIDEIIVMRLDRWFRNIYDYHKMMNEHLIPHGVNWSAVKEDYDTKTTNGRLMINLRLAIAEQECDTDGDRIRDIHDNQIANGIWIGGCAPPGYRIENKRLSIDPDMQPAVSYFFERLLSCGSVRRAMLDMNERHNLHFEYGQAIRMARSTTYCGVRRENYNYCPTYISQDEHARIMAALEHNVRVRSADNARIHIFSGLLVCSCCGRRLAANTVRKKSVTWTAYRCHRAFGDHVCDNRHLVDERKVEAWLLDYLENGLSDYIVSASVADAQPVVVDNTAAIRERQERVKELFINGFIDLQEYKKRATELEAKIQVPEKQPPRSMEKLKSLLERGVRAIYNDLSRGERQEFWRSIIREIPVNNGAVSGDPIFL

SEQ ID NO: 37 - protein, 427 aa, unidentified
  source 1..427: note = Bacteriophage uvig_78894 from the Index of /pub/databases/metagenomics/genome_sets/gut_phage_database (ebi.ac.uk)
MQENETYVIYLRKSRADSEKSSLEEVFTKHESELQSLAERTLGNRIPEDKIFREVVSGETITDRPVISQILKVMESKKIKGVFVVDPQRLTRGDLLDKGHLINVFKYTNTKIITPYKTFDLNNDFDLKLFKMELDKGSDYLEYYKMIQARGRIASVRSGQYIGSTAPYGYDKYSYKENKHTVNTLKPNSDEATVVQLIYHLYVNESLSYAAIANKLNTMNIKPRKSTSWSPYSLKEILHNPVYIGKVRWNRRKTVMKYKNESLLKTRPIALNDSIISDGIHEAIIDEALFDSAQECNGKTPRNHSSSKLINPLAGLIFCGNCGRAMSYKTYKNNAGSEKQSPRYLCNNQSNCHTKSAKATDVINQIISALECYIEDFKVKLENDDGNSFNVRSQIISVLNKQLQDLEVREETQYEMLENKIYTPEFF

SEQ ID NO: 38 - protein, 521 aa, unidentified
  source 1..521: note = Bacteriophage uvig_205989 from the Index of /pub/databases/metagenomics/genome_sets/gut_phage_database (ebi.ac.uk)
MPKNKIMTPNRNGKIAVVYARYSSHNQGEQSIEGQLEAAHAAALSRGYTIVHEYIDRAVSGRTDNREQFQQMLADTAKRQFDVILVWKVDRFGRNREEIAQNKYRCRKNGVRVEYVAETIPDSPEGVILESVLEGFAEYYSLQLSQNVLRGMRVSAEKCQAVGGGCPLGYKVGPDKKYIIDPDTAPTVKLIFKLYAEGQTAPEIVRVLNGKGLRTKRGTAFSKNSLFSVLRNEKYRGIYIFKDIRIEGGMPRMIDDVTFFKVQDLLKVNKRAPAHKWSKAEYLLTDKLFCGKCGSPMAGESGTGRSGRKYNYYLCSKKKQYKTCDKRAVRKDEIENIVINHALALLGDDELLNYIADAVYNYYLAKDESDADLKALESKLKRTETAIANLIRALEAGIFNADTKQRMDELQADKEQLTAAIAETKIMCDYKITREQILYFLRSLRDKDYTDRECQKRLIKTFINSVFVYDDKIVINFNYSGERSAVTVDDVDSVFASLAGTAEDSEQVFVRCARWTTILVQ

SEQ ID NO: 39 - protein, 482 aa, unidentified
  source 1..482: note = Bacteriophage uvig_580229 from the Index of /pub/databases/metagenomics/genome_sets/gut_phage_database (ebi.ac.uk)
MSKMKGVIYARYSPGPDQTERSIEGQVADCQAYADRNDIEIIKVYADRHVSGRSLKGRMEFQKMIKDAEKGLFDCVVTWKIDRFGRDRYDIANNKMKLKRTGVKLLYSKEAIPEGPEGIILESVLEGLAEYYSADLAQKVSRGHRENAKKGVWTFPLPLGYTRDDQKHIVPDPVVAPVVRRCFEMYAAGAKEKELIEYMRSQGITGQRGKPISTGVIYRMLRNRRYLGEFELQGVTYEGVEPIVPTDLFEKVQTMFPTSRNNAAGRAKMNYLLSCKCYCGKCGTMMSGECGTGKSGTVYAYYKCGNRKRGGACDLKPVKRELLEEAVLRHTMDDMLTDEVIDRLVAKIMEIQDRDDGQAVVTSLRSRLDGTKKKIENVLDAIENGGGASLVERLSALEEERDALDAELSKAQIKTPRLTADAVRAWLCSFRNGDISDEGFCRRLIDTFVDRVEVREGEALIIYNATKEGAASRCSSTAQLVE

SEQ ID NO: 40 - protein, 534 aa, unidentified
  source 1..534: note = Bacteriophage uvig_94393 from the Index of /pub/databases/metagenomics/genome_sets/gut_phage_database (ebi.ac.uk)
MKKNPCRSSDLSGQRAVIYARYSTGPNQREESIEGQVRECREVAERHGLHVIHEYIDKKMSGTNDARPDFQRMLRDADRGLFDVVITWKNDRFARNRYDSAIYKQRLKRNGVKIIYAKETIPDGPEGIILESLLEGMAEYYSANLAQNIRRGQRENALEGKFFGGSVPLGYRLDFDKKFLIDKRKAPIVQEIFKRYVDGEAILDICRDLNSRGFRTAQGKKFNRSSLHRILTNEKYIGVYRYKDIKSNSIPRLISDEIFLAAGRRAERNKRSRRTMHEDSVDYLLTGKLICGYCGSSMGGTCGTSRSGERHYYYHCHCKKIKKTKCIKKSERKEILESLVIDTTINSVLKNPDVVNTIIDHCLGLQEKEEKMSPATALRYELKDTEKKIQNILSAIEAGIFTDSTKARLEELEARCADLKCGIASAEIAPPKFSRDQLLFLFEKYQNRDADDPRFIRDIIDTFIHEIYVYNDKILITYNYSDRYTKEDAAVISPRAIEKAATVTVFGFDSSGGDEGNRTPVQKACPISISECSS

SEQ ID NO: 41 - protein, 508 aa, unidentified
  source 1..508: note = Bacteriophage uvig_401826 from the Index of /pub/databases/metagenomics/genome_sets/gut_phage_database (ebi.ac.uk)
MKPLSRPSGLPPKAVIYARFSSHNQREESIEQQVAECRAYAAANDLDVIRIYHDSAKTGKNDNRTQYQRLQRDAKKGEFEFVIAYKSNRIARNMLLALSFEGEMEKLGIRVVYAKEEFGDTAAGRFALRTMMNVNQFYSENMAEDIRRGLRDNAETCKVTGALPYGYQSGENGKPVICEAQAEIVREIFKRVSGGEAFVHIANDLNMRGIKTQKGGFWNKNSFHSILNNERYTGVYIYTDIRIEGGMPQIVEKELFLKVSNRIHNKNNPQGRHRENGDYLLTGKLRCGHCGTFMMGTSGTGKSGKLHYYYACQNARKKEKECDKKNVRRDYIEHEIAAAIKEYILQGTVIDWIADCVVQYQKANREASELDMLKSQLSDTQKSIKNIMTAIENGIFTDTTKSRLLELEQAQKELTNNILIMEAASAPVPRDRVVTWLESFRGGDVDDPSYRKTLFNSFLSTAYLYDDGRCKIVFDIGGKGKELDFSVLSEEDADLSGCSYKLPSNPPT

SEQ ID NO: 42 - protein, 520 aa, unidentified
  source 1..520: note = Bacteriophage uvig_183461 from the Index of /pub/databases/metagenomics/genome_sets/gut_phage_database (ebi.ac.uk)
MAKRRAAIYARFSSHNQRSESIEIQVENSTRYCRENGLDVVRVYTDYAKTGRNTDRVEFQRMMDDARLGLFDFVVIYKVTRIMRNRDEMALARIMLRKAGVEILYAGEEIASGSSGVLQLGMLEVLAEWESAIDSERIRDGIQKNAQRCMANGRTLYGWDIVDGFYQVNEREAAVLRKMKNMLFSGSNIAEIVRAVANVRSRNGKPIIHDRARKLLMRPQNGGTYSYAGVVVEGGMPALWPKEEQDMIIAMLSKKRPRRRVDHEEEWPLTGKLWCDKCGKTLAGTSGTSKGGSVYSYYKCRHCGRTFRRDILEDAIVDMTISAVERPEVRKRIASGMAAYNAEIDDAPFESELLRKEIRRIEQAFERVWQAIEDGIAPPGGKERIAELTARKEALEVDYEIAKANEGIEPDMSDLMDWLDNMAQELTPQEILKMFVRAVEITEAEVRLFFAFDYYGDGFTPPKYKDEHPVEGCSSNPTMVELMRKTANSTSTATRAAIQLDTCIVRVSKNWFVVVGTCQK

SEQ ID NO: 43 - protein, 556 aa, unidentified
  source 1..556: note = Bacteriophage uvig_19322 from the Index of /pub/databases/metagenomics/genome_sets/gut_phage_database (ebi.ac.uk)
MARAAKQDSNSEIIDGVIYARYSEGPNQTEASIEGQVRECKEYAKRNGIRIINVYSDSKHTGTNDNRAEFQKMLRDSRRGGFSVVVVWKIDRFGRNRAEMAQNKALLKLQGVKVVSAKEYIPDSPEGIILESVLEGMAEYYSANLSQNIKRGMKENALHCKSNGSGKSLGYIVDKDGYFEIEPNEATIVKTIFQKYDEGMKIADIWREIVASGAKTKRGKDFTQYGISRVLSNRAYIGEYRYGDIVTPGGMPRIIDDDLFNRVQERRALSKKETPHRRSSSPADFLLTGKVYCGHCKSSMRGDSGTSKNGNSFYFYTCHGKRYKHNGCKKKNVRKEWLETEVTRLTVENILNDEVISFIADRVVKIQKEEQENKSMLHYYEQQLRDTQSAINNIMKAIEAGIITSSTKSRLFELEEQKSIIEGEIEREKIITPVIEKEQVIFSLERFFGGDINNKEYQRNIIDMFVNKVILYDDKIIITYNISSQNEISVDVVEQAAFAALDECSSKLSLAPPAGACPCTQSALLYVERFFIAAHQFYLKPNHCFAVADISRQGFL

SEQ ID NO: 44 - protein, 532 aa, unidentified
  source 1..532: note = Bacteriophage uvig_539751 from the Index of /pub/databases/metagenomics/genome_sets/gut_phage_database (ebi.ac.uk)
MNVVIYARFSSSGQREESIEGQVKVCTEYAENNDYTVIGTYVDRALTGRNDKRPDLQRLLSDSNNNNFQAVIVYSIDRFGRNLQQCLTNENKLKQNGVALFSATEHFTNDPAGIFYRNLMMAHSQYYCDELSQKIRRGMDINAEKCLSTGGNIALGFKVDDKKNFQIDPDTAPIVQYIFESYASGKTVTEIINQLNSQGLKTSRGVPFNKNSLHSMLKNKRYIGIYTYKGTEKIGGMPRIISDELFNKVAEIMNKNRKAPARARAKVEYLLTTKIFCGYCKEMMTGFSGTGKSGKVYRYYVCNGTKKKACKKKKVNKEYIEDLVVNECRKLLTNENIKKIANSISKISESEKDTAHLKFLKKALSENERKHKNALNAIIECDLESVRKSLYEQIPILEKEHSELQKQIALEEKNFPVLTVPMVHFFLRKLKDGNVDDIKYRKTLINVFINKIYLYDDKLTIIFNSGDNPVTINDFLLSEIEDNSKKAEGLFLDGVAPPIESLYEHLSSPSREENELLCSYCAIFFPPSRYHN

SEQ ID NO: 45 - protein, 499 aa, unidentified
  source 1..499: note = Bacteriophage uvig_408451 from the Index of /pub/databases/metagenomics/genome_sets/gut_phage_database (ebi.ac.uk)
MKDKYAQYLRKSQADQPDESIAEVLVKHRTMLMELADKMGVDVAQADIFEEVVSGESLYARPEMLRLLEQVEAGAYAGVFCMDIDRLGRGSMSEQGIILETFRLAETKIICPGKTYDLTNDADEELTEMKALFARFELKMIRKRMRRGLMQTIQAGGYVANQPYGYRKCTVGKLPSLEINEEQAKFIRHIYKRYLEGAGAHIISDELNAMGSVPNRSGRWSRNTVRHVLRNPTYAGKVAWNRVKRYKPTKNNPRPRAEHQKMEDWILVDGLHPAIIPWEEWQQVQEIRKGRYIPSQNHGQVANVLAGLIRCGNCGHNMQRMGQNKCDPRILCTEKGCIPSTKYDLVVERFMESLERIRDDLQIEVQQAKTPDISGLTSEQRAVAAKLKKTASKIDTLHDLLEDGTYDRATYKERMAKAEAEQGSLLLQQADVEQRIQRAMSRDKANMLSKLTSVLQLYPTLDNEGKNQILKSIVNYAVYRKSPKSKPGDFTLEIILKDI

SEQ ID NO: 46 - protein, 539 aa, unidentified
  source 1..539: note = Bacteriophage uvig_154620 from the Index of /pub/databases/metagenomics/genome_sets/gut_phage_database (ebi.ac.uk)
MYQSNNHSTYAALYTRFSRDEPDGESNSIANQKKLLLNYAHSRGIVNTKFFVDDGFTGTNFNRPDFKAMIAECESKKISTIIVKDMSRLGRNYLMVGYYTEIYFPENNIHFIAINDDVDSVKGDNEFTPFRNIMNEWYVKDTSKKVKSVIHNKGMSGERICNNVIYGYKHNPDNPKEWIVDEEAAQNVRTIFQLFLNGKGTSQIAKYLHSEKILVPSVYAREHGKISARATPADPCLWDSKTIREMLKRQEYVGDTVNFKTKKVSYKSKKKIYLDKSEYVIFPDTQEPIIDRDTYERVQKIMESRKKVPIVREPDPLGGYIFCADCGSRMYITRSTVFPKKNCYHCGRYKRSSELCSSHYIRECVINQLILNELQKVFSIVKNDRERFLNVAIQSYANRTSYDVKKLRKDKQLCEQRIQELDILIKKIFEQSVLGTLSKERLATLAAGYESEQSEIKNKLSAISKEIEITDSKQLNADRFIAIVDKYTNIDSLTPEIMSEFIDKVLVHKPIYDGNNKRHQTIEIYFNGIGAFDYDSCNS

SEQ ID NO: 47 - protein, 519 aa, unidentified
  source 1..519: note = Bacteriophage uvig_349562 from the Index of /pub/databases/metagenomics/genome_sets/gut_phage_database (ebi.ac.uk)
MKASNMNQIDIMYLRKSREDAELEKYGEGETLTRHYNILCELAKRNNIVVSDEYIFREVVSGESIDARPEIQKVLRLVESGIVRNVLVVEIERLARGDTSDQGRIAKTFKYSHTKIITPMKIYDPDNEYDNEYFEFGLFMSRREYLTINRRLNNGKYSSTKEGKFIGSAAPYGYDRLKVENGKGYTLVPNENAKYIKMIYEWVLQGNGAIHIAKMLQDIGAPTTTGANWSSATVRNILQNKTYCGYVSWQRRKTTKSLEDGITKKTRIRNDKAAEYFKGLHEPIIDEETWLKVQEMRERRALPSCNDNKNGLTNPLAGIVKCGYCGRTMQINTHKNKRIRMRCPNLQCACGSIYIDSVEIELISQLKDWLNGYSATVGKETRTTSRTNSVKDMIANLTSELDKISVQMNKACDMLELGVYDKDMFISRSQTLKNRQAEIKEKLSELKTELETINATDSQIQSLPKVQKILDNYFSYDTKTKNMLLKEILDHAVFTKEKGTSLVKDDSFDLEIFPILPRK

SEQ ID NO: 48 - protein, 455 aa, unidentified
  source 1..455: note = Bacteriophage uvig_596853 from the Index of /pub/databases/metagenomics/genome_sets/gut_phage_database (ebi.ac.uk)
MTKTSKRIRCAIYDRVSTDMQVKDGLSLDAQREALTAYAVSHGYEIVGVYSDEGLTARKKLQNRKNLIRLLNDVKADKIDLILVARLDRWFRNVKDYHNTQAILEAHGCNWKTIYEEYDTTTSNGRFAINIMLSVNENECDRDSERIRSVFEYKKLQKQNLCGKPAYGYKMDAQKHLVKDPATKHIVEDIFDHYFTTFSKKETVSYILSKYGNHAPTMYQVNRILSSDVYTGKKYEIPDYCEAYITPDQFRKIAETSDSKIIPHQTEPFLFSSMIRCPICGKFMSGFVKRQYLKNGEKSEYKRYRCSAKFVEYHNGACISESVIEQYLLDHIVEQLSYDMMEAKKKEQSAPLNRSRGIRQEIDRLNHMYQKGRISDAYYDEQYNALNERLQNALASENIVSIEAYRPICDLLSDSWQDVYRELDAAHKKAFWRSIIKEIHVDPETRKISGFQLNA

SEQ ID NO: 49 - protein, 538 aa, unidentified
  source 1..538: note = Bacteriophage uvig_4360 from the Index of /pub/databases/metagenomics/genome_sets/gut_phage_database (ebi.ac.uk)
MEQKKRVNCLYRVSTIGQVEKDDIPMQRQYCREFIASHPDWVLQNEFYEKGVSGFKKSAKERDAMQELQQEAVAGSFDILLVYMFDRLGRRDDETPFVVEWFVRNGVEVWSAVEGQQRFDNHVDKLLNYIRYWQASGESIKTSVRVKTRMEQLTKDGCFTGGIVPFGYKLQKQGRINKKNQEVNDFVIDEDAAEIVRFIFYKYVNEGYGAQRISHYLLENGIRRADGSMIPNTTIVRMIKNKLYMGVISNGNAESEIIPELQIVDEATFRRAQELMEKRTTHHADTPLNLRGSSLLVGNIFCGHCKNRLTLTTSGKKYIRKDGTVRNQVKSRYQCHFKARHPDLCDGQSGYGVIKLDEIVDALVRYQLSRIRVSAKDSLIAEQHEKAAALARSRYKMSAMRLEEKQKELSDYEAETINVIRGKSRLNVDRLNSLVAKCKEEIAELSQEVDAQKADMEHQLESAAQEQAEFEKLESWADLYDNCTFEAKKMIVSQLIKAVYVYRDYRLEVEFRVSFDDFRRLCVGCEPNGGRIATVESV

SEQ ID NO: 50 - protein, 548 aa, unidentified
  source 1..548: note = Bacteriophage uvig_167506 from the Index of /pub/databases/metagenomics/genome_sets/gut_phage_database (ebi.ac.uk)
MNNFGYSAPRAFGYCRKSTTGQREESIEAQQRAIVSYAAASGFELVKVYKDHGNSGRNGERPQFTQMVQDAIEGGAQFIIVHKLDRFFRNAERQTLVEAQLRRYGVRVLSASEHFDDTPQGQFMRNVTKAINQWYSANLAQEVVKGLRENAMSARNTGGPPPLGYAVDKATGKFVIAPREAEAVQLIFRLYLQDVGYAGILDALNAGGYTTRRGRPFGKNSLYDILRNEKYTGLYIWNRLAPADFDGKTNRRRLKPRDEWVCVENGMPRIIDPADWQRVQDEMEKRRHRNAQHKAKAFYLLSGLVVCGGCGGQMGGEMRRYKSHGQPVEYRYYSCINKKRLHDDGGHVRAVPADKLEKAVVDYLQHVVLRPETMDAICAAVLGATQPGTPPAERASELRKEIGILQQKIDRLYAAIENGLDAPITIQRINDLRKQQAALQAEVDALGEDVRKTADTVEQLRRVWANIRLENMQPEQLRAFIRKFVEKIIVYDDDDGGHRVRIVLNPAHVTPDKLPENLITAPLSELDTFFGYDRQRSTPAKSRLSRLR

SEQ ID NO: 51 - protein, 424 aa, unidentified
  source 1..424: note = Bacteriophage uvig_339756 from the Index of /pub/databases/metagenomics/genome_sets/gut_phage_database (ebi.ac.uk)
MDRIIEKMRFDVPTQPKAKRVAAYARVSSGKDAMLHSLSAQISYYSEMIQEHPGWLYAGVYSDEALTGTKENRSGFQSLLADCRAGKIDMVIVKSISRLARNTVTLLETVRELKSLGVDVYFEEQNIHTLSSEGELMLTILASYAQEESLSVSENQKWRIQKNFKEGKPWNGTMLGYRNVNGMLTVVPEEAEIVKRIFDMYLSGMGIQLIANTLNREGISTRLGAKFKRSAISKMLRNEAYAGNLLLQKTFKDNHIAKRTRINRGELPMYYVENAHEAIIPSEIFQKVQEMITQRAEKYAPPSLEKPAVYPFTSLITCTKCGKHFRRKTVRGKPVWICPTFNYEGKDACAAKQIPEEILEKITSDMDMENVAGITADDGNRLLFHFTDGTVTERTWCDRSRSESWTDEMRQKARDRTKARNQKK

SEQ ID NO: 52 - protein, 511 aa, unidentified
  source 1..511: note = Bacteriophage uvig_182703 from the Index of /pub/databases/metagenomics/genome_sets/gut_phage_database (ebi.ac.uk)
MDKYAMYLRKSRADMEAEKLGEGETLTRHKKILTELAAKKGLYVEKIYQEIISGETIAARPEITQLIQDCYAGMYKGIIIIEVTRLSRGNQADMQTIMDMLKYANNRSGILVITPTKTYDVAHSPDDEEYMEFELFMSRREYKMIRKRMQRGKIQAVIEGNYMGSYRPYGYDVLKTRTGRTLTPNKDEAPIVQKMFQWAANNNMTAGEIARKLTTMGVPTYTGAPEWNLGTIKTILTNPTYIGKVRWNDRMMMKTLVDGKMATSRPRSNHGDQYMECDGKHEAIIDEATFNALKNRFHSDKTKADCKLLNPLAGLLECAVCHYAMPYHVYRDRNALPRFAHRQSQTCKVKSVHASDVMDALVCCLKRYIADFEMKIDNLPSEDENTIQDEMNALEKELLKTERKLPKLFDAWENGIITDNEFAERKALNNEKIESLKKQIADLEDSIPEKEDYEEMIINFHAALNALLDDSLDADIKNEYLKSIIDRIEFSRENNSEFILDVYIKSDGAMV

SEQ ID NO: 53 - protein, 522 aa, unidentified
  source 1..522: note = Bacteriophage ivig_3237 from the Index of /pub/databases/metagenomics/genome_sets/gut_phage_database (ebi.ac.uk)
MVMKDDRAYVRVSTLKDSQKDSPEHQEAFIRERASRENITISKVYEDRDTATSIVAREDVQKMIADAKRGEIRSIWFASLSRFSRDALDAISLKRILVNALKIRVVSIEDGYDSAVKDDELLFGIKSVVNQNTSGDISQSSRRGIRQSAAKGNYIGSIPPYGYRKVVVDGRKTLEVIPEQAEIVKKIFELYLNGNGEKNIVNYLNGDNEKNTPIPSYRGGVWGLTSVQRILQNENYTGYTVYGRHTTEVAYNDLSDLMDRGKKLVMKPKSEWQKTPFQTHEAIISKEVFDRAQEIRLLRGGGTRGGRRSFVNVFSKFIFCAECGTAMVSMGSKTKNKNGKDYRYLMCSRRRRTGEIGCSNGKWLPYYEFRDELIKDILERVRESIRVLEEEGASEINSQLPESNTEKDKRKLEKRIEENRKLLFEVRRQHMLGEIDDAQYEFEKGQYEKDISDSEHRLAIIEANERRSLDREKVIRETKQYLKELTEMKTYDDVEKTRMLLMQMVKRIEVNKDGEVDVQTYV

SEQ ID NO: 54 - protein, 573 aa, unidentified
  source 1..573: note = Bacteriophage uvig_297200 from the Index of /pub/databases/metagenomics/genome_sets/gut_phage_database (ebi.ac.uk)
MTKKAAIYLRVSSIDQNYERQEIELKALAKCLGYEVKYIFEEKRSAVLKMDTRDELTQMRKLTKNEIDRIFIWDITRLSRRAIDFITLINEFTDKGICLHFKDKNIITLDEDGKQDMFVSMYLYILGLFAQMDAENLKAKMRSGRERGLAIGHAYTGCAPYGYKLINKQLYIDEKEAETVRAIFNNYVDGKSIQHIIDILNSNKIPTRTGILWTRNSIYAIITNPVYKGKPELTSITKRDENKKPLEKITRVFKAPVIIESPIWDEAQVQRKKHKSFIDKSKEREALLRGILQCGNCGKAYCTAINGSGVPTYICSDNRANINQKLNCKNGGVACYFLDSICWQTIKDIYAYKNFQDTFTKEKAKNQQLLQENQTQINNFIDKQIELDKENERVNKGYRIGIYTDSEAIRAKGEINNNKARYEKMIEELKAQNSILTAKIKQDFSHYKIPTVELSYEEKKAVCKELIETAKIYSYPPNNRIVQLQLKMGLIFNIVLNPKRRLYYIIDNSTVTFNNPQSAPIFLREELKDKDFTVTCDNNDYFNEEIFGEYSFAQMWNIMDKYGYIQDHPKVKK

SEQ ID NO: 55 - protein, 521 aa, unidentified
  source 1..521: note = Bacteriophage uvig_470108 from the Index of /pub/databases/metagenomics/genome_sets/gut_phage_database (ebi.ac.uk)
MPKITKIPASISRYTSAPIDAPVKRKVAAYARVSTDSEEQLTSYAAQISYYTEYIKGREDWEFVGVYTDEGISGCSTKRREGFQRMISDAMAGKIDLIITKSVSRFARNTVDSLTTIRLLKENNVECYFEKENIWTFDGKGELLLTIMSSISQEEARSISENVTWGHRKRFADGKVSVAYSRFLGYDKGSDGKMVVNPEQAEIVKLIYRLFLEGMTPHTIAIHLTEKGIKTPGGKDKWNATTIRRILTNEKYKGDALLQKEFTVDFLTKKTKKNCGEIPMYYIEDDHEAIIDPAVFDMVQQEMERRKTGTSRYSGVSIFSSKIKCGECGGWYGAKVWHSTDQYRKVIYRCNNKYNDERCTTPHIMEEEVKAVFLKSLNKLLANRDELIENVKLICDKLTDTSELEAEKEKYAEEMSLVADMVQAAMLENARIALDQEEYRQKNDVLSARFEAAKKKHDELAMRIEEIETRGQNLRHFQETLESLNGQVTEFDSDLWGSLVDYITVYENGEKTVTFRDGSVI

SEQ ID NO: 56 - protein, 536 aa, unidentified
  source 1..536: note = Bacteriophage uvig_32054 from the Index of /pub/databases/metagenomics/genome_sets/gut_phage_database (ebi.ac.uk)
MKRVYTLYRVSTKQQVDKAKNDIPMQRIECREFAQKQGWEIVKELEEKGVSGFKVSAADRDAIQDLKEAAEKKKFDVLLVYMFDRIGRIDDETPFVVEWFCKHGIEVWSVEEGEQRFDSHVDKLTNYIRFWQASGESGKTSMRIKTRIHQLRIEGAYTGGPVPYGYCLEQKGRLNRKGQPIPDFAIEPHEAEIVREIFRKTLCDGYGSHRMAQYLNNRGLRTHGGARFHSIAIIRILRQKFYCGYIDDETSEGLQNLKIIDLDVFNQVQSILDQRAEKDTEKRQIALRTQGEAMLSGNIFCAHCGGRLNVIRYKDHYTRKDGSEYSVNQIKYACYHKSRKLCDCEGQTTYLAERVDEIVSQVIRQLFATMKGAPQQERLEATLKHQIASNRAQQKKINHELEKRRSRLGKLQEEIANALSGESIYSPEDVAQAISKIKEGISALEQQLYDLENDAFKQRRAMQMITPSYNQFKSWAEEFEQASIEQKKMIACQLFKKIEVGREYNVTFELNMTYQQFCSEWDGLATIFEQQDLIAQ

SEQ ID NO: 57 - protein, 491 aa, unidentified
  source 1..491: note = Bacteriophage uvig_399343 from the Index of /pub/databases/metagenomics/genome_sets/gut_phage_database (ebi.ac.uk)
MDMQGKARTAVVYARFSCSKQREASIDDQLRECRAWCEREGVEVVREYCDYAVSGRTDERPEFQRMISSAGESDLVVVYMMDRFSRNEFDAPIYKRELQRHGVQLVSALERIPESPEGIIYEKLLEGLAACESRKTSVRTRRGMEGNALKSMPNGGQRPYGYRNVGGKYIVDEAEAAVVREIFERRASGETNHHIAADLAARGVVNAQGRPMRDQVVGKIIRSRRYVGEYRWGTIVTPNAFEAIVDEALWESANAKVAARSRDRERQDYREYPLVGKALCAVCGHGLSGESAHGRGGVRYDYYTCSAGGARNHIRRTRAQWLERAVVQGIRAMLSDRATAEHIAGMVVESKTGAAVERRRAGIQADIRKADDAMRNLIRAIEEGLYTPAMRERMDELQAAKAHAEAELAMVQETTVTVEEFTEFLLSGTSMSHRQIIDCFVWSIVLDNDDAVVTLNWDTRQAQKNEPARIELVRKNSEWLPEQGSNLQQLG

SEQ ID NO: 58 - protein, 462 aa, unidentified
  source 1..462: note = Bacteriophage uvig_290255 from the Index of /pub/databases/metagenomics/genome_sets/gut_phage_database (ebi.ac.uk)
MSYSRFNSHLVGMRVAKYIRCSHPGQVKEGETLEAQNQILDDFIATNKMTLVDTFVDEAMTARKKYTKRKEFMRLLDGVKAHKFDMIIFTKLDRWFRNIGDYHKIQEILEENHVNWKAVTEEYDTTTTNGRLYINIRLSVAQDESDRVSDRIKDVFSYKLKNKTYLTGNLPRGLKLDEKKHVVVDEKWRQYVDDMFDFFEACGSKRATLLYLNEKYDLNICYDTIYHNLQNPIYKGLYHDDPEFCEAIIEPARFDRLQKLARHNIKVYPRRQYYIFAGLLMCPLCNHYLRGNSTYRKLASGEKKVYKAYRCRQYSASYRCEYKSGHREDRVETYLLNHLDDALKDYIASYDIASTAALEISSTEKIAKVEKKLKKLYELFLDDLIDKDSYRAEYNKFQDEIAELKKMPVAPVVDLTEFKKLLRGDWREVYDTFTEQEKNAFFKSFIDYIYIYEDGSMDIHFL

SEQ ID NO: 59 - protein, 573 aa, unidentified
  source 1..573: note = Bacteriophage uvig_242919 from the Index of /pub/databases/metagenomics/genome_sets/gut_phage_database (ebi.ac.uk)
MARKSRKNMPVAVAEPTDNLTAKAVLSMDKEAKPYQVGIYARLSFESEANKERDTVDTQIAYIREFINSQDDMVEVEVYADISVTGTTFERPEFDRMIQDIRAGRINTVITRDLSRLGRNYVEAGNYIERVFPFLDVRYIAITDDFDTARPGTDLSVPLKNIVNEYYSKDLSKKVETGKHSIWAQGGFSEGTPPYGYYRATDGSRKLLIDEEVSDNVVRIFNMFLDGEGYGSIAKTMQSEGILSPPKYRFYKAGKTEFAEKAREWHYSHVKEILQGEYYIGNIVHGKQRKALDTGRKNKKTDKSKWQRVENAHEPIIDKDTFYRVQERIELIRSKHLEGSKPNPEAPKKPDNILVYKTKCACCGGSVLIIRHHTYSDRFMYKCSKRRKLTALCENKSSYEYNEVMDSVFSVIRQHMKLCIEKTKFVQKMNNRKENILQYDIYTKQIAKLQNDVRRITANKSGLYEDYREQLITAEELCQYQKEYESRVNEIEAQITELLYRRSLYEKDFHIDEGWEETVNKYLSKRKLTRELVEAFVSEIVFTDNNIEVKLLYDDFLKELLEVAEEREVGSNG

SEQ ID NO: 60 - protein, 483 aa, unidentified
  source 1..483: note = Bacteriophage uvig_138748 from the Index of /pub/databases/metagenomics/genome_sets/gut_phage_database (ebi.ac.uk)
MKMAAYCRVSTEKEEQLSSLENQREFFEQYADKEGDTLVKIYADEGISGKSMNKREAFTQLLEDSQTGAFDYVAVKDISRFARNTSDFLYGIRTLRSNGVDVRFLSNNQTVIGESEFVLTVFAALAQEESSNLSKRVIFGKRQNAKKGRVPNVVYGYNKIDTYTLEINEKESYIVQLMFKWYIEGEGTRRIAIKLNEMAIPTKKQAKWVPKTIRRILQNPIYIGKIINNKSVTKDFLSGTREAIPPEEWYIHERPELRIISDDDFELVQQKFKERQEQYKNDNPGNRFSNRHLFSNLIKCGECGKSFTAKVYQWKNRYVRYRCCVHNNNGNAHCTNSVTVDEQELLNEVKAYLLTAIEDKKAFADKLMKQYQAQTTNVDVSKLTDTRQSLEKRRSKFKEMFAADIITMDELKKEMSAIDEGMRSIDEELKVYDEIQKKATHIDDIHKDIEQILMQNEYTNDDMRRIIENIVVYPDKSVEIFMK

SEQ ID NO: 61 - protein, 606 aa, unidentified
  source 1..606: note = Bacteriophage uvig_448583 from the Index of /pub/databases/metagenomics/genome_sets/gut_phage_database (ebi.ac.uk)
MTVVERLRSRGVTPRAVLYARFSSDNQREESIEAQLRAMHEYCSRNSIVIIHEYCDRAKSATTDDRPEFLKMIAASREGNFDFAIVHKLDRFSRNRYDSAYYKRELKKNGVQLLSVLEQMDDSPESIILESVLEGMSEYYSKNLAREVMKGMRESAMDCRYIGGWIPYGFRVDPQTHRYIINDYEAEAVRMIFRDVADGCGYNVVLNKLNSMGYRTRLGNTFSKETLYEMLRNEKYNGVYVFSRAASKDELGRRNNHLDKPIEDQIRIPGGMPKIVDDETFARVQAILTSRKRHGRRDGKRKYLLTGMVFCGLCGHRYCGDSMQTGGEKNRSVIGTYFCNNRKNHGAHACSNSNIHQEPLEELVLRKIEEIVFDESRIPGIVQAYRELCQQEDGEDKEKIRTLRQNLKTVEQKIANIVNIIANTGSAALVTQLTQLEREKELLDVQIQEEERDTKENDLDEEAIRAAFRQAQKMFHSGTLPQMEQIINLYLDKVLVYPDYVEIHLNNVPTNLLNPSQTKDEPALGGLHTFYIEKMCEKNAPQNRTRKNGQYGYNILVKLNRKEQKKAKSRRKGQKETRAQDGLDSSKTGGLDKSKSEIVAVLFSPL

SEQ ID NO: 62 - protein, 537 aa, unidentified
  source 1..537: note = Bacteriophage uvig_596866 from the Index of /pub/databases/metagenomics/genome_sets/gut_phage_database (ebi.ac.uk)
MPNAVIYARYSSHAQRDASIDQQLSVCRAFAQRGGIDVVDVYTDRALTGTNDNRPGFRRMLADAAKGGWNYVIVYALDRFSRDRYDAATSKHKLKQAGVKLLSATEPIAETPAGILMESMLEGYAEYYSRELAAKVRRGQMDNAKKCMVNGSLPLGYCKGPDGRYAVEPTEAAVVQEIFRRVGAGEPLANIIDDLNDRGLRSKKGQPWNKSSFNRMLANERYTGIYIYQDIRIPGGIPAIVTQAEFDAVQRAAISKKNPRRAVMPDAPMSRRRQDGVYLLTGKLFCGDCGSPLIGVSGTARNQSLHHYYACKGRISKTSPGCGLKNIRREDIEYEIAAAIKQTMLTPETIQAIAQATYDYQCEAYANPDLTLLEDQLQETNRALKNLMSAIEQGLFTPTTRDRLLELELQKDNLTARLAVAKSRAADLPTREEIIAALDYYANGDLTDPLYQEALIDTFLVRAYVHSDHYDIYFSPDAKTKTEFPIGFTDATKPVFALLNGSHRLPEGPPTNVIRTSPTEVVCIAGLYRFTVSRPSR

SEQ ID NO: 63 - protein, 529 aa, unidentified
  source 1..529: note = Bacteriophage uvig_42013 from the Index of /pub/databases/metagenomics/genome_sets/gut_phage_database (ebi.ac.uk)
MSNEKDYSVLPEVTIIQESAKIESEEHKPKKLRVCAYARVSTEKEEQEYSFENQRDYYMDYISKRSDWEFVGIYSDFGLSGKNKKRPQFIKMIDDCHAGKIDRIITKSISRFARNTIDCIQTVRDLREKGIGVYFEREGIDSLSPQSALVLSIMAIVAEEESRSISNNIKWAIQKQFAQGHYLIHTKHFLGYSREEDNRIIIIPKQALAVRSIYQLYLDGKSIHQIALEMELREIESPEGNKNWGDSTILSILKNEKYKGDCLLQKTYSPDFLASKRYKNTGQLRSYYVKSHHAPIISSAMFDEVQNEMQRRKDLRTGSKAYPSKYSGKSCLSGLLICGQCGGVMRRHVQYRKGGGIGYWVCQRHDQGSCSMMQIKEKVIIDGLQMVIRQILFQKEPLYTEMTDTIINSARKAHKSSIKSVNAKIKRVQRQIQQIKDDYIEDAITYEEYCHLSRQFIHTEPFLELEREEMIQENKCLAPIEQRIEEISQRLKLQTLYEHFNEDLHMGVQKTRKQWSGILQEPTYQRRSP

SEQ ID NO: 64 - protein, 472 aa, unidentified
  source 1..472: note = Bacteriophage uvig_452057 from the Index of /pub/databases/metagenomics/genome_sets/gut_phage_database (ebi.ac.uk)
MGSKTAVIYARFSCSKQREASIEDQLRVCREWCLREGYEVVKEYSDYALSGRSDDRPQFQTMIANAGESDIVLVYMMDRFSRDEYDAPVYKRELRKHGVELYSAMEAMPDGPERILIEKIYEGLAAVESAKTAIRVKRGMTGNALKCKTNGVRLFGYDEGEDGCYVINEDEAVLVREAFKRKIEGEPVNHIASDFAKRGVKTYVGRPCGYNMIYHMLKSEKYMGVYSWGDVRVEGGMPAIVDKGTFMRAQEIKTKKRRKDENWCDYALAGRVICASCGRNFYGMSGNSRSGKRYDYYTCGSCKEVKVVRKDWLEGEITSRIREMLKDRDTATRIAEMVTDAQDDKTTREARKSAQNAKQSAETGLANILAAIEQGIIAPGTQERIAQLEIQRDKAERDLASLKDRTIDPEDFVDFLMFGATLDDKQLLDAFVYQVMVSNEDVIVVLNYNTKENEPARFTFERVRTNLRWCAI

SEQ ID NO: 65 - protein, 619 aa, unidentified
  source 1..619: note = Bacteriophage ivig_4185 from the Index of /pub/databases/metagenomics/genome_sets/gut_phage_database (ebi.ac.uk)
MFCKCGIIELHRKIQKGGSAVKKDVKVIKGDTTLKRTASGCVQRSIKRVAAYCRVSTDTEDQINSYNSQVEHYTEFIQKNKEWTLAGIYADEAITGTQVDRRIDFQRLINDCMNGDIDMIITKSISRFARNTLDTLKYVRKLKEFNVAVFFEEENINTLTMDGELLLTILSSVAQQEVENISANVKKGLRMKMERGEMVGFQGCLGYDYDPETKSISINEKEAEIVRYIFRRYIEGVGGMVISRELEEQGYLSPRGNKRWTETTVLGIIKNEKYKGDLMMGKTYTVDPISKRRLDNFGEQDKFYIENHHEPIISEEDFEKAQGIRLRRSKNRNTVANNGGKREKYSRKYAFSSMLECGFCGHNLSRRNWHSSSEYTKVIWQCVNATKNGKKYCPHSKGIEEEAIEKAFMESYRQVCHNNVEITNEFLKTVEEELKDNSLAKDLKKITNQLDKILKKEKDLVELRLNESISMDIYQDKYNEIAISKEKLLAEKRTLEVTLTDEKALKKRLEGFKKLLESNKYLEEFDRAVFESIVDKIIIGGTNDEGEIDPAMITIIYKTGKKDSQDGRLFKSRRKNAKEVNEETDNKLYPHSSDEVNNLYSYPIDNTCGDGGIIVKKIE

SEQ ID NO: 66 - protein, 441 aa, unidentified
  source 1..441: note = Bacteriophage uvig_58086 from the Index of /pub/databases/metagenomics/genome_sets/gut_phage_database (ebi.ac.uk)
MIVNEIVPQELANKRLRVCAYARVSADNEDMMHSLSAQVSHYNDMIASNPKWIFAGIYADGGLSGTKTNRPEFQRMIQDCKNGKIDLIVTKSISRFSRNTIVMLETIRMLDEMGIDVYFEEQQMNIKSGKGELMLTIIGSFAQEEARQVSENMKWRIKKDFEKGILWGGNNPYGYIIDRKEKRLVINPEQAKVVRLIFEEYLDGKGASLIAKKLNKMGFKTMMNSEWNNNVVMAILKNEVYTGDLLLQKTYRENYLTKKTLKNKGELQQYYVEDDHEPIITHEMFEETQRIRNERIKKFKNKISYSNKAYPFTGIIKCSCCGSTFNHKTTKYNKLWICKTFNMKGKEYCQESKQIDESKLYEAINKYFGWDCFKENDFKTKVEYLIAKPNNEIEMHFKDGNVAIIKWEDRSRSESWTSEMKEKARQKKIEQYKKRGGGLNG

SEQ ID NO: 67 - protein, 537 aa, unidentified
  source 1..537: note = Bacteriophage uvig_75655 from the Index of /pub/databases/metagenomics/genome_sets/gut_phage_database (ebi.ac.uk)
MRRGATLQEQEDGIIYARYSSHAQKDASIEQQIRECMAFAQAQGIRIVEVYADRAVSGKTDRRPDFQRMMRDAEKGKFRYVVAWKSNRMGRNMLQAMMNEAKLNDMGIRVLYTEEDFDNTAAGRFALRSMMNVNQFYSENMAEDIRRGLNDNALQCKVNGSLPLGFVRGEDGRYALDEPKAAIVQEIFIRVACMEPFVDIANDLNARGIKTSRGKPWGKNSFHALVTNERYLGVYIYDDIRVEGGIPRIISDELFYKVQEVLKTKKNPQGRPRSYGEYLLTGKLYCGHCKSPMVGISGTARSGALHYYYSCQRHRLEKSCDKRNVRRDVIEEAVARAIQGYALRPDIIEWIADSTVEYAKKQEAASHVAVLEGELAEVKRSIKNLMSAIEQGIITDTTKGRLLELEAEQARLTAQIAAGRADIIVIPREDIVAGLTMYRDGDIKDKRYQAKLFDTFLVAVYLYDDDMKIVFSFSGKQNTVRIPLDASVVADIENPSSATGSYVPPSGPPKESHTNQAPTIYMVGGVFVLACPLKAEK

SEQ ID NO: 68 - protein, 507 aa, unidentified
  source 1..507: note = Bacteriophage uvig_442715 from the Index of /pub/databases/metagenomics/genome_sets/gut_phage_database (ebi.ac.uk)
MPYCMYLRKSRKDSDHPGQADEDVLARHEMLLRETAKRLGLNVTAIYREVVSGDSIAGRPVMQQLLREVSAGDWDGVLVVEIERLARGDTQDQGMVAKAFQYSGTKIVTPMKVYDPNDEFDEEYFEFGLYMSRRELKTINRRLIRGREASAKQGKYIGGVPPFGYDKQKLPDQKGYTLVPNADADTVRLIYDLYLSSSEMGTGDLATVLNNSGYRTQKNHFWTATNILKILSNPVYMGKIKMGYRPKVKIFEDGIQKVIRPVKAFGEYTLIDGLHDGLISEERWYQAAEKVKSSALVNTPKKYTPQNPFSGLMKCQLCGYAVKRQTNARGGSIYCVTPGCPCQYTDISELELQLIASLGQILSEFQKTESERTVIHHEITTIEQQLTQLKREQERLQRQLDNLFDLLEQGIYDKSTFTSRRTHLEQQLAETEETLAQLTTNRDEIQHKQARAAAMIPRIQSVLDTYLYLDSALEKNRMLKTILRRIDYLRLDRDTPPSLTLYLNWED

SEQ ID NO: 69 - protein, 535 aa, unidentified
  source 1..535: note = Bacteriophage ivig_244 from the Index of /pub/databases/metagenomics/genome_sets/gut_phage_database (ebi.ac.uk)
MFDNILDEYCIYLRKSRTDLEAEARGEGETLARHEKTLLELSRRLKISIKKIYREIVSGETIAERPVMQKVLSEVEDGIWKGVLVMEVERLARGDTSDQGTVAQSFKYSNTKIITPMKTYDPNDEYDEEYFEFGLFMSRREFKTINRRLQRGRMSSVNEGKYLGSIAPYGYARYKLVKEKGYSLEIIEEEAEVVKMIFDWYVNGKQMPDGTIEAMGTSLIAHELNILQIPSAKGGLWVTETINTIIRNPVYMGKIKWGSRPLKKKKVDGKIVKTRPRMSIDQMILIPGRHEAIVTEALWIKANEKLALNPSKPISPRKKISNPLASIMICGKCNRRLIRRPYPNRNDTLMCPVKECKNVSSELILVESRIMEGLKNWLASYKADWENRRVEKKEDTQVDLLGKAIKKIEKDIADLQTQLDNLHDLLEQKVYTVEKFLDRSQIISEKIKNKVLDKESLLNKLNDNESQITNKEIVIPKLEHVLDIYYKTDDPALKNELLQSVIEKVVYTKEKGARWHGSLDDFEIKIFPKLPRTHH

SEQ ID NO: 70 - protein, 526 aa, unidentified
  source 1..526: note = Bacteriophage uvig_271148 from the Index of /pub/databases/metagenomics/genome_sets/gut_phage_database (ebi.ac.uk)
MAKVTIIPSKINPITLTPVGQVAKRKVAAYARVSTDSDEQYTSYDAQVTYYTNFINGKPNWEFVKVYADEGISGTSTKRRDEFKEMIESALNGKIDLIITKSISRFARNTLDTISITRQLKAKGIEVYFEKENLWSLDDKTEFLLTIMASIAQEESRSISQNITIGKRWGMKEGKVSFAYKNFLGYKKVDGKIVIDEAQAETVRLIYMMFLKEGKTCTGIAEFLKSKGIPTPSGKSCNWTKNTVYSILTNEKYKGDALLQKKYTADYLEHRVVPNNGELPQYYVENNHPAIIEREVWEMVQTEMMRRSMLGAAYSGNSIFASKLICGDCGKPYGKKKWHSTSKYAREIYRCNAKYNKGQTQCQTPSLTEEDIKARFIKAYNLVMCDKQQVIEDTLAVIELLADTTDLDAEIANLQTEIERISSDVSLMVRENARTQQDQIKFAARYEELTKEYETQKAALEKAVKEKAYKTGKATKMRAYLETMKQADDFLEEWSDEAWILMVETATVNRDKTITFKFANGKEIAV

SEQ ID NO: 71 - protein, 535 aa, unidentified
  source 1..535: note = Bacteriophage uvig_460604 from the Index of /pub/databases/metagenomics/genome_sets/gut_phage_database (ebi.ac.uk)
MSDGKCIVKYLRLSLEDEDMLDESNSITNQRIVIGQYIASKNEFKNTEVLEFKDDGYSGTNFDRPGFQSMMELVRDGKVSTIIVKDLSRFGRNHIEVDTYLEQIFPFMNVRFIAINDNVDSMKYESGMPGIDVGFRNIINEHHSIDTSVKVKRTLIQRQKAGKYMGARAPYGYLKPDEDVTSLVINPETAPVVKMIFQKYLDGMNITQLARYLNEQKIMSPGQYKREVLKTGVKKTTEKYIWYPVTVRLILMTETYTGTTIGGKWKVASVGSNKHLKTKEEDWIVVEGTHEAIVSKEVFDAVQEKLELNSRKRSKTHNNNYPLKGLVKCGGCGQNLQHVTRCNPHFKCPRKFNAANQDCVTDNLYDDEFNEMIFRAIKLFAKISDDAEPVLELQKAELKSKVNGAAKKIRDAKDSISRYKHQKTELYMRYAMEEISEEEFTRKNDKLDKQIEKETLAIAQIETEQSEAAERLFELPSDGRQCLTDLIEGNEQLTREIAATFIRGIKVYNDKRIEIEWNFADELVKYVEQVQKICS

SEQ ID NO: 72 - protein, 520 aa, unidentified
  source 1..520: note = Bacteriophage uvig_171430 from the Index of /pub/databases/metagenomics/genome_sets/gut_phage_database (ebi.ac.uk)
MKKITKIGTNEPLAEKKKLKVAAYCRVSTASDEQLISLEAQKAHYDSYIRSNDEWEYVGLYYDEGITGTKKDIRAGLLSMIADCEDGKIEFIITKSISRFARNTTDCLEMVRKLTDLGISIFFEKENINTGSMESELMLSILSSLAESESVSISENSKWSVQKRFQNGTFIISYPPYGYENDNGTMVIVPEQAEIVKEIFAACLAGKGTHAIARELNDRGIKTKKNGKWSAGTVKAILTNEKYTGDVIFQKTYSDSSFNRHINYGERDRFLCENHHEPIISHEDFEKVRAVLDQRAMEKGNGTDTYRYQNRYCFSGKIKCGECGTTFKRRQHYKPSGNYVAWTCGKHLENKKECSMLYISDESIKLAFLTMMNKLTYGHQVILKPLLRTLRGMDDKDRLLRIQELDICIEGNTDRKQILTSLMATGVLEPAVFNKENAALVMEEQKLRAEKEKLVNFVGGDKTRIKELQKLMAFTTKGVMLTAFEDETFLAYVESITVESRTKIVFHLKCGLNLTERLVN

SEQ ID NO: 73 - protein, 529 aa, unidentified
  source 1..529: note = Bacteriophage uvig_585929 from the Index of /pub/databases/metagenomics/genome_sets/gut_phage_database (ebi.ac.uk)
MNNMRIVEIPASMRENAGRKNTVRKLRVAAYCRVSTEEEEQQGSFEIQKLYYTEKINSTPEWEVAGIYADDGISGVHTKKRDGFNQMIQDCKKRKIDLILTKSISRFARNTLDSIQYVRMLKQMGIAVVFEKENINTATMNSEMILTVLSAFAQAESESISQNVARGKRMGYKHGKFAFPYGRIIGYRKGADGKPEIIPEQAEIIRLIFNSYLQGDSLQSIKAKLETAGALTARGNTAWSAQSIQRILQNEKYCGDVLLQKTFTEDVLTGVHKKNTGQLPQYYIENYHEGIVSKQIFREVQAEIARRNSKSAANQRKRRRGRYNSKYALTERLVCGDCGSPYKRVTWNIHGRKQIVWRCVNRIEYGTKFCGSSPSVPEEKLHRAILKAVQDLAANFTDEVAAQINGILHSIQTGESIKPNLQEQLEQTQQEFDRLLEMSLDFDEDTPFLDDRLKKLNSKIKRLKKAIDDSAAQQEKASQPEMLLSAKNLQIQEYDDALTARIIEKITVRSRNEIEIWFIGGYEKAMPLE

SEQ ID NO: 74 - protein, 499 aa, unidentified
  source 1..499: note = Bacteriophage uvig_120053 from the Index of /pub/databases/metagenomics/genome_sets/gut_phage_database (ebi.ac.uk)
MKIRRVQPSPILQKKLRVAAYARVSVDTLHHSLAAQVSYYSNLIQKNPAWEYAGVYADEGITGTSTTHRTEFKRLIADCNAGKIDLVLVKSISRFARDTVDCLNTVRQLKEKGIAVRFERENIDSMSEDGELLLTLLASFAQEESRSIGDNIRWGVRRRFAEGIPNGHKAPYGYQWDGEMFRIVPSEGEIVKEIYRRYLAGESAYAIANTLAGRGITGRQGRPIEQTTVKDILSNISYTGTMALQKNYITEGHIRKRNKGELPMYLVEGIFELLISRDDFDKAQEIRKRRAERAVNRNPVLMPLSGMVKCGCCGSGFSRRTAGKYRRWACNTRERKGRESCDSRPIKEEELVAAVRTVMEKEDFDATKLRRKVSKIVIHGDRIDFHLVNGRIKKTARIYNGQRGSNPFTNKVYCASCGSKCERDTWTKGTKVWSCSQPRTKCQLRRLPESELREAAASFFGNGYEGKIVQNVERIIISDDEVVFHLKEGGAYRWQRPCG

SEQ ID NO: 75 - protein, 499 aa, unidentified; identical to SEQ ID NO: 74
  source 1..499: note = Bacteriophage uvig_365399 from the Index of /pub/databases/metagenomics/genome_sets/gut_phage_database (ebi.ac.uk)

SEQ ID NO: 76 - protein, 538 aa, unidentified
  source 1..538: note = Bacteriophage uvig_432464 from the Index of /pub/databases/metagenomics/genome_sets/gut_phage_database (ebi.ac.uk)
MQENYIVGIYARLSRDDERAGESVSIENQKEMLSRYVREQGWTLYDYYCDDGVSGTTFDRPGLNRLVQDATDHKINLVLCKDLSRLGRDYIEAGKYTDFVFPSLGCRFIALNDGVDTLRKNNEMLVILKNVMNDLYARDTSSKIKAVKLSTFKSGKYVGCYAPLGYRKSEADKHVLEIDPVTAPVVRHIFDLRLQGYGFRKIALQLNAEKVPAPRSFYYMAEGRENLRGETPFWNDVTVKTILRNEVYIGHMVQNKTGTVSYKNHKQVSKPESEWIKVENTHEPLIPQETWDAVQRMDNHPARGRSGKNGTIALFGGLLRCMDCGSSMRYMRDYRKKVSEKEPEYKAYVCNRYASGGKNACSSHYINQKVLTQIVMTDIRCKAMWAQNSRETLRTQLLAREQNASVERTRTLQAELNAIGKRLPELDKLIQSAYEDKVLGRIPESVCVNLLNQYEAERREKQERRKELTEQLAARLETESSVDAWLDMMQDYAQLEELDRPTLVRLIQKIEISERYPVDDHEERDIHIYYNFVGYIEA

SEQ ID NO: 77 - protein, 378 aa, unidentified
  source 1..378: note = Bacteriophage uvig_204911 from the Index of /pub/databases/metagenomics/genome_sets/gut_phage_database (ebi.ac.uk)
MEHPYMWRGGTVKTILTRMEYTGCTVNFRTKKESYKDKRPTKVDSSEWIIFEDTQEPIIDKHTWETVQKLLDTPRRKGVFEENNPLTGKVFCADCGAKMYHHRNAQGIWKKNYFKAGEMIYHAPEDRYDCSNNIRGRQRYEKLCCSHSITTKALETLVLETIKRTCDYAVENEAEFREKVCSISEEQQGELSVRLEKRLAQKQKRVSEINRLIKKLYEDNISGKLNDKRFNTMLSDYESELEALEEDIERDNAELEGMCAKKTDVDVFMELVKKHMAFDELTPAILNEFVDKIMVYKAVGSGANRMQDVDIYLNYIGRFVVPEVVVELTEEEKLAEAKRQEKLEKKRASNRKYMARKREEARKAWAEIEAEKAKVVGH

SEQ ID NO: 78 - protein, 542 aa, unidentified
  source 1..542: note = Bacteriophage uvig_97244 from the Index of /pub/databases/metagenomics/genome_sets/gut_phage_database (ebi.ac.uk)
MKQKHYIAGLYYRLSQEDERQGESVSIDNQRTILRKYAEERGFTIHDEYIDDGVSGTTFQRPEVQRLLDDAKTGVINTIIVKDLSRFGRNYIEVGQYVDYVFPAFGIRFIAIQDNVDTENRDSGAMEMMPIMNVFNEWHAANTSKKIRAVKKAHAKEGIYTAKKAAYGYKIGADKRRTPVIDEETAPIVKRIFEMYASGMSPLKISETLNLEGVMSPAVYAHTVLGQKPRPYGIGLWLASTIRDMLNNIIYIGHMAQLRWTSLSYKNHKRFRKDESEWAVVYNNHEPIISQELWDKVKERKKSVAQGRKTKIGYTHPLSGFLFCADCGNKMKLCTSISRKGTRLYHFDCGHHIRYGKAYCFSHFISAKVVEEIVLGDIREMAQRIVLDEKAVREDFIRHNAELADQAIKSTKKELQAKRKRTEELSRLMQVAYEDRVRGKMPEDICIGFIQKYSDEQKKLETEIAEKEAKLTETENTIQSADEFVRNIKKYLEAPELSREMCYELIDRIIIGGSPKTTGKEREIDIVYKVDIASVLRHKLNK

SEQ ID NO: 79 - protein, 433 aa, unidentified
  source 1..433: note = Bacteriophage uvig_81090 from the Index of /pub/databases/metagenomics/genome_sets/gut_phage_database (ebi.ac.uk)
MERTIKRVDRKLPKQEKLIRAAAYCRVSSDKDAMLHSLSAQVSYFSTTIQNHPGWVYVGAYVDEGITGTKEDRPKFVKLMEDCRAGRIDLIITKSVTRFARNTVVLLDSIRELKSMGIDVFFEKENIHTLSADGELMISILASYAQEESRSASENQKWRVKRNFEEGKPWRYFMLGYRNVDGEMTIVPEEAEIVKGIFRDYLAGVGITTIVNNLNTSGFVTQSGYKFHNSAVERILRNYAYTGNLMLQTKYRENHLTKRTLVNNGELPKYHAFETHEPIISLEVFNAVQEEMKRRAEKYAPKAKRQQYPFSGLMVCANCGKNYRRKVTTTGPVWICPTYNSSGKASCASKAIPEGILMDTTASALGVDKFNEAFFHERVSKMVISVGNCITYHMKDGTEIQRVWKDRSRRESWTPEMKEKARQATTERWRSNG

SEQ ID NO: 80 - protein, 561 aa, unidentified
  source 1..561: note = Bacteriophage uvig_227260 from the Index of /pub/databases/metagenomics/genome_sets/gut_phage_database (ebi.ac.uk)
MAYRNRYDEYLRKRQGVLPDAKQWKAADYARISREDGDKEESDSIGTQFDIIDDYIAHNDDITFIDRYSDDGWSGTNFDRPDFMRLMEDIKKGKINCVIVKDLSRLGRNYILVGQYLEMIFPMLNIRFISVNDRIDSIKDPASINNALVSFKNVMNDEYCRDISNKVRSSLDRKRSKGEFIGSFASYGYMKDPDDHHHLIVDPVAAEVVKNIFDWFLQGMSIIGIAKRLNHMGIPNPSAYKRQCGLNYKHPAGQLDSAWPDSSVKRVLKNRLYVGDMVQNKNRTKSYKVQVSVAVPEENWVIVPNMHEAIIDREKFETVQQLLMRDTRTSPGINHVSIFAGYIRCADCLRAMGKKSVAQSYGKYHYYVCQTFRKAGRNLCTKHTIREKQLYDAVLATIQSQIDLAVSMDQLVNDLKSQNVRAAKSSRLEKMLQLKEEEYEKVSRCRIDLYPDWKAGILSKDEYLSLKAKIGEQLEQIEIAIANIKEEISKYQSAPVSENKFISSFLRYRNIQVLTREVIVELIEMIYVHEGGTITIQFKYQDEYQRLLDLIDEQGLASAAG

SEQ ID NO: 81 - protein, 526 aa, unidentified
  source 1..526: note = Bacteriophage uvig_581146 from the Index of /pub/databases/metagenomics/genome_sets/gut_phage_database (ebi.ac.uk)
MLYELSPSDISHIIIYLRKSRSDDPYMSVEEVLSKHETQLQEHAVSVFGQRIPEEHIFREVVSGETIADRPVMKQVMKLLETGSIKGVLVIEPQRLSRGDLEDCGRIINAFRYTNTLVLTPPKNYNLADEYDRKFFEMELTRGNDYLEYTKKILNRGRIASVKQGNFIGSVPPYGYRKVQIGTGKSTYHSLEVIPEQADAVKLMFKLYLAGNGFTNIAKKLDELGIKPLKSSVWSPAAISDMLENPVYIGKIRWNWRKTEKKIVNGQIVKTRPKTSDVSEWVYVDGRHEPIIDLATFEAAQERRGKTPKVKKNNELKNPFAGLLFCGTCGKAMSLKIYTQKNGSKCEMMLCNKQSWCNTKSVKYDVFVDRIIETLENTIADFELKLENDDSSTADLQESMISNLQNELKRLKEKDIRQKDAYEDGIYTKEEYASRNAKLQEEIAKASAALEQARTSIPATIDYREKIARFTDCLAALKNPDMSATEKNILLKSCIDKIVYHNHMESKPGIGRYVENVFTIDVFLRL

SEQ ID NO: 82 - protein, 542 aa, unidentified
  source 1..542: note = Bacteriophage uvig_64010 from the Index of /pub/databases/metagenomics/genome_sets/gut_phage_database (ebi.ac.uk)
MAPALRRVVRTMPQIAVVQIDDTPQVKKTKVAAYARVSTEKEEQEDSFERQVEHYTHLIESNPEWTMVEVYKDPGITGTKAEKRPDFLRMIDDCRAGKIDKILVKSVSRFARNTVDALNYIRELRDMNISVQFESENIDTLTPGGEVLLTILAAMAEQESRTMSNNIKWAYQKKFEKGEVTINTGLMLGYTKNGKDEDGRAVYAIVEEEAEIIRRIYREYLNGSTVTQIIHGLEEDGVKTKRGTEKWYHTAVTSILTNEKYTGNAYLGKTYKPDVLSKKRYRNDGEKAPMYYAENSHPAIVTMEMFNMVKLEMERRKTEKEKAVGNTRYTSKYPFSGILICGTCGSRLRRHVRKTGSGKLVPSWGCSNRILNGREVCDSYHVNEDVLYATYHAAVQAMVEDAGSILSTLESATEKELQPSNKAALDEVEQKIIDLQEKVLALHRQKRAQAVNDAYYNAQVNDYSQQLAALEDRQQALQTADARYATVRMWLADFQQHMQEGDATDDRDGKMMKSLVESIIIWPDRMEIHFKCGVNIEQKYVK

SEQ ID NO: 83 - protein, 490 aa, unidentified
  source 1..490: note = Bacteriophage uvig_87948 from the Index of /pub/databases/metagenomics/genome_sets/gut_phage_database (ebi.ac.uk)
MSDKPTPKNLEIGAAYIRVSTDDQAELSPDAQIRVIMETAKADGYIIPKEFIFEEKKGISGRKADNRPEFQRMIAVAKSQKPSPFKRLYLWKFSRFARNQEESTFYKGILRKKCGVEIKSVSEPIADGMFGRLIETIIEWFDEYYSYNLSGEVLRGMTEKALRSGYQAVPCLGYKAVGGGRPFVLDPDAVPIVEYIFQAYSHGKDMLTIARDLNLQGYKTNRGCPFELRGVQRILVNRFYVGDVTWNGITFHGTHETIPAVTSVFESVQARIQSEYQPRHRKQASATAHWLSGLLKCGVCGGSLGFNRTKDEKRRPSFFQCWKYSKGVHPDSCSVSVSIAERAVLDSLRSALESHDVTYEYIPPENPVTLTEEALLKEALSRLDVKERRIKEAYESEIDTLEEYKNNKVRLKSERAEILSQLEKLQQGQPSAPDPQQSKEKLLAQISTVYDLILDPDVSYVEKNNALRRILKKIVFDRKTGTFTFFYYTL

SEQ ID NO: 84 - protein, 536 aa, unidentified
  source 1..536: note = Bacteriophage uvig_392002 from the Index of /pub/databases/metagenomics/genome_sets/gut_phage_database (ebi.ac.uk)
MQTGKITALYVRFSYDDGIDAESGSIEHQKSLLRSYAESNGFTNLSYYADDGYTGTNFNRPDFQRMLGDIQKGLVSTVIVKDMSRLGRNYLMVGQYVEMEFPKHNVRFIAISDNVDSAKGMNDLLPIHNLMNEWYSHDISKKVRAMIRQKGNSGQAIASKLPYGYYNTPEDKQTWLIDESAANVVRKIFDLYLNQSFGMYQIAKILKAEGVPKPTYHRRLAKGIKVEADDLCVWSASVVRGILQHREYIGDTVNFRTEITSYKNKKVIHNSDDKWRIFPNTHPAIIDRETFQKVQDKIAKEIRHTRNVHSYLFADYLYCMDCHSRMHGRQCYLKGKRSLPAYECSTYRKSKGCCFHGVPEMYLQAEVLARIQKVLAFAKSNPAEFRQNIRKALEEQSDGSKAVIQEELDKAQTRTAEIDKYIQGLFEAKVRGEIDGSLFASLKKTYDEEKEQLNRLIIELITKLSRENEANEKVQLLYAAIRKYDAVWELTPEVLTDFIEKIEVGQVSAENKKISFELRDNQISVFFWGVGIIDFI

SEQ ID NO: 85 - protein, 526 aa, unidentified
  source 1..526: note = Bacteriophage uvig_229002 from the Index of /pub/databases/metagenomics/genome_sets/gut_phage_database (ebi.ac.uk)
MELRKDGLYFAYLRKSREDRDAEQHGEVETLERHRKMLCDMASRYGITVATWYKEVVSGETIAARPEMLKMLEAIEDMRPDGVLVVELERLARGDTRDQGLIMETFKYAGTQIITPLKIYNPNNESDEEYAEFGLFMSRREYKTINRRLQRGRNISTSEGKWIGNKPPYGYERVKIPNDKGFTLRPIPEEATVVRLIYNMYVHGTPESGNIPVGTATIGHILDDMGVKPPNGSYWPTCTVRRIVENPVYIGKLQHGYRPQQKRTVNGKITVSRPINKNCELYNGLHTPIIDQEIFALAGQKRKESYRKPFFHGIKNPLAGLIYCTECGKSMYRRPASPTCRDDTIMCSTRGCKTSASYYYLIEDRLLRALNQWLDEYRGQIEDTSLELNRAQLERYKTQLASAQEVETTAQKQLEKAMDLLEKEVYSIEMFQQRATALNEKIALARRETKELSEKIRKLEKLTADKQTIVARWEHVLEEYPNVDSPVVKNTMLKEIIERVEYSKPYKGNRKSGGMDKFTLKIFPRL

SEQ ID NO: 86 - protein, 524 aa, unidentified
  source 1..524: note = Bacteriophage uvig_548354 from the Index of /pub/databases/metagenomics/genome_sets/gut_phage_database (ebi.ac.uk)
MILLENLIMYLRKSRSDDISMSVEDVLAKHEHILQEYCEREFGARLPENRIFREVVSGETIADRPVMKEIMKLLETGTIKGVLVVEPQRLSRGDLEDCGKIINTFRYTETLIITPTKTYDLSNEYDRKFFEMELTRGNDYLEYTKRILNRGREASVRQGNFIGSIAPYGYKKIVVGSGKDKYHTLEIDNEEADAIRLMYSLFVNEGYGFARIAHRLDELGFKPRNSENWQPAAIKDMVENPVYIGKIRWNWRKTQKRMENGEIVKIRPKTKDSSEWILVDGKHPAIISEELYNEALKRRGKNPCVRKSLELTNPYAGLLFCGTCGRAMSQKRFVNRRTHTQSVCDSMLCNNQANCHTKSVKYSAFEQRVIELLENAVADFEIKLKDNNTNVIQLHEGIVQKHLRELERLHEKDMRQKDAYEDGVYTKEEYIKRNALVQEQIAKATSALEQAKASTPKVIDYADKIRRFTDCINALKNPDISASEKNVLLKSCIKRIDYYNDGESKPGVGRYVENVFELNMLLNI

SEQ ID NO: 87 - protein, 516 aa, unidentified
  source 1..516: note = Bacteriophage uvig_100661 from the Index of /pub/databases/metagenomics/genome_sets/gut_phage_database (ebi.ac.uk)
MNAVIYARYSPGPRQTDQSIEGQVRDCMAYAKENNITVLNVYADKHISGSDFTHRAEFNHMIADSEKRQFEAVIVWKIDRFGRDREEIALNKIRLKRNGVRILYAKESIPDGPEGIILESLMEGLAEYYIEDLRQKVKRGQRESALKGKAVSGQAPYGYYIDEDKHYQEKKEESWVVRYVFEHSSAGETATDILAQLQQLGVKNRKGESITKNGIYTMLRNRKYIGECTYDGIPIPIPALIDQKLWDSVHARMKHRPRKPAAFKAPERYLLSCRIFCGECGSLMVGESGRGKSGKIYHYYKCAAQKRKGGSDCMLKTYRKNDLENYVIRCTVQDVLRDDVIDYIADEVVAISKKSDQEQRLASYQASLRDAQKSLKNVMAAIENGILTPSTKDRLMELENQVEEYKTLIAKEKIRKTTITKDQVVYWLNLFRSGDLADEGFRLRLLDVFVHSVYIYNDKVVIAYNYSDDDHSEPLDPDVFRCSNIHHRVRDRVPYSNFLFFPHTFVYVSYEKIPSA

SEQ ID NO: 88 - protein, 469 aa, unidentified
  source 1..469: note = Bacteriophage uvig_107826 from the Index of /pub/databases/metagenomics/genome_sets/gut_phage_database (ebi.ac.uk)
MARSITHIPARQTVVTTNNNLQIPKKKVAAYCRVSTDQLEQLSSYQNQLIYYREYISNNKAYEFVGIYADEGISGTNTKKREQFNKMIADCKSGKIDMIMTKSISRFARNTLDCLQYVRLLKDLGIEVFFEKENINTLDSKGEILLTLLSSLAQEESNNLSQITTWGIRRRFEQGKVTVNEKKFLGYDKDGEGNLIINRQQAKIVKRIYQEYLNGKGPTRIMRELEHDKVKGVTGSIKWYTTTIDKILRNEKYKGDALLQKTYTTNFLNKTRAKNEGQVTQYYVEESHPAIIPPIMWDAVQLEIERRKQYVEEHKLQKYDYGFEDTAFAGHIICGECGRSYQRKIWHSNSKPVRLWQCGSKYQEKGKVGCNNSHIYDQKLNEIFISAFNALVKNKETFLSKWRGELQGADVLKAYRMKQFIELIAEINTIEEVDKELVFKVLDKITVIDKGKVIVKFLDGTELECLMES

SEQ ID NO: 89 - protein, 552 aa, unidentified
  source 1..552: note = Bacteriophage uvig_254024 from the Index of /pub/databases/metagenomics/genome_sets/gut_phage_database (ebi.ac.uk)
MSSMLRAAIYARFSSDKQRDASIEDQVAAGNRYAAMRGYEVVAVYADYAISGRSDDRPQFLQMIDDAKKGMFDVVIVWKIDRFARNMMDQFHYEREMKLHNVTLESCQENISGNTIEADINKSVLALAAQLRSHQIGVDTMRGLLGKAEQCQYLGVWRFGYSHDGDTITLDPATAPLAEKVHYDYLAGVPVSSIVEWLISKGVKTYAGNDPGYQFVTGILKNWAYAGVYIWGKKKDDRGKVIKDAQGQPVPLVRVENGMPAIVTPEIKRACLDRLRFRKHGKTKANYVLSGKLICTESGKLMHGESGTSRLGVEYFYYVCKATKRRYSVKKELIETTVADGVREMLEDKDLCRRLAERHVQFLSETEDNAPAIEAAKAELRALERQRDNIIDAVAGGAPFEMFKAKADKINAEISATSRRVEDLAARSGTATLSEIVEFFEDVSAGAMTDEQIISAFVGQVAFDGVRAVAVMNFDNRPAERYEIEWVLKGAQKSTNPSSRRGFVHSVSGSPEKEETEEITTSCTPLGYTKTGHPVYRLEHGFGLLLTIKKAA

SEQ ID NO: 90 - protein, 516 aa, unidentified
  source 1..516: note = Bacteriophage uvig_182389 from the Index of /pub/databases/metagenomics/genome_sets/gut_phage_database (ebi.ac.uk)
MKAEEVLIYLRKSRSDSPDETVEEVLARHERQLQEYAVRSYGLPVPEQNIYREVVSGETIEDRPEVQKVLARIENPDIKGVLIIEPQRLSRGDWEDGGRILSSFRYSYTLIITPHKTYDLQDKFDYKFFKMELSQGNDYLEYTKEILNRGRIASVREGNFIGSIAPFGYKKAVIDKSHTLVPDPQEAPGVEMIFNLFVHDNIGWAKIGYALDNAGIKPRKSKFWNPSQVKTILVNPVYTGKVTWNHYKTITIVENGKLKKCRPTSDDYLIAEGKHQALISEDLFQKAQEKLGRNTREPFSRELVNPLAGLLYCKNCGTAMTRRTYRHSDGSVRSAPRLLCNNQVRCGTKSSSFDDVYSALISALREMISDFSFKLSHDQSRSLFEIQTNIINNLNNELENLEKKQDELYDLLEDGIYSKEVFLKRNEKLAESRSELEQKIKKAKENTARPINYQERIIKFEQVLQALQDDDIPPKEKNRLLKQIIQRIDYSRDSTNRTRWDTSKPTLEIHLKDFQN

SEQ ID NO: 91 - protein, 528 aa, unidentified
  source 1..528: note = Bacteriophage uvig_102394 from the Index of /pub/databases/metagenomics/genome_sets/gut_phage_database (ebi.ac.uk)
MAKKQTNGNLALEQQRVIVIPAHDEIVARKLRVAAYARVSSSSEDQLNSYRVQNQYYSELISSNPDWEMVDIYADEGITGTSVEKREDFQRMMQDCRKGKIDRILVKSISRFARNTKDCLAAVRELKELGVSVQFEEQGIDTSKVSSEMVTAIMASLAQKGSESISGNVQWGYQKRMESGKFNTCKAPYGFTLHEGKLSIKEDEATVVRFIFQLYLNGLNGYEIANTLSQQEIPPGREMGTWKDSSIYYILKNERYAGKAMVGKSYSTTTFPHKKVRNHGEREMYLLSDSNPPIVSPEVFDRVQTLLQSRKNAHIGSTNQTFSRKLYCANCGRSLKRKFTNDKMYWVCNTHFQNAASCPTPPYHTPDIEQAFCRMYYKLKHHGDPIFTQMLSNLQKIRYSRMLWSEDVISLNKKISDILSQVQFLTQLQQAGGVDPDTFISSNNKLSEQLRRLKQEKARLLDTDSDDLADRTRDLMDALEDGPDFLDSFDAELFDALVEKIIVDSNERLRFRLKNGLELLEQIERTRR

SEQ ID NO: 92 - protein, 464 aa, unidentified
  source 1..464: note = Bacteriophage uvig_585001 from the Index of /pub/databases/metagenomics/genome_sets/gut_phage_database (ebi.ac.uk)
MNSSYFRSQPELYGLRVAKYIRCSHEGQVLHGDTLEAQDTLLNEFIEVNHMVLVDTFVDEALTARKRFAKRKEFVRLLDGVRTHSFDLILFTKLDRWFRNISDYHKIQEILDANGVQWKAITESYDTTTTNGRLHINIRLSVAQDECDRDSDRIKDVFAYKLKNKSYISGRLPRGLKLDADKHIIHDPEWKQWALDMFDHFESSGSIYSTFLYLTDKYGPLLRYDGVSRALKNSLYKGMYRDDPEFCDPLIDPERFDRLFDLAKKNVRQRKTRRYYIFTGLLVCSSCQHNLVPYTIPHTLADGTRKDYIFYRCGYHSSSRLCDRSRTYREEYIEQYLLDHVRPALSRYIAEYDVISSGASKKDPAAEAAKIRHKLEKLYDLFLDDLIEKDLYRQKYDDLQTQLKDCLTVPSAPVRDFSAIQELLSKNWEDMYCTFSKTEKNVFWKSFIKSIVVYEDGSMDINFL

SEQ ID NO: 93 - protein, 527 aa, unidentified
  source 1..527: note = Bacteriophage uvig_255241 from the Index of /pub/databases/metagenomics/genome_sets/gut_phage_database (ebi.ac.uk)
MAKKKKSLGGNAIVYARYSSHSQRDVSIEQQIDACKKHAEELGLTVIATYEDRAVSGRTDNRPAFQRMMRDAEAGKFRYVLAWKSNRIGRNMMQAMVNESRLMDCGVKVFYAEEDFDDSAAGRFALRSMMNVNQFYVENMVEDVKRGLYDNAKKGLVNGALPLGYKRGTDGKAEIDEPKAAIVREIYTRVAAGELFADIAADLNARGIRTARGREWSKGSFHVLCHNERYRGIYIYGDVRIPGGMPRIISDELFYDAQEAYNMKKDNRYGRTRVGADNYLLTGKLRCGHCGSYMVGVSGTSKTGDAHYYYSCQKHRLEHACNKKPIRRDIIESAVAQAIMTHCLNDDTIRFIVDSTISYFKQKEHELHIEEMENELASVNLSISNLMKAIEAGIITPTTRTRLMDLEDQQSRLSAKINTAKTNRVRINRNDLIAGLQLFRKGNIKDKKFLAKLFNTFLIAVYLYDDNRLKIVFSFAGNNSRVELPLELDQSYPEEDFDCIPLDMDVGRSSIKQVRTSPLLPHHKKRR

SEQ ID NO: 94 - protein, 566 aa, unidentified
  source 1..566: note = Bacteriophage uvig_376366 from the Index of /pub/databases/metagenomics/genome_sets/gut_phage_database (ebi.ac.uk)
MKKSNELPKSIIYSRYSSTNQREESIDSQIRIINTFAKSKYNIIKTYIDSAQSATTDNRESFQQMINDVKSGNLPDVKFLLVSKRDRFARNRYDMAYYKNILAKAGISIVSATEHLDDSPESVILESVLDGMSEYYSLNLGRECIKGLKENAYTCRTTGSTPPLGLKVNKDTLKFEIDEPNADAIRLLFKRFVEDGWSYQLICDELNAKGFRTTRGNLFNSKSTLIDYLNNEKYVGRLTYLKSKKDPLTGKRTCKRNYNRDEIIVVENAIPAIIDEETFNRAQEILKYRKRNASSFRTTNKMNMLVGKVICGKCGSHMNINTRKSGKNKEYYSTYRCSAKKEKMAKRCDNRELSATHLERYVISQLMFYLKQDTIVDRITDMLNEVLEHEFDSHDSEISQVNQQLMNVDVKIKNTTNAIAEGGVSLPSLVESLRALEDDKAMLKKRLHEINSAVPVFKKIDRNEVLELIEKAKEYMLSENDELIRSVINLFIEKINVGENGVEIIYYLHPFSYISHELWKTYVTRQELISYKGFSPKIMKGRWSRKAIISLSESKPTLARLISLVA

SEQ ID NO: 95 - protein, 498 aa, unidentified
  source 1..498: note = Bacteriophage uvig_6107 from the Index of /pub/databases/metagenomics/genome_sets/gut_phage_database (ebi.ac.uk)
MKKELINGVIYARYSPGPNQTDQSIEGQVHDCEEYASRNNIRIIKIYADRHLSGKDSVHRNEFQQMLRDAESQQFSTVITWKIDRFGRNREEIALNKYRLRKSGVSVRYALENIPTGPEGIILESMLEGMAEYYSAELAQKIRRGQRESVAKGRILGVKGTYGYKKDKDLHFVIDEPAAAVVREIFQQYADGMMQKDIISLLNSKSIKKADGRPFTPNAIRRLLSNRQYIGEYHYGDNVNMDAIPPIVPVELFETVQERLATTSKVKVAAHAKSDVNYLLSGVVTCAECGYSYQGEYGTNKRGNRYYYYKCRGKKSRAVTCHGKTFRKEWLEDFVVQHTINDVLTDDMISLIADRVVELQQEDSASYAIHALESQLAACTKKLNNLLAAIEEGIVTPTAKERLLALETEKDELSVALSEEKLKRVPFTRDHVVYWLELFRAGDINSFAFREKLIHTFINHIVIDDDMMFIAYNVSGKEACVPLNSVIEGVRLHSRTVD

SEQ ID NO: 96 - protein, 550 aa, unidentified
  source 1..550: note = Bacteriophage uvig_368726 from the Index of /pub/databases/metagenomics/genome_sets/gut_phage_database (ebi.ac.uk)
MQTYYADEYLRLSVADGDKAESDSINNQRELIDLFLKSHPEIKLHKERVDDGYSGVDFDRPSFREMMNDIRSGKVNCVIVKDLSRFGRNHIEMGKYLQQIFPFMGVRFIAVNDNYDSLYSDPSTDNLIIPLKNLINDSYCSDTSIKIRSHLDVARKNGKCVNPFAVYGYKKDAEDKHRLVIDKPAAVVVRDIFNKKLDGMSMSAIADSLNDDGVPSPFEYKRMCGENFYCGFKSKNRSLWSATAVSRILHNAVYTGRLEQGKRVRPNYKIKKSILRDESEWICVDNAHEPIISEKDFKIANDLILSDTRIAPGAEKTYIFSGLIFCGDCKQGMVHRVVQSNGKKYDYYICSTYRLDSKACSIHNISERALLKAVECAVKNEIQAVLKVGEMLKYIADLPRKSFEAIKLDSQLADLNKELKQNEHFKTSAFEKYVDGTISENMYREYTAIYDKKCNDIRAAIEKRQKAINEVMENHTPKTDWIDYFIENRNIEHIDRLLLVRLVKRIYIYSSKRIEIVFHHDADYKAAMDYILCAKKMNGPDGKALLEEAI

SEQ ID NO: 97 - protein, 579 aa, unidentified
  source 1..579: note = Bacteriophage uvig_206729 from the Index of /pub/databases/metagenomics/genome_sets/gut_phage_database (ebi.ac.uk)
MEVEIIKAKGAGEDTSTGRKIDRLRVAAYCRVSTDDEDQIKSYNSMVRYYTDLIKSNKQWVFAGVFADKAITGTKTDKREEFQLLIQECLSGNIDLVIAKSIPRFARNTLDTLKYVRMLRERNIAVYFEVEKINTLKDGEFLLTILSSVAQQEVENTSAYVKKGLKMKMKRGELVGFQGCLGYDYDVVTKSLSINEEGAETVRYIFDRYVAGAGSTMIARELNEQGISTIKGNLWTSSSVMGIINNEKYKGDILLGKTFTVDPISKRRLENLGEEDRFYIKNHHEPIISEEKFARAQEIRERRNGGRKKGVAPGKREKFSRQYAFSCMLECGFCGASLSRRRWHSSSKYKKTIWQCVKSTKHGKRFCPDSKGIPEQVIEDAFIESYRMLCTDHKDVLEEFIKRVEKTLSEDSIEDKIEKLNKNAYNIQYKRKKLLESYLEGVVAKDIYEETDMGYEKKLSEVNAQLGMLEQQYDNEGSLQRRLVDFRKALSKNQILEGFDRGIFESIIEKVIVGGYDENGEKDPYKIIFIYKTGFKNEIGNAKERFGKKSKAVEKAKEMCSHIADEVKDVCSYVSDNTR

SEQ ID NO: 98 - protein, 471 aa, unidentified
  source 1..471: note = Bacteriophage uvig_539964 from the Index of /pub/databases/metagenomics/genome_sets/gut_phage_database (ebi.ac.uk)
MPFEDYIDGAAYTRVSSGKQEELSPAAQKRLLLDYAKKHKILIRPEHIFMENGISGRNAQKRPEFQKMIALAKQKPSPFQVILVWKFSRFARNQEESIVYKSMLKKQCHVEVISITEPLIDGPFGSLIERIIEWMDEYYSINLSGETLRGMTENALRGGYQSTPCLGYAAVGNGQPFVVVKEEKNVVQFIFEKFCYSYMEPTAIARVLNEKGIKTKRGGLFEKRSVTYILRNQFYIGKISWNGVEHDGAHETFISQELFDLAQERLNATFKPKKRRDISECKHWASGLVKCSICGATLSYNKCRYPFFNCWKYSKGFHKETSSISEKNLVKGILDYFEKLLDGEDFSFHSLPASEPVSLRENYEDELKKLDAREQRVRLAYENGIDSLEEYRENKIRLQAERRQLQELQNACKEPEPISKADFLEKIHTVYDILKDDGISYEIKGTFLRSVVEEIIYDKEKNSLAFHLYRS

SEQ ID NO: 99 - protein, 561 aa, unidentified
  source 1..561: note = Bacteriophage uvig_70532 from the Index of /pub/databases/metagenomics/genome_sets/gut_phage_database (ebi.ac.uk)
MKAKIVRMLLRVSSDQQLEADGDLSVQRDILKEYINRHPDWILDEKEYFEGSNSAYKNTAEERDTLQEILQDAKNNEFDILVPYKDDRVGRLMMNTPEYILELKKNNVDVYSAKDGCISPKSADDIEGMMMLVFRYFNAQKSSKDTGMRVKDTMKKLVERGRFVGGKAPYGYSLEPSGEISKHGRVLKCLVVIPEKAKVVQYIYDLSLNKEYGSSKIASILNENDYWKSLAPNDYWKGGTITSILTNPIYTGRVAYNRRERIDGHYRTTDSKNWLISPVVNEKIIIIDEATWNMVQLKRSKRNFKYSKSLEERGINVIKRNDGMLSLVDVLHCGYCGSKMVNGSKYNYWEIKGTGEKRASKTPVYRCQAAKEGIPHDSTKQFRADKIEPIIFESLTTYIEFLQKNTTVLDVIQNKQIGEKKAKEKELLQAKRELQKIQHKISSMEDKMPDAIVGDYDLTPKQLNLYIQKEKDKERDQKNIIKFKQEALDKFSITNEEWSKLCENIPTWKEVFMNGDNFSKRVLVNSLVERIDIKSDSIKIRFKINLDDYLPESRMTNNDMV

SEQ ID NO: 100 - protein, 511 aa, unidentified
  source 1..511: note = Bacteriophage uvig_418756 from the Index of /pub/databases/metagenomics/genome_sets/gut_phage_database (ebi.ac.uk)
MAKRAKRSAPKKGARAAIYARYSSHNQRGESIEIQLDNDYAYCHEHELEVVKVYIDEAKTGRDTNRADFQQMLEDAKRHLMDYVVIYKVPRIMRNRDEMAFARIMLRKCGVEILYAGEQIAEGSSGVLQLGMLEVLAEWESAVDSERITEGIAKNAERCMANGQRLYGWDIVDGFYALNEQQATVMRMMKDMLLSGSMIADIRRACEPYRTQFGNKFTQSAITKMLKRKQNAGIYVYAGYEIPGGMPALWSLEEQQMIWKILEKNARPRKRENTENYALTGKLFCGKCKTPMIGTSGTSKAGARYYYYRCKKCRRNVRKDIIEANVADDVIAALSDEATREKIADMVAEIEQDTGAKPQSEIIRSELHDIELSFDRIWQAIEGGYAPPGGKERVKELTKRKELLEDELRVAVSIESVTVDRNRILFWLEDIAQEEDPETLIEVFVSKVVLVGDDDLHIAFTFEGGDDDIGQIVDDSGGVRVNGPELLHEMDRAGSRFRLYYPRAEQTHLSA

SEQ ID NO: 101 - protein, 524 aa, unidentified
  source 1..524: note = Bacteriophage uvig_187460 from the Index of /pub/databases/metagenomics/genome_sets/gut_phage_database (ebi.ac.uk)
MPVTECIAVYIRLSSEDNDVDGSIKAESNSVSAQRMLINEFIKKQDEFTNCPVVEYVDDGYSGTNFNRPGFQRMVEDAKAGRIKSIVIKDFSRFGRDYLEVGNYLEKILPVLGIRIISINDGFDSINSSGFTGGMSVALKNMLNAMYSRDLSRKVRSAMKTHAKNGEYMPAFPKYGYIKDPEDKHHLVIDSEAAETVKLIFTMAADGKTKGQIAKHLNETHVLTCREYMCRKGIKMHRENEKEKKLWSVTTISDMLKNEVYLGKIIWNKKRVARTGSNKLVSNDKEEWIVVENAHEPIISDELFRKANEKAFTNQKRVLTKRGVACPIFFCPTCGRRLGFTSRETGYRCMQAHISGLSGCAESKMDRKEAEETVLDAARNMAQLISENLEKKKSEWHKTILKEENIATLESEKKRLSSRKMKLYSDYRSEVLDKEGYMEELEKTTSRISEITLQIAELENEIAVAKKKCDEATEKEMEVNEIAALQDFDKIQLSKIIEKVFIYEPGRMEISWKMDDIFYKEEKA

SEQ ID NO: 102 - protein, 504 aa, unidentified
  source 1..504: note = Bacteriophage uvig_441829 from the Index of /pub/databases/metagenomics/genome_sets/gut_phage_database (ebi.ac.uk)
MTYAIYLRKSRKDDETGYADTLSRHEKMLMDLADRMGIVIHEHDIYREIVSGESIEARPQMQRLLKAVEMRTYTAVLCIELERLSRGNGADQARILKAFQFSNTKIITLNKTYDLASDDEFDEEFFEFGLFMSRREYKTIKRRLLRGRLQSQQEGYFTGSTLPFGYGKMKNPEGKGYILIPNEQTPILQMIFRRYASGDLLADIVQDLNTAGVKTASSLNAEWSTNRVRDMLRNRVYIGEINVNKYAKNRRMEDGRIIETKRRNPDMKTVPGKHEPIIDRETWDKVQARFARFTPRTNIDRSLKNPLASIMRCAECGKMMARRTYTHKGVSIPIIVCQSNRCVTRQSNLEMVENMVIEALKKELERQQTILASYNTEKQDNSDDKTLEFLQAEIAKKDKMMERVDELYELGDYSRSKYLERSQKLQAQKADLMKQLEEVEKRISERDNNRKNAVPILTKVLDEYHTLDVKGKNDLLKMIIETITYRKHESGSDIEPELCFKLLI

SEQ ID NO: 103 - protein, 551 aa, unidentified
  source 1..551: note = Bacteriophage uvig_517008 from the Index of /pub/databases/metagenomics/genome_sets/gut_phage_database (ebi.ac.uk)
MYFNQKSILAADYLRLSREDGDKLESDSIRNQRSLINDFVKQHPEITLVDEYVDDGYSGTNFERPAFKRLLEDVKKKKINCIIVKDLSRLGRNYIETGRYLEKIFPFLGVRFIAVTDHYDSAAESDDADQIIVPFKNLINDAYCRDISIKIRSQLDVKRKNGQFIGSFAGYGYQKDPENKNHLIIDAYAADIVRYIFNLKMDGYSSQRIAEKLNEMGVLPPMEYKRSCGMNYNSGFRSGAKPKWAVTTVNRILTNELYTGTMVQGKNRKINYKVKECRPVAEENWIRVEKTHEAIIAEEVFQYVQSLMELDTRTAPEEESVYIFSGFLRCGDCGQNMVKRSTTKNGKRYYYYHCSTYKNGDGCSSHLISEKTVHKVVLDAIQRQIALLVNAENIIQNSGMKNYKKTELDSLEKQLLVLHEEVEKYKDLKTRLYQDMLDNIVTREEYHEYNRRFTDKLHNAEKAERELEQRKEKATAEGKREHPWIEDFKCYQNITQLDRKAVVTLIDKVIVYGKDRLEICFKYADEIQEMTEAAQNIREMEEREGRFKCGA

SEQ ID NO: 104 - protein, 526 aa, unidentified
  source 1..526: note = Bacteriophage uvig_368153 from the Index of /pub/databases/metagenomics/genome_sets/gut_phage_database (ebi.ac.uk)
MNAVIYARYSSTNQTENSIDGQLHECRKFADYHGYAIIGTYIDRAKSGTSVESRDEFLKMIADAKKQQFAYVIVYRFDRFTRNRYDSVIYKKELANSGVRVISTCENVGMGDEAIILESIYEAMDEAYSRRLSTITRRGLRECAYKGEWTRRPPFGYILKDKKLYIDEREAAYVKYIFDDYLRGTTKKNIAKKLTDDGIRTKEGIEFKSTSVTAILNNPVYKGVGRYSDIYFDVPAIVDKKIFDKVTVKEKNVRHMYGQKADKTSYILTGKLYCGVCGTAMTGDSGTSRNGSIHNYYTCDAKKKRRTCKKKSERKEFLEWYICDQTVRFVLTDEKIPEIAHKVAELAKEDQKNNELDSATRRSKEVEKEIEKLTNKLILTDNPLIIKKINERADVLVKEAAALEIKIAQCKLAAAHVLSEADIVQYLTDLRDGDSFDDKFRRTIINTFVKAVYLFDDKLVIYYNVDCNNAVSYDDMKKDIKSLQEFVYNSGSDSSVLGEPHMELSEHILFIYHKHCFGAIIKIRRE

SEQ ID NO: 105 - protein, 517 aa, unidentified
  source 1..517: note = Bacteriophage uvig_310206 from the Index of /pub/databases/metagenomics/genome_sets/gut_phage_database (ebi.ac.uk)
MATVKEIAPHALQPEHLRVAAYCRVSSDSEDQLHSYAAQIRNYTEVIAQHDGWELVDVYADEGLTGTRMDKRDDFNRMMRDCRKGKIDRILVKSVARFARNTKECLASLRELSGMGVTVRFEKENIDTGTLTTELMVSVSGSLAQQESLSISANQRLSYQHRMECGEFITCSAPYGYRIKDKKNLEILPEEAAAVRWAFDAYLKGNSSKWIAEQLTAKGIPTQNGAEKWQETSIRYLLTNEKYIGDTLCQKSYSCGFPFVQKRNRGERMQYYVENSHPAIIDRDTFEKVQELLRKKAQKEKRRRERSPFALKILCGNCGTMFLRRTSKNGYVTWVCRTHDRSADACHVGRIPESEIRAAFLRMYRKLKCNADMILKPAMEQMNALDAILQQNNPKTLTINRAIAEATEESHKISTLRVNGLLDADTCTARMNVISAKLAQLRRERRRLAENEALDEVMDALRKVRQTILDGPEQMDDFDDDRFESLVEKIIAESQTEIRFRLYGGLELRERLEVAVR

SEQ ID NO: 106 - protein, 506 aa, unidentified
  source 1..506: note = Bacteriophage uvig_541528 from the Index of /pub/databases/metagenomics/genome_sets/gut_phage_database (ebi.ac.uk)
MTHSNDGLFALYLRRSRADIEREKFEKFDTLKSHEQELTKSAKAQGIILDTPYYKELASGEHIADRPVFQELMQKVSDGKYQGIMVHEISRLGRGEPREYGHILFTIKSLGIKIATLYRVFDPSNPDDYRQIKTEMFLSNMEFDNIVWRLDRGSKTKAEMGCFIKPTPPFGYDRYKRPQDGYWSLIPNSDAPLVKQIFDYAAEGRSLGYIARTLNESGIRTPTGKYWTASRIRTIITNPHYKGFIRYGYYKRKEVPSEGYKTKKIYSFNNNCILVKGLHEGIVSDEEWEKANSFLNSSPVKKDRELKNPLAGLLVCKKCGHPMVRFLNKVRSNGNLIEHYRHPQFNGCKMHGSRMSIVIDLLCDALKEVSSDLEVKIQNDHKDNTQELKESLEAQLSIIENKTKKIMELYFSDAIPVEEVKEMRLEADRRKKQLEEELSKLSKPKKTPKEIRLSIHKAIDLLKDENVSAEVKNSFLKSFISKIEYENTAERNDHSPGKIKLTIILK

SEQ ID NO: 107 - protein, 525 aa, unidentified
  source 1..525: note = Bacteriophage uvig_539021 from the Index of /pub/databases/metagenomics/genome_sets/gut_phage_database (ebi.ac.uk)
MLDPNGIYFAYLRKSREDREAELHGYGETLKRHQRMLEDLAKYHKIKIAKFYSEVVSGETIASRPQMLAMLDDIESLSPDGVLVVEIERLARGDTRDQGLVLETFKYSGTRIITPMKIYDPTDERDEEYAEFGLFMSRREYKTINRRLRDGKIASFNEGKWTGNKAPFGYERVKLAGEKGFTLKIVPEDADVVRLIFQLFIYGSNASNNIPVGTSKICRILDNLHISPPIGETWQPCTIRQILSNPTYIGKVHMGRRSTQKKTLNGVVKISRPINKNAKIADGLHPAIIDDALFLKAQEKRKANYQKPFFEGIKNPLAGLIYCSVCGKSMYRRPAGKRCKEDMIQCTTHGCPTSASYYHYIEEKLLVSLNKWLEDYRIQVKDISPESYAQQLNLLQSQLNAAQNESETSKKQLSKAMDLLEKDIYSVEMFQQRASELNEKIALSSRSISDLSVKIDSIRTKAVQKEEVIARWERILSLYPQVDDPAVKNALMKELLTRIEYSKPHKGNRQNGGMDQFTLKLFPRL

SEQ ID NO: 108 - protein, 509 aa, unidentified
  source 1..509: note = Bacteriophage uvig_467692 from the Index of /pub/databases/metagenomics/genome_sets/gut_phage_database (ebi.ac.uk)
MARKTDKPLSNIAVIYARFSSHNQREESIEQQVAECKLFAAQQGLEVTEIYSDSAQSGRTENRSQFLRLQRDAKKGKFTNIVAYKSNRIARNMVNALTFENDMEKLGVKLYYAKEEFGNNAAGRFALRMMMNVNQFYSENMAEDIRRGMEDNAMKCKVNGPAPYGYKSGKSGTYEIDEPAAAVVREIFTRVACGDSFVDIYTDLNNRGLKTRKGNKWGRSSFQSILKCEKYTGVYIYDNIRVEGGMPEIISKEMFLKVQRILGTKGNPQGRHRINGDYLLTGKLFCGECGHHMMGLSGTGKNGLLHYYYGCSGKKEKPRCSKKNVRRDELEYEVARLVQTYILQDDVITWLADTLTKYQEEHSSDGDMAILNTQLSETEKSIKNLMAAIEQGIITPSTKERLMELESEKSKIENNITLLKADTITVSKEQIGGWLDSFRDGNIKDKRFQKRLFDSFLSAVYVYDDNRVRIVFNLCGLNKGDIDTKLMLGDTEAIEKISDCSYKRCYGSP

SEQ ID NO: 109 - protein, 649 aa, unidentified
  source 1..649: note = Bacteriophage uvig_188069 from the Index of /pub/databases/metagenomics/genome_sets/gut_phage_database (ebi.ac.uk)
MNAGYVRLSRDDDKRNYVSIENQKLIINQYASDHGMVIDRWYEDDGVSGYIFDRPGFQQMMADLDKDIDTIYVKDFSRLGRHNAKVLLLLDEFQERGKHLIVIDDNYDSFGSTDDTIGIKTWFNERYVKDTSKKIKRAIGARQKEGTLMTKPPFGYCRDTKDKSIIKIVPKEAEFIKMVYDLYISGSGYRKIANYLTDQGIPTPSMVQREREIEEGRISKKKVATIWSDSMVKELLDNDFYIGTFRLRKRARNTVHGKDKRVPKEEQCIFEDHHPAIIDKATFSLVQELKEKRNRTNYRGSRGEWIGSEIPNPFGSCLFCKDCGSRLTPIKRQTSSRERKYYICTTYNTKGRRYCEKAHLIEENDLMEDVLNYIKLCREALCEVISTYDMRDFEAEKKTLAEKRQDIQEEIQNRKNQLKVLLTQKIKDLSIASENEDLIHETYDSMQKDLLAQIHGLEIQEKELNETTIETPDVKDKLRNALDVVDKIIAGGTLDRRDIELLIERIDVDKEGMPEITLKYGLSDLINYSPADEMNRRENTVIALVMKLIIEDERGYTSAKYLSEHITALGFKKTKQSILPYINLMKELGILEDTDNPLKPYNIVKTKEELAVLMHQYLPDLPAQMTSEQLSDKYLHYKDGDRWYAGDGI

SEQ ID NO: 110 - protein, 521 aa, unidentified
  source 1..521: note = Bacteriophage uvig_138780 from the Index of /pub/databases/metagenomics/genome_sets/gut_phage_database (ebi.ac.uk)
MELIYLRKSQADNPNESVEEVLEKHEYQLQEYAMQELGYTIPEENIYREVVSGETIRDRVEIKKILQLIELEEITAVIVIEPQRLGRGDLEDCGRIVNAFRYTNTKIMTPTKTYDLQDKYDRKFFEMELQRGSDYLEYYKEIQARGRLASVKRGNYIGSIAPYGYKKIQITDENGKKCFTLQEIPEEAAALRKAYDLFVNEAYGFRKIATALDELGFKPRKIAHWSPSAIKDMLSNPVYIGKVRWNWRKGKKVIENGVVHISRPKAKDSDIYEGKHQGIIDEKTYYAALDRMGRNIRARENVKIRNPFAGLLYCKCGRAMTYRTYKTHDGQDRCEPRLLCDDQVHCHSVSCTYQEIEQRVIAILKDTIANFEVELDQFDEKSHRIQTSTLDGLKAKQNAVKKKEVSLWEKYTEDAMPKDVFDSLLRKITTEKAHLERSIQNLEKAKKDKKYFCDHLVTFRNALTTLTDPAIPAEKKNAFLKECIERITYTRQKADHKGTCKTKGDNSKAKPVIHLEVTLHL

SEQ ID NO: 111 - protein, 485 aa, unidentified
  source 1..485: note = Bacteriophage uvig_588864 from the Index of /pub/databases/metagenomics/genome_sets/gut_phage_database (ebi.ac.uk)
MTDLKIAAAYIRVSTDDQVELSPASQLVEIRKWGAANGYLVPDEFVFVDEAKSGRKVTGRDEFRRLIATAKTKPKPFDAILLWKFSRFARNRDDAVYYKSILRKQLKIEVISIKEPIEDGKMGVIMESMIEAMDEYYSINLAEDVKRGMEEKHRRGELQATPSFGYTVLDNVLVPVPEEAVYVQEIFSRFVSGEGFYSIARWLNSMGVKTHRGSTFANRTVEYILRNPVYIGKLRWNPAGRSRRDYADPNIIVTDGKHEPLVSEETFQQAQTRIAQLKAAMPYKARPLGSNKDWISGLVRCASCGSTLIFAKPHYWKCNNYVRGRCRASQHISSDLLKKAILDRLHMDAAASAPLSYEVLRVNGRDGDTTAALRTQRASLERRLERLREAFLAGVDTVEEYRQLKEDAQAQIQRIDQELSAAAAENRRAGDVSIMRSAISDALAVIENEDASLEQRCNAARSIIDRITWDKAQNLLTIHYRLMLE

SEQ ID NO: 112 - protein, 538 aa, unidentified
  source 1..538: note = Bacteriophage uvig_150649 from the Index of /pub/databases/metagenomics/genome_sets/gut_phage_database (ebi.ac.uk)
MIQSSQKITALYCRLSQEDMRQGDSDSIVNQKMILEKYAKENGFENTQVFADDGYSGVNFERPAFRRMLHLIEDRKIGIIITKDLSGLGRNYIEVGSYTEIYFPKNNVRYIAVNDNFDSMYTDGNELAPLKNLFNEWFARDTSKKIRAVKRAKAEKGERIGSRPPYGYVKDPNNKNHIIVDEETAPVVQKIFSMCVAGLGPTMIANRLKEMQILTPVMYEYRKSGTAVTALDTERPYDWNAKTVADILSREDYIGNTVNCRFTVPSYKDKRKMKRDPSEHVRFEHTHEPIIDMQTWETVQKLRQGKRRPTSIGETSKYSGLLFCADCGSKLYFNHKRADDPKSYSFNCSHYRNNAKEKCTPHRIREVVLDEILLEELRRITYTARTRERQFAEFINKKSSSENRRELNAKQREYERLSKRTTELNALFKRLYEDNVLGRINNEQFRMLSCGYTDEQKSIDAKLPELEKQIQNLQQAASDVDKFIGLAKKYTRITELTPEILHTFVSKIVIHERRERFKQNTEQQIDIYFRYIGNTAGL

SEQ ID NO: 113 - protein, 570 aa, unidentified
  source 1..570: note = Bacteriophage uvig_473313 from the Index of /pub/databases/metagenomics/genome_sets/gut_phage_database (ebi.ac.uk)
MKAAIYSRVSTEGQDYSKQTNELKDYAKRNGIEVAYIFEEKESGFNNDRPEFEKLRKLTKQDIDIILVWEISRLSRRSVYLQQQVEDFTNKGICIYALSNSLRTINTDGTINEMARVVLAVTATIAEQEAATLKARTLSGKRHKVLKEGHSYTQIAPYGYDYDKETKLLSINEKEATVVRRIFQLSIDGYSLIRIATALNVEGIKNKNGNKWYFATIRDMLINPVYMGKARYALKKAPAKEGKKYRKPLEFVEVDSPAIVSEETYQLSLERMQGRKSISKSSYSVEYPLLRGLIVCPVCGRRYVYKRASKLYTCNNRDNDCKAKGASAHKLESIVWDIIKVYFKENMTNNKVEEQIEPLQAEIDSYKQKILLLDGQLSELTEEASRIYDAAIEAQKRFPNMPKLYEDKMKELDSIDKEASRYKKEKELTDKKIRSISKKINHIKEARDINLDDITDELEKYNIFHQFIDNLVICGTKHTSFIVLTLTTGQILYIGHYSKRCSNYYILFYPSSDIYFDIQTNKGYINHLKEKATINSDGSIYLGDLTGEVKEYSIIDFVNYLDIEENRRYY

SEQ ID NO: 114 - protein, 425 aa, unidentified
  source 1..425: note = Bacteriophage uvig_192865 from the Index of /pub/databases/metagenomics/genome_sets/gut_phage_database (ebi.ac.uk)
MPRTVEQIQFTPHMPKALRVAAYARVSCGKDAMLHSLAAQVDHYSTYIRHHPGWEYVGVYADEAKTGTRDSRENFQRMLADCRKGKINHIITKSISRFSRNTVTLLETVRELKGLGISVYFEEQSIDTATADGELMLSILASYAQEESLSASENQKWRVKRNFEEGIPWRFFMLGYRRENGKLAIVPEEAEIVRSIFDDYLAGKGVTAIAKRLNESGYATQSGCVFHKSAVERILRNYAYTGNLLLQTKFRENHLTKVTRKNQGELPRYHAADTHEAIISQETFDAVQAEILRRKRKYASTKPQQPSPFTGLITCAICNKHYRRKTTATGPVWICSTYNSYGKSYCPSKAIPEEKLMQTVALVGHTGEITAITAHNDNLLEFTLKDGTNAVKRWQDRSRAESWTAEMRKSAGEKTRERNKRHAES

SEQ ID NO: 115 - protein, 558 aa, unidentified
  source 1..558: note = Bacteriophage uvig_444213 from the Index of /pub/databases/metagenomics/genome_sets/gut_phage_database (ebi.ac.uk)
MLQQSNNTITSIYPIGNQTEELTALYCRLSQDDKQEGDSNSIINQKKILKRYAIEHGYQPYVFFVDDGFSGTNFNRPDFQRMIAEVEAGRIKRVIVKDMSRLGRDYLQVGMYTEIMFPNMDVHFIAVNDGVDSHVGENEFTPFRNIINEWYAKDTSKKIRAVKRSKGMAGEHIGSHAPYGYMKNPDNKKEWLIDEEAAEVVREIFRLCVNGYGPTRIANILTERKILCPTYYALEHGEKPRTVLPPDKYLWSATVVSHILERMDYLGHTVNFKTHVKSYKNRKKIDNSPEQWRVFENTHEAIIDKETFEIVQKIRSGKRRPTKMGDMPMFSGLLYCADCGSKMTFHRQMAQSAEKHNFVCSNYRHNSKSCTMHYIRNVVVEQIVLENLKEVIRYVSDYEDEFVQMVMDTDMRQRNKELSQKKKRLTEIHSRIQELDKIFQRIYEDNISGKLSDERFMKLSKGYEEEQHTLQEEQTSLEKELQKEEKQSVDVKQFLSVVRKYTNLTELTPEIVHEFIDKIIVHAPDKSSGKRLQEIEIIYNHIGVFDHSKVTLWKGKAV

SEQ ID NO: 116 - protein, 514 aa, unidentified
  source 1..514: note = Bacteriophage uvig_223147 from the Index of /pub/databases/metagenomics/genome_sets/gut_phage_database (ebi.ac.uk)
MYNQNELIMYLRKSRADRPDETVEEVLEKHEGILQDYASENFGFKIPENQILREVVSGETIADRPEIQRLLRQIESKKIKAVMVVDPQRLSRGDLEDCGRIVNAFRYSHTTIITQYREYNLEDKYDRKFFEMELGRGNDYLEYTKEILQRGRNASAKKGNFLGSVPPYGYKKVFVDKRPTLEIVPEEANVVRIIFDLYVNNNYGFMALANALDDLGIKPRKSKYWSAAALKNLIDNPVYIGKIRWNFRKTIYVIKDGEKQRTRPNAKNINDYILVDGNHEAILSEEMFNAAQAKKGKNIRVKQKVAVRNPFSGLLFCDCGRAMSYRTYRNKGVTIAMPRLVCEDQHHCRNKSVYYDEFEKYIVDVLYAAIADFKVKLENNNNTNSDYDLLIKKLEDKLERLHKKDDEQHDLLEEGFYTKEVFIRRNIKLQEDIEHTQLAIKNTKENMPKRIDYHERIATFQEAVDALQRNDVDASLKNMLLKKCIEKITYSRHLLANQSKFENPPFNVDIKLRL

SEQ ID NO: 117 - protein, 532 aa, unidentified
  source 1..532: note = Bacteriophage uvig_80069 from the Index of /pub/databases/metagenomics/genome_sets/gut_phage_database (ebi.ac.uk)
MGKTMTEGSSALKEKRVIVIEATEQQEAKKLRVAAYARVSSDSSDQLNSFMAQMNYYSDLISTHEGWAMADIYADEGITGTSAEKRLEFQRLLSDCHKGRIDKILVKSISRFARNTKECLETIRSLKAIGVGVYFEEQNIDTAAMSGELLTAVFASIAQKESESISGNMRWSYEHRMKSGTYLPSSMPYGYTIKDKKIVVDEDQAKIVRLIFSSYLAGTNMVEIAKILNDAGVSVKNGDPQQKWSKSSISYILSNEKYIGDSLWQKTYSTDTFPVRRYVNNGEREKYYAQNTHPAIIDFKTYDAVQKLKAARKEILDNSPKKTSPLSHSIYCGHCGALFRRKMCRGIQYWECSKHAQSKNNCIIHQIPETEFHNAFLRLYHKLKLHGRPILKQMITDLQTVRERRMLWSVDIIELNKRISDLTDQDHTLSEMNKLGLVDPDIYISQSNELARKIAAAKQEKERLIGLSQDTTIPQTRELMEIIEFSPDFLPTFDSESFTGLVEKITVESNESLRITLKNGLELREKIERTIR

SEQ ID NO: 118 - protein, 498 aa, unidentified
  source 1..498: note = Bacteriophage uvig_594811 from the Index of /pub/databases/metagenomics/genome_sets/gut_phage_database (ebi.ac.uk)
MAKGNRAAIYARFSSHNQRDESIEIQVEKSREYCEQRGLDVVCVYSDYAQTGRNTARAEFQKMMDHAKLGMFDYVVIYKVTRIMRNRDEMALARIMLRQAGVEILYAGETLGHGSTRVLHLGMLEVLAEYESAVDSERIRDGIQKNAERGMANGQTRYGWDIVDGYYQVNEQEAALLRRMKNMLLSGSTLAEITRAMEGERTRAGKKFTIKGIMKLLRRWQNCGVYEYAGVRIEDGMPALWTREEQEMLIRILTHRTITQRRRGEAEEYPLSGKLFCRECGRYYSGTCGTSKSGTRYFYYRCPSCRRAFRSGLIEAWACDAVFEATKGKHFKEQLADAMAVFDESSNGAHEIEAKRLRKEISKIDAAFERIWKAIEDGCAPPGGKDRIADLKTRKAALEEDLAQAEAVSSCESISKEDLEEWIGLIAKENDTKKIIDRFVRFIEFDGQEGHIYFTFDHHGNDFMPTKKANTQMKGCSPIESMVDRRGLEPRTLGLRVP

SEQ ID NO: 119 - protein, 496 aa, unidentified
  source 1..496: note = Bacteriophage uvig_239214 from the Index of /pub/databases/metagenomics/genome_sets/gut_phage_database (ebi.ac.uk)
MSEYIMYLRKSRQDEPNETVEEVLKKHEIQLQEYALNNFKYQIPNEDIYREVVSDETIDDRPMMQAVLKRIENSSIKGVLVIDCQRLTRGDMLDCGTIVHSFRYSNTLIITPPKTYRLDDKYDRKFFEMELSRGSDYLEYTKEILKRGRDASKRRGNYIGSVAPYGYDRVKVGNDWTLKPNDESQYIKYIFERYTQGVGTAQIANELDALGAKPRHSEYFNHTRIRKIIENPVYVGKIKVNSTEIRKELVDGKIVNKKIYKKEYEIVDGKHEPLISQEMFDKAQKEKEKRTCNNTSTELVNPYASIMKCGYCGSAIVNYYNNMTRKKTKRVRCANKKCNCVSHNFDEVNDAIIKALKSKLEDIKVQTDINTPREKNNAKNIAKTLEKRIKESEKKLNDICTYLENGVYTIDMFTKRKEILEDEKATLEKALENAKKETESSIELKAKSLTLHKAIDMLKDDTISAKVKNNFLKKIISVIYYKKDKNGNIFIDVHLC

SEQ ID NO: 120 - protein, 529 aa, unidentified
  source 1..529: note = Bacteriophage uvig_65204 from the Index of /pub/databases/metagenomics/genome_sets/gut_phage_database (ebi.ac.uk)
MATAKNVTVIPATFNPQTRRPLKQVTRRRVAGYARVSTDSDEQFTSYEAQVDYYTNYINSNPEWSFVKVYTDEGISGTNTKHRDGFNEMIADALNGKIDLIVTKSVSRFARNTVDSLTTIRKLKEHGTEVYFEKEAIWTFDNKGELLLTIMSSLAQEESRSISENVTWGRRKQFSDGKVSLPYGQFLGYRKGPDGLPEIVPEEAKTVDLIYRMFRNGKTPSYIARHLTAQGIPTPGGKKVWQAQVIESILTNEKYKGDARLQKKFTTDFLTKKQKKNEGEVPQYYVENSHPAIIEPRAWAEVQRIMKRRKASGKRHECSSPFSGMVICGDCGSTYGSKVWHSNDPYRKVIWQCNSKFKSEEKCRTPHVTEERLKDGFLEALSILHENRETLLNDIRDVKHDLENCTEVNAKITETAQEMEVIAGLIQKAIEDNAVHAQDQEEYNRRYNELADHYEKLKKKLEALEQERDDREYKSTVLSGFLFEMMEFEYLDAEFTDARCIAMLDHVSIYADGRMVYSFLNGSDITVML

SEQ ID NO: 121 - protein, 545 aa, unidentified
  source 1..545: note = Bacteriophage uvig_597817 from the Index of /pub/databases/metagenomics/genome_sets/gut_phage_database (ebi.ac.uk)
MNNNRQSYNAEEKITALYCRLSRDDELQGDSNSIINQKAILQKYADDNGFRNTFLFVDDGYSGTTFDRPDWNRLMGLVDEGKVGTIIVKDMSRLGRDYLKVGMYTEMVFPNADIRFIAINNGVDSANQAENDMTPFINIFNEFYAKDTSRKIRAVFKAKGQSGKPLSTNPPYGYVKDPEDKTHWLVDEQAAEVVRDIFRLCVQGYGISQIANEITRRNILNPTAYAKASGRSVPDNRDGDNDYTWRSSTISHMLSRPEYLGHTVNFKTYRKSYKQKKQLHHSPSEWQIFENTHEAIVDRETYDIVQRIRDGRRRRTPMGEMPMLSGMVFCADCGAKLYQVRSTGFSPGQEYMVCATYRKKGKEKCTSHQIRNSVIEEFLLEGIRSMTAYVREHEDEFVEMVTKLSKAETEKALRDEKRELEQAESRVHKLDTIIQRLYEDNVEGKISDERFAKMSENYESEQKLLERRITEIRCSIAAQKESSMNVNSFVALVRKHTDIQELNAEVIREFVERVEVFQPARVGGRKVRRLRIVWNCIGEFTPPQL

SEQ ID NO: 122 - protein, 535 aa, unidentified
  source 1..535: note = Bacteriophage uvig_35124 from the Index of /pub/databases/metagenomics/genome_sets/gut_phage_database (ebi.ac.uk)
MDSNQRIVRTIPASFTRTTSQVVRLLNVGAYARVSTKKEEQEDSYERQGSHYTKYIKSHDGWQFVDVYADEGITGTRAEKRKDFQRMMDDCRLGKLDKILVKSIARFARNTVDALNAIRELKELGVSVYFENENIDTLSPGGEVLLTILAAMAEQESRTISTNIKWAYQKKFQNGDIQLNYKRFLGYTRDENHNLIIVPEEATVVQRIFREYLYGYSCANIAAGLTKDKIPTPSNKTKWYASVIMSILQNEKYYGGLICGKTYKPDVLSKKRYKNEGQVERYYIENSHPAIISKEEFDLVQAEMRRRQTIRGFSETNQGRYSSKYAFSKRLICGECGAYYRRHAQYCKGEYIHTWVCPTHKIKGGTACSQTYLKEEEIEGAFLEMLKALVGDFKEISDTLKENIVSSLDDSIAEDINETLLQIEVRQTEMLELLREKRAGRISDQEYNERGMAIEKAIQELSERRVKLESKSNSAKLAMMRVEQITTALSDVGSLDKYNGEIFRSIVENVVVRNTYTLDFHLKVGIVESITITRK

SEQ ID NO: 123 - protein, 513 aa, unidentified
  source 1..513: note = Bacteriophage uvig_550968 from the Index of /pub/databases/metagenomics/genome_sets/gut_phage_database (ebi.ac.uk)
MQENKQNIRFTALYCRLSSDDELKGDSNSIIHQKQILQDYALKNSLTPTEVYVDDGFTGTNFDRPDFKRLLSDVENDLVKTIIVKDLSRFGRNYLKVGYYTEILFPSKGVRFISVSDNLDTSAKDEINDFIPFKNIMNEWYAKDLSRKQRAVIKSKGNAGKRLSTRPIYGYKKAENGDWIIDEPAAIVVRKIFDLYLKGYGPASIANYLFANKVKIPSLTGLQISDKTRNPYRWSKDSVAHILTCQDYCGDMINFKRSDVDNLVIFPDKQEPIISREIFAEAQKLRLSKKPVRHSYSEPVLFSDFLRCADCKNRMYAQRRYKGSTSYTCSTARKVQGCSSHYINENRLSDCVKSEINKLIANKTKVVEFAKAKMHTDAKTAQCASVKNLKNAQTRISEIDAILKNLYEDKVRGNITLETFKKLENEFLREQANLNQTVINQSRIKVNIDSQSKKICEFLRKLEMYKVTIQELSRNVLIDLIDKIEICEAEKENNKRSQQVHIYYLGIGKIDLE

SEQ ID NO: 124 - protein, 547 aa, unidentified
  source 1..547: note = Bacteriophage uvig_296393 from the Index of /pub/databases/metagenomics/genome_sets/gut_phage_database (ebi.ac.uk)
MARKSRTQPKQSPDTLNVLSKVYKTAIYVRLSAEKDETRDRKTLINQRNLIKNFVDQQMDMEIHDIYMDDEISGTTFDRPEFERMMSDMRAGRINCIVVKDLSRLGRDYIETGNLVERVFPMMNIRFVAITDNYDSSKKDADLMVAVTNIANDLYAKDISKKISSSKQEAMEKGIPVGRVTYGYKVVLDENKVRVMVEDKEAADVVRWIFNEAEKGTLHSVIAAELNAKHILTPAQYKVRHNIEKLEKLRGVKWTVDTLSQILKNEVYIGRYVTGKDRVCLYRHEKRHTTNKDEWYVFENHHIALITKEQFYAVQKNKRKVIKPAKKQTVNMLKGKITCGCCGSSIHIHPEKYGKVYMCTHRKRYGKDSCNCLPVKVDDIYAAVLAVIKEQIQVFIDREKILKEHHNDSSVIRQEQVYTEAVNKCVKEMDRLMELKSGLYADYTEDLLDEKEYLQLNREYSQRIEKLKIQADEYRQAASQYESAEKTVAQLKAEMLRFKGKRKLTQEMVDLFVAQVRIYKNKNLEIVLNYEDELKKFAELNMEREAG

SEQ ID NO: 125 - protein, 485 aa, unidentified
  source 1..485: note = Bacteriophage uvig_311349 from the Index of /pub/databases/metagenomics/genome_sets/gut_phage_database (ebi.ac.uk)
MTLLSTLEIGAAYIRVSSDEQTELSPDAQVRVIKDAAKADGYYIPDEFIFMEERGISGRKAENRPAFQRMIAVAKSENPAPFKRLYLWKFSRFARNQEESTFYKGILRKKCGVEIKSVSEPIAEGMFGRLIETIIEWFDEYYSINLSGEVLRGMTEKALRNGYQTAPSMGYAAVGHGNPFVIDPERMKIVEQIHTLYHNGMDMTGIARELNRLGYLTQRGTAFERRTIYRILTNRFYIGTVTWNNISFHGTHELSPIVTAVFEDNQTRIKRESQTIRHRDVSSCKHWLSGLLRCGVCGSTLSYSRSNSPQKRSDAFQCWKYIKGMHPGSNSISVRKIEQAVIQSLQEVLVTGEISYEYIPPQDDETIDRKELLREAIEKVTVKERRIHDAYENGIDTLEEYKENKKRLLMERTELTEELEKLCSISPADEEAGKEELLKRIQTVCETLSNPDIDYETKGVAIRQVIKYIVYNRADSTLQFYYYLS

SEQ ID NO: 126 - protein, 547 aa, unidentified
  source 1..547: note = Bacteriophage uvig_245605 from the Index of /pub/databases/metagenomics/genome_sets/gut_phage_database (ebi.ac.uk)
MEAATTTLERRVREIPPTRKPEELLRNYDGKMRVAAYCRVSTDSEEQLNSYEAQKTYYTQKIQDNPDWEMAGIYADEGISGTSLKKRTEFNKMITACKRGRIDFIITKSLSRFARNTVDCLDTVRLLKANGIGVYFEKENINTLTESSEFLVTLFSGFAQAESESLSKNVAWGKEKSAKAGNVHFQYKKMLGYRKGEDGQPEIVPEEAAIVRRIYRRYLDGCTLGKIKRELDEDGVPTAQGVECWSPAIIHNILTNEKYIGDALLQKTYVTDCLSKKVRKNRGERVMYYVENNHPAIISREAFDLVRKEMTRRSSKRKVLQKSGKTELGKYSGKYALTELLVCGECGSPYKRVTWARDGKKRIVWRCVSRLEFGTKYCHASPTLDEGKLHSAILNAMNEYAAIRQEVCPDVLAMVEEAKQALTQTGTKLLTLKRRLDEVSHEQADMLDMLLSNMADADLNARMKALTDEKASLKEQILETQQEEVGLEKQVAKRQQMWDSLIECSEGYTEFDDEFVRQIIQKITVEDADTIRIQFRDSDIVLEQGLQ

SEQ ID NO: 127 - protein, 513 aa, unidentified
  source 1..513: note = Bacteriophage uvig_163750 from the Index of /pub/databases/metagenomics/genome_sets/gut_phage_database (ebi.ac.uk)
MYRYIVAIYLRLSVDDKRVESMSIESQRLLLRKYAEILGDNVEIIEYVDNGYSGTNFERPAVQQLLTDVKTYKVNCILVKDFSRFGRNSIEVGYFTQQIFPLFGARFISVSDNYDSDEHKGDTGGIAVAVKYLVNEYYSRDLSVKTKSAKYTKMRRGEYKSGNYTYGYKPDKNGEQIIDEKAAETVKMIFELTADGKSAAYISKLLFDKNIPTPAQYKGIKGNYGSRFPNCKYWSISTINRIIVNEQYMGMFVMLKQKVQDVGSTKMVKRDESEWIKIPNHHESIVSKELFERANAVRRTFKQPNKQQRSYPLRGKVECGCCQHAMDYVPKKTPIYRCSYTRNDETEPCYKSEISESSLNQAVFDIISKQAEIILNIDDVSKADTAQIKTEQLADIEKQIVACQKEKQKLYEHLLTEKITLDEYRQQKQEYDTKAENYRIRYDKCRQSEEQNRLKIENRTKIVQTAKTIKKENTLTQALADVLIEKVCVYPDNRLEIEWKIKDFCAENTAVIS

SEQ ID NO: 128 - protein, 481 aa, unidentified
  source 1..481: note = Bacteriophage uvig_75905 from the Index of /pub/databases/metagenomics/genome_sets/gut_phage_database (ebi.ac.uk)
MPGTNSIPGTAAAYIRVSDDKQDEYSPDSQLKLIRDYAKRNGYYVPDEFVFYDDGISAKTAAKRPKFIEMIGIAKQKNPPFDKILVWKFSRFARNQEESIVYKSLLRKNGVEVISISEPLIDGAFGSLIERIIEWMDEYYLVRLSGEVKRGMKEKASRGEAMSGRVFGYLPKDGTLIPHPEEAPLVRMIFDDYLNGKRERQIAIKLQQLGVKTIRGNDPDNRFVDYVLNNPVYCGKVRWSTDGRAASKRDYHNENIMLVNGSFEPIISEQTFNAAQKKIVDQKKRYPKYQRNEAPTEYMLRGLVRCDSCGATLTLQRASKALQCHNYARGSCKVSHSISIAKANKTVIEALQYAVDHLDFNILPDEEKHTPEDYSKPLAALRKKLARTKEAYINGVDTLEEYKENKQRITEDIAKLEKKQAANTALPEVDKEAFAAKVRGVIAVISSPDTTEQAKNEALRSVIAKIVYHKLAQSLELYFYA

SEQ ID NO: 129 - protein, 512 aa, unidentified
  source 1..512: note = Bacteriophage uvig_151078 from the Index of /pub/databases/metagenomics/genome_sets/gut_phage_database (ebi.ac.uk)
MQTPRLKKRAASYVRVSTYQEKQEKSLADQIAMLNKIIDDDDTLINVGTYIDQGITGKYQSKRKQFLKLVRDCIEGRIDVVYVKQMRRFGRNTLETMQTIEKLRAYGVAVRFVMDGIDTIKDRGCSRLTMLANMAEEERDSLQETMIWSFQHRMEQGDYVFRPDLLFGYALNKNKEMVIVEEEAKAIKYIFETYAAGGRVVDIEAWLNEHGYVTRKGNPFCKSSIGDILQNEKYYGDLLIGKTRMDGPRRVRNEGESPMYLHEGHHEGIISKELFDKCQEVRQSRHYKTTKDYSDSDIFCKKVYCGQCGSLYYRQGRINCVSDFSQTAFACGLAVRSKRSKCRNKLQRIGTLKDGFVAVYNFLYDNRSTLNEIVVENEEYNEIVERLKELCESEKMYFEAEVKGLMNEQMKKNHTRLVGEVLNLEERKRFLLSRNFEISNCNSNLKKCNKVLRETGKIADFNDELFEIFIQRILVINRNNLVYELTSGHKINVEVLDNYKVRDEIRRVYVSE

SEQ ID NO: 130 - protein, 431 aa, unidentified
  source 1..431: note = Bacteriophage uvig_195859 from the Index of /pub/databases/metagenomics/genome_sets/gut_phage_database (ebi.ac.uk)
MDKKITVIDALPKLEKKLRVAAYCRVSSGKDAMLHSLSNQISYYNNLIRNTKGWEFAGVYADEAISGTKNDREEFVRLINDAKNGKIDLIIVKSISRFARNTVTMLETIRELKAIGVDVFFEEQNLHSISSEGEMVLTFLASFAQEEARSVSENMKWRVRKNFEKGISWCTRKTLGYIYKDRKLVVEPEEAKLVRRIFDMYIGGLGLQAITNKLNEERVKPPESVKWKKDSIRYILTNITYTGDLLLQKYFNIDYMSKKHKPNKGELNQYLVEDDHEPIIRKETFNKVQQLMYERAEKVNSSRAAQIIHPLASLIKCSICGKSYHHRTTKYTKKWMCQTFNREGKSHCASKAVPASEMDRLVYEVVGDDIPKIKEIIVYPNNTLLLNLNDGSSITKTWNDISRSNSWTDEMKEEARKRSLKQWENIKREGK

SEQ ID NO: 131 - protein, 535 aa, unidentified
  source 1..535: note = Bacteriophage uvig_150139 from the Index of /pub/databases/metagenomics/genome_sets/gut_phage_database (ebi.ac.uk)
MQNAVIYARYSSHGQNEQTIEGQIRVCSEYAQQHKLRVVNIYIDKHKTGTDVNRPQFQKMIDDAATGAFTHVIVYMIDRFARNRYYSTVYRWQLQQQNIRVVSATENISESEEGEFYQMFLEWNAEKYSTRLSKRVREGLTTSVANGTFAGGYLIYGYKKEGKRVVIDEAEASIVRYFFEEYASGVPKKDIAEALNARGERYRGKPWRGRDFDKMLTNAKYTGTFEFGGRLCANTYPQIIDKALFDKVQRRAQQNKYFSGANSARITYLLQGKLYCGHCGANMVADGGTSKTGAVYHYYACTAKKKRRTCTKRNEKKDFLEWYATEQTVAYLSDPRRVALIADDVIAYYESRTDTSEIKRITVERTRIQKEIDNAVNLMVSGVSPEVVKTLDKKIVELTAQLNDLTEYQAKLELERGLQVRREDIIAFVAEFIRGDLHDKEFQKRIIDNLVNAMYIYDDRVVLYFNISGGRETAFIGKEDTDEASGVPLDDNNNAHAGAGGSVQTLTPPLRQKKIIRTPRQFRGSYYSFLTIISA

SEQ ID NO: 132 - protein, 562 aa, unidentified
  source 1..562: note = Bacteriophage uvig_224697 from the Index of /pub/databases/metagenomics/genome_sets/gut_phage_database (ebi.ac.uk)
MARKSRKNVQATPAVVVGPVQYKVALYARISVENEQKREADTIGNQIALLKDFVSQHQDLVVFDLYCDDDISGVSFVRPEFARMMNDIRAGKVTCVIVKDLSRLGRNMIESGEYIEQIFPRMGVRFISVTDRFDSLRDDADISIQLKNFANEAYARDISKKIRAVKRTQQLAGKWTTGTPPYGYMLDPDDKYHLFPDPQTGPIVLAIFRMVAENNTLHFIAKTLNEQGVPSPGRYLYDIGLRKTEKFKNAIWYLQTIKKILVDPVYLGWIVSGKYRSQLCERGTKTTVKTPEEEWIINKGMHEPIVSKELFDKVQGILSARQSEKGLATIYDSKSKRRSMFKGILRCGECGRSMYLRNKSNRGYYYYCTLHENYNATICPKKAVKQEDVESLALRLIQTQIRAFSDAQRLIANLNATPSSQTRYQIYETQIDDAKRKIEKFNQLKAALYGDFADGLLSHQDYTDLSEDYSRRADDLRIFIAELEKEKEKYSAGFGSKTQWALLIEKYKDQESLDAEMAAAFIETLTLFNDGHVEVAFRHRDEIEQVLYVAATRGKEAERYAG

SEQ ID NO: 133 - protein, 562 aa, unidentified
  source 1..562: note = Bacteriophage uvig_395040 from the Index of /pub/databases/metagenomics/genome_sets/gut_phage_database (ebi.ac.uk)
MAEQIIQLAKNVLKRVVCLYRVSTVGQVEKDDIPMQKQFCREFVQRQPGWEIVKEFSEKGVSGFKVSAKKRDAVQEIQRMALQGEFDILLVFMFDRLGRKDDETPFVVEWFVKNGIEVWSAMEGQQRFDNHVDKLLNYIRYWQASGESIKTSVRVKTRISQLTEEGYYTGGIVPYGYRLENRGRTNKRNKEVCDLAIDLDEAEVVKVIFQKYVYEGYGSQRISRYLAEQGFRNRKGGNIPTTSINRIIKNPLYIGILCNGESRSENVLTELQIIDVDLFERAQKMIESRAKPRTAHKEIPLNTRGQSLLVGNVYCGHCGKRLTLATSGRKYQKKDGTVVNKTYARYQCSYNIQHPGGCDGPSGYGAAKLDDLVDQIIRIQFERIKTAPPQALIREQQSREVEIAKAKLNLLNGQYQQKQRDYQDLRAETLRVIRGDSRLNVDFLNSIVDETITQLKELGQQVKEAEAELRELVSGAEQVKEEYAQLMNWAELYDKCTFEAKKMIAAQFVKAVHVKRDYEIDVEFNVAFDEFQSIYLEPEKEDEKKRGASTLLALGENVGQAV

SEQ ID NO: 134 - protein, 509 aa, unidentified
  source 1..509: note = Bacteriophage uvig_581138 from the Index of /pub/databases/metagenomics/genome_sets/gut_phage_database (ebi.ac.uk)
MARKKKYHLREVHSVCIYARYSAGSRQTDQSIEGQLQVCRDYAAAQGYTVTRIYRDSHISGTTDDRAQFRQMLADSDTGAFDAVLVWKNDRFGRNLEEQVVNEMRLKNNGVSLISVTEPLADGPLGPMQKALLMGIAEFYSAANSENVRRGMRQAALNCQVISGAIPFGYRKGADKRFALDPPAADMVREIYQRYDCGEKIFSIMDDCNRRGFRTVQRSAPFTHNTMYSILSNERYTGVYLWKDVRIEGGMPQIVDRELFERVRAKMQQNKKAPARSKAAEPFLLTTRCFCALCGAPMIGDSGTGKNGTTHYYYSCAARKNARSKRDACPQKSIRKDALEELVLRRTLSDLLQPQTCAQIARQLVEYQQKDRTGVQLEALARRRRQVQKAIENLLDLAEAGQCSAGLANRLALREKELEEIDTAAAQLRAERSVFTEKEILRYLQSFSETQLHDAAFRQRLAETFLQAVYVAPDTVVICYPYTAPQTPVTLDTVRRLLDDNAAAPMQPT

SEQ ID NO: 135 - protein, 446 aa, unidentified
  source 1..446: note = Bacteriophage uvig_225196 from the Index of /pub/databases/metagenomics/genome_sets/gut_phage_database (ebi.ac.uk)
MQVIRGAGYIRVSTTEQATRGLSLEAQEAEIRRYAKERGIVLVQIYVDRGITARKKLHRREAFAQMMRDVDAGLIDRIIVMRLDRWFRNVYDYHKMMNEHLIPHNVDWCAVKEDYDTTTTNGRLMINLRLAIAEQECDTDGDRIRDVQENMIQKGCWPFGQAPLGYRIVNKHLEKDPEQEECIRYFFEHMLLNGSLRAALFATNERYGTTYEYKRAQHLSRASVYYGEYGTNKSFCPAYITREEHERIRYLASKNIRVRKSPDKVAHLFSGLLICSDCGRRLSGQTIRRPSGVYVTYRCAHAYDNNGCPNTKSFSERIVENYLLHYMESELEEFIFTVEAESKTISLPIDNTEQIRAKQEKVKELFINDLIDLSEYKKRIDELESKIIVTAPKPRANTERLKKLLETNALSFYQTFTRDEKRAFWRGIIKELHIYRGTVQGPPIFL

SEQ ID NO: 136 - protein, 543 aa, unidentified
  source 1..543: note = Bacteriophage uvig_230928 from the Index of /pub/databases/metagenomics/genome_sets/gut_phage_database (ebi.ac.uk)
MPDNANCCWALYIRLSHEDGDKSESLSVSNQKLKLTEYIKKLDNNSIQKFYIDDGFSGTTFDRPGFKKLLYDIEHGLIKGILVKDLSRLGRNSPKTSYFIHDYFPAHKIRFIAIDDNIDKNFFDTDTSNDMIIDIKNLFNGFYPRDISSKVRSTFRAKQKAGHFIGAFACYGYKKSLTDHNKLIIDPAAADIVKKIFSMYLSGKGQNTIAKILNSDNIPCPSEYKKIQGLNYKNANRLTSTTYWTYSSIRSILKNEIYTGCMVQNKSFRMMCSKSASPLPPEKWIIVPDTHEAIIDKKTFDIVQSMLSNNVRQMKTSSHTHILAGLLKCGDCGRAMVKIKNKDKIFFVCGSYNRYGTDKCSSHKISESTILNIISDDFNNILKNTENFKQLLKNEPAYAVKTSDNSENNNYILNRLRQLNHKKMQFLENLNENLITHDEFETFVSRCNEQIYKLQEYLTPHNAYPKQSAPCKIHSVDANTPQPCNRKTDKQIYPKSLPDIIYEIIKKNRITIPDRIVVTQMVSCIYIYKNNRLKIIYNFDNDS

SEQ ID NO: 137 - protein, 551 aa, unidentified
  source 1..551: note = Bacteriophage uvig_197914 from the Index of /pub/databases/metagenomics/genome_sets/gut_phage_database (ebi.ac.uk)
MYNTYLTEIDFNVGIYIRLSQEDKDKKYESDSESVINQKELLRSYVKNNNFNLCGEYVDDGYSGTNFDRPGFQKMLEDIKQKKINCVVVKDLSRFGRDHVMTGYYIETFFPENNIRFISILESYDSFKNQASNDSSTFIIACNDYYSKQNSIKIRNVLNDKRKNGKFIGSGPSYGYMRDPLDKGHLIPNPETAPIVKNIFKWRAEGIGPTEIATRLNNMNVPTPAGYKKTNYSSRLIDRDSWNISTVKKILSNRIYTGDMVQHTQTKVNYKSKKKITLDESLWVIVEDTHEPLVDKETFKYVNSLGKRKTRNYSLKTERPKRILEGKIFCKECGNRLSVYYRKKLSYWSINCNRYSRDPKRGRCSSHFYPYDYLEEQILEQFNNSVSKFIKELDIGELNKEVQKNVHKETEDIDKKINDLLKEKEQIMNKLSTLYSDRCNNIISTELYKELSVESETKLKKINNIIEEEKIKKKNIKNKANILPDYTKKIKELLDLKKPKKELINTLIDKIVIDENRNINIIFKYDVMAEINFMYENRYLIRNPYGKNGKK

SEQ ID NO: 138 - protein, 437 aa, unidentified
  source 1..437: note = Bacteriophage uvig_148886 from the Index of /pub/databases/metagenomics/genome_sets/gut_phage_database (ebi.ac.uk)
MAENITKIAARPSLISKKRVCAYARVSSGKDAMLHSLSAQISYYSKYIQSHTDWIYSGVYADEALSGTKDERPNFQRMLADAKDGKIDIIIVKSVSRFARNTVTLLEATRELKEYGVDVYFEEQKIHTLSSEGELMLSLLAGFAQEEARSVSENMKWRIKKDLSEGIMWGGKSHLGYELIDKKLVLIPEEAKIVKRVFQLFIEGCGIQKIANSFNKEGIQPKYSDHWNKSSVRHILSNVNYTGDLLLQKTYRESYLTKKKRINKGEQDQFLVENDHEAIIDKDTFNLAQQLLAERGVLPKSNYIKGNKSIFTSRIKCGLCGASYRHKTTRYKKIWICHTYDSEGKENCSAKQIPEDNLIKAINQYLGIDSFSEDAFNKKIDYITVFPGNVLRIKRVDGNEDDITWNDPKRSEGWTPEMREKARQRAKAHYKKEGADE

SEQ ID NO: 139 - protein, 493 aa, unidentified
  source 1..493: note = Bacteriophage uvig_106050 from the Index of /pub/databases/metagenomics/genome_sets/gut_phage_database (ebi.ac.uk)
MSEKAVIYARYSSSNQREESIIGQIRDCRAYAEKLGLEVIKEYTDEARTGTTDRRPGFQQMIKDAESKKFTAVIVWKVDRFARNRYDSAIYKSKLKKNGVRVYSAMEAISEGPEGIIMEGLMESMAEYYSANLSENVKRGNLDSALEHKTLGKRIYGYRTATDGTYELDPDEAAVVKRIFDERVEGKTGADIARDLVHDGYLFLGKKFTKQAIYRILKSIKYTGTYIYKDYICEGGMPMIVDKSTYMRVQNMKKSLKPKAKETVIYNLTGKLFCGQCGGYMTGEYGTSKTNRKYYYYACRDCKKRVSKDVVENIIYDELAKRLSDDKLIELLAVRFEEHQKKKLNDNSVLDNLKTRLKETERGISNLVSAIEQGIITSSTKDRLVALEAEKDELIQSIKDEEVNSKIVITKEDFVYWSKQVRSNAEDKDKLFECFLNSAYLYDDHIVINSNLLGPSATIRAEQLNNSEFEYDASSPAYKYSFELMILSSEINL

SEQ ID NO: 140 - protein, 541 aa, unidentified
  source 1..541: note = Bacteriophage uvig_203979 from the Index of /pub/databases/metagenomics/genome_sets/gut_phage_database (ebi.ac.uk)
MQTAVIYARYSSDKQTEQSIEGQLYDCYNYAKQHDITVVREYIDRAMTGKNDDRPAFQQMLHESAMHKWDSVIVWKLDRFARNTIDSAVNRQILAKNGVKLLSVMESFGDDASGQMMTHIIEAINEYYSADLQEKTIRGMRQSAMKAQTTGHIPLGYKVVDKKLVIDDDTRIIPETVFRMYAEGERLTDIAEHLNSQGYRNRRGRPFTTNSFYNMLANEKYIGIYKYDDIVIEGGIPQMIPNEVFEAVREKLIINRKRAAKNTAKADYYLSGKLYCGHCGEPMSGLSGTGRNGVKHYYYRCNGVQKKSGCHKKLENKYLIEDEVCRAARSAFEQMDKAETAETICQMYLQTVRNEYAPDELEKELTECTKQAENVVNAIAQTGGNQLLYDKVRELEERKEQLSSALRLSQAMTDNVPSVEQITVFIDDILATDINTTEGKKSIADIMISKVYVYDDKLTVIFKDKDGKSVDIPLSAVSDSSSADCAPSALGSQAILNTNHRKGIESDICKTPARPMVSVVLCSFIFVFYVWKQGFRMLTFM

SEQ ID NO: 141 - protein, 555 aa, unidentified
  source 1..555: note = Bacteriophage uvig_75234 from the Index of /pub/databases/metagenomics/genome_sets/gut_phage_database (ebi.ac.uk)
MSEIKRAVIYARFSSDMQREESIDAQVRACTEYCRKKHYIVSNIYVDEAKSARDIVKRDAYNQMMVDAMSHKFDVIIFHKIDRNARNEFNYYTFKNTLDQLGVRYEYAVQNIDSSPEGQMMESVLVGMAAYYSRNLAKEVRKGLNENAYKALFNGGRPPFGYKIVDQQYVIEPREAEGVKMIFSMFLEGKGYAEITRALTEKGFVSREGKPFSKNSMHDILRNEKYKGTYIFNKSVTMKNGKRNTHPEDSPDLIRIENAIPAIISPEQFAMVAEICKNNRHRNGRYSAKESYLLSGKIFCGECGQAMNGHRMLGKMRKDGSRNIYTYYLCGNKKRTAEQGCSMKMINRDVIEDKVMEAIAEHIFSEESMERIGRNMSKAYEELIKSTGYRLTELTDARNAAERKLNNLYSLIEEGVADAFDIQRLSQVKKELIAIKKELEAIGKNSSLPKMSKSEIVDTLQALRNDIFIQKDELAKRQLINLFVYKVSVYKENIVIELTTDTISAGVVEMRGVEPLSENIAIQLSPSADDIFYFASQMPIDGRPSCYPKVFPKKL

SEQ ID NO: 142 - protein, 578 aa, unidentified
  source 1..578: note = Bacteriophage uvig_180737 from the Index of /pub/databases/metagenomics/genome_sets/gut_phage_database (ebi.ac.uk)
MDVVGYCRFSSEAQRDGYSIEAQVRAITEWAAREGHTIKKFYIDEARSGTNDNREDFQNMVADAASGTFRAVVVHKLDRFARDRYDSAVYRHKLKTHGVRVISVLEPLDDSPESVMMEAVLEGMAEYYSRNLSREVRKGKKEVALKAQHNGGPVPYGYRVDEQMRYVPIPEEAAVIREIFSRLDGGSSYADVTRWAISQGLRTRRGSYFNEAFIAHMTTNTMLVGRFSYGLRSKVGQEPIIIEDAIEPIVDANVFWRVHNATLARKRGPRPRVKEDDYILTGYLFCAHCGSHLFGFKSKKEYKSRNGADRLYEARFYRCARKDPMKHNRRHEPDVVLQRCHLRSIRKDVLETFVFSAIENVLFSQATMDWVVAELSVRLKQRKQNAQNNAADANAYRKELEKVRNQKARLLDLYLSEALDKATFALKSRELDSREGFLDGEIKRLSTPVSIFVEPDKIKTALEGFIKSPNADSSEYKKRLLATFVDSIAVSNEKIVIYFKFPIPGAGDKAERSFDDFVRKTTSVSTLEVCANISYKRMFSILYAPLSMFPLTILPFSCFKEPIRSPASRARVDGEQET

SEQ ID NO: 143 - protein, 441 aa, unidentified
  source 1..441: note = Bacteriophage uvig_354682 from the Index of /pub/databases/metagenomics/genome_sets/gut_phage_database (ebi.ac.uk)
MEMKNARLYARVSTDEQRKKEQSVPDQLEALKEYCEEHNYNIKGIYHDDGISAATIDKRKDFCRMLDDLQQNEVILFTKLDRFSRDLLDGNLLLKRFAPLNVSFKAILEPDIDVTTADGKFRFDLMVSLAERERKIDSERILFSFERKVARGEFLGGRLPIGYIKDNKRAVIDPEKAAFVKDIFETMEIEQNTFRVMKAMNHKYGLNKDKKYYYRKLIDQRYTGVYRGKTNVFPQIISPNQYDNVQSILQGRYIKRGPSRRDYIFSGLLLCSQCGRKLAGSATSGKYKIYKCSNLQKGEKMHCCFAEKKLEKKILPKIMPLLQKYLLDLEASEAKVSQNRDIIQISKQKINRLQDLYIDGKIDKDTFDRKYADLNEIISAEEQKSNIVSIQEAKQRYTQLLDMDIENIYSTLNDNEKRKLWHSFIDRIVIKSYDEIDIFLL

SEQ ID NO: 144 - protein, 515 aa, unidentified
  source 1..515: note = Bacteriophage uvig_292057 from the Index of /pub/databases/metagenomics/genome_sets/gut_phage_database (ebi.ac.uk)
MQYLIYLRKSRADQEAELRGEGETLARHEKALLELARHQHLPIADIYREVVSGETIASRPMMQQLLSEVEQGVWDGVLVMEVERLARGDTIDQGIVAQAFKLSDTKIITPIKTYDPNNEFDEEYFEFGLFMSRREYKTIKRRLNNGRQASVKEGKYVGNRPPYGYERIKIENDKGFTLKPLEKEAQVLRMMFRWYAYGAHGISTIADQLNEMAIPSKTGKQWVYPTVRDILQNPVYVGKIRWGWRGQRKRVKNGSVSVSRPRSDDYLLADGIHPPIIDQQLFDQVQKKFSMHKPLPTSAREMKNPLAGLVICAKCGAKMQRRPYQRENIRTGLICPNNKCRNVSAPFDDVEQKLIEALAEYIKEEKLRISNGHTQIDDSVLQILQNQLADLREETVDLNKQNDNIHDFLEKGIYDVDTYLQRSQKISSRITEIEEKQKTLQQEIIEENKRIESATSIIPMTEQLLLQYENMSALEKNSMLKEVLRCVKYERECSIRDGGTADNFTLYLYPKISHK

SEQ ID NO: 145 - protein, 511 aa, unidentified
  source 1..511: note = Bacteriophage uvig_181325 from the Index of /pub/databases/metagenomics/genome_sets/gut_phage_database (ebi.ac.uk)
MPKKETAVSQGLVAAIYARYSSHAQNDASIEQQIDECQEYARQHGYKIVGVYADRAMSGRSDRRPEFQKMMRAAEKREFQIVLAYKSNRISRNMLHALSYEDKLAQHGVNVVYCKEEFGNNAAGRFALRTMMNVNQFYSENMAEDIMRGLMDNANQCKVNGSLPLGYKRGADGRYEIDEQTAPIVQEIFRRIANGELKASIADDLNKRQIRTGTGGAWNKGSFHSLLANERYTGIYIYRDVRIPGGIPAIIDRELFEAAREREETMKTVVKSRRRRDDMEYLLTGKLFCGYCLEPMVGSSGTGKMGKMYYYYRCKNNAEKHTCQKKPVRKDAIEQLVVSSLKACITKPENIDWMTDLVMKYRSKIIAESDIGYLEDKLKENKTAIKNVMKAIEMGVVTETTKARLEELEAEQREVLSSLLAEKRSIPDVTRDHVQFFFESFRNGDVNSIKYQKTLIKHFLRAVYLYDDHIKITFDYDDSDTGVEIPLEDSSAESSEDTSVLIDSLGVYGRV

SEQ ID NO: 146 - protein, 523 aa, unidentified
  source 1..523: note = Bacteriophage uvig_568903 from the Index of /pub/databases/metagenomics/genome_sets/gut_phage_database (ebi.ac.uk)
MLAYHKVNNINAKVGIYLRISLEEGDKQESNSIDNQRKLIYEYLHKNNFVNMVEFIDDGATGTNFNRKGFKDLLNNIENGNINTVITKDVSRMGRNYVKTGYYIEDYFVNKGVRYISILDDIDTYNEVIGNELLPFRAILNDMYSKDISLKQKSSLKERKKRGRYIACYAPYGYKKNEQIVGKLDIDEDAAEIVKRIFKLFLEGKGTTSIARILTAEKVPTPAMHLNMNADKSSLFYTVWKGNSVRRILRNETYLGYMIQNKETTISHKNPTRVYLNKEDYIVIPNHHVPIISKEDFDKVNEMLDNNKRTSNNMKEKTLLHDLLYCDECNKRLARRDCKGKIYYFCATRTAFHLCDNSNYLSYINIEDEVLKYIKEFLKKYSDRNLLRQAYISEYSKNKTKIDDYNVTLSTLAKELLKINNKLDTLYNDKLNNVISADMYKKYSATLKEEQKNLQNKINEIKTYINKEEKILQSLNKDEKMIDDLISRFCDLKSINQDVIDEFIEKISIDKNRDFHIKLKFNF

SEQ ID NO: 147 - protein, 460 aa, unidentified
  source 1..460: note = Bacteriophage uvig_254684 from the Index of /pub/databases/metagenomics/genome_sets/gut_phage_database (ebi.ac.uk)
MNKSDLSSDASLRAAIYIRVSTEEQHLNGLSLPAQQQALEEYAQKNNYHIIGVYADEGISARKSMSHRKGLLRLLDDVKKNKVDMILVTKLDRWFRNIKDYNITEEILQAHHCYWKTIFENYDSSTANGQMVINIMLSVNQAECDRTSERIKAVFDYKRSQGMCVTGMCAPYGYLIENSYIKKDPAVQHIVEDAIEYYFTCFSIRHTVHYITDKYGDEAPSFYKIDKIFHNPKYAGIDVNGNPYCEPYMTMEQYKILLKSRQAKSWSSSGYTYIFSSLITCPICGCKFSGRQRKRTRQDGSVYCDIRYNCVGKFKYHPGASLRESSIEEYLLKHIDASVESALIEYDLAAAEKSKPVKTAQAYMDERDRLNTLFQKGRISEEYYEAEYQRLSDAILATDEKASIERRKKLINLSQKFNGDWKSIYLQLDNAHKRAFWKQIIENINVDPKTRRISGIKLLI

SEQ ID NO: 148 - protein, 547 aa, unidentified
  source 1..547: note = Bacteriophage uvig_368674 from the Index of /pub/databases/metagenomics/genome_sets/gut_phage_database (ebi.ac.uk)
MARKSRKNITVAQTKPENMSIYIETAQYIRLSVEDSHNKGNSIENQKMILDDFIAQNGNMRLAGIYIDNGATGTSFHRPEFQHMIEDIESGKIDCVIVKDLSRLGRNSIDTGFYIDTYFPEKKVRFIAVNDNFDTDTPSNGDKMLLYIKNIINEAYALDIGKKIKTQARQAMRDGQYVSARPKYGYLKDPNDCHKLIVNPETAPVVKLIFELFNGGMSTNEICLQLNARQILTPGAYGYQKGYITSKKSIGNGLWQTMTVRQILTHEIYTGKLVQGRSDSLAKKQTAVDKDEWIVVPNTHEAIISQDMFDKAQERMEQLKNKHSKLTIIPYTENIWKGKIFCGECGRALHRGREKRVKTGYAYHLHCLTRVRYNRDGCDNGSILEKDLLNVVITAIKSQASVLADRKNLIFYSLNDKKEIEAQQAELKNLRAYISKNRNFLNSLYENLVNGIITQEEYQEMRKSYGDKISDTMKKITEVENRRLKLEKSYNRYCDLSNAVSDIAENNTLTKELIDKLISRIDIYKGKRVEITYSFDNEFESEAIANG

SEQ ID NO: 149 - protein, 550 aa, unidentified
  source 1..550: note = Bacteriophage uvig_538311 from the Index of /pub/databases/metagenomics/genome_sets/gut_phage_database (ebi.ac.uk)
MAKQTIYNAGIYVRLSQEDMRAGESLSIEHQKLILTKYVREQGWNLVDTYVDDGFSGTDFNRPSVQRLLSDAQTGRINLIICKDLSRFGRNYIEVGQYIDYIFPLHNIRFIALNDNVDTANRDSNAMEMMPVINLFNEWHASSTSKKIKAVNLANAKAGKYTCANAAYGYTKADDEKHTPIIDPEAAEVVRRIFKLRSQGMSPRAIGDQLNAENIPIPSDYRCQKKGIVNTKYTRHLWTQVQIRQILDNPIYLGKLAMMRVTSVSYKNHKKVRKDPSEWVVTEDTHEAIISQELWDKVREAEKAVSHGKRDGKGVTQPLSGMLFCHDCGYKMKAAGRKRTLKSGELIRECYYNCSSYVLHGKELCSTHYISQKQIEAVIIADIRSMAELVVKDEQTARAAFLSKKEQQTSRQSKADIKKLNDSKHRLAELENLMQSVYEDKVMGKIPEHICVSFLEKYEAEQQELRAVIADLEERLSAEKQDREDVEEFIRRLKKYVDVQTLTRELGLELIEYVTVGAYTPNEPREINIYYKFLDKPLNDKKTLYSDENA

SEQ ID NO: 150 - protein, 552 aa, unidentified
  source 1..552: note = Bacteriophage uvig_131471 from the Index of /pub/databases/metagenomics/genome_sets/gut_phage_database (ebi.ac.uk)
MARKSRKETAAVAVQEADAACRAAIYVRLSVEDTHTHSVSIETQQMIIARYLEQYPEISVYDTYIDNGATGTNFHRPGFQQMLSDIEAGHVNCVIVKDLSRLGRNTIDTGYYIEQYFRIRNIRFIAVNENFDTAAPEDAHSGIIIPLRNMINEAYALDIGRKIRAQQRQAMKDGKFIGARTPYGYLKAEDDCHQLIIDPVAAVVVQRMFRWASEGAGLNTIAVRLNEAGILTPSHYKKMQGKITHENLLGSGKWQTRTVGVILRSEVYTGDLVQGQTKTVDHRQVKADAEEWTVVRDTHEAIISREQFAAVQEILNQTASRAKAREVKSYTQNILKGKVFCSHCGGSLHRQRNIRKKSDDVYLYHCLSRSRISKDACPGVTIREDALLDMLADMLQDALDTALGQYTLSLAELPRQAADRAELREKFTSRKQEIQRLRGIVRSLYENLVQGVLTKDEYFDYKEKYESHIADLAVEMEQLEDGLRTMDTQIEQHRALEQDAAQIKTDRALTGALIERLIDRIEVSHDKQITVRYRFQSEFETYAEVLEQCRNM

SEQ ID NO: 151 - protein, 445 aa, unidentified
  source 1..445: note = Bacteriophage uvig_435486 from the Index of /pub/databases/metagenomics/genome_sets/gut_phage_database (ebi.ac.uk)
MQNVRIYARVSTAEQKKKDISIPVQIDACRRYCTDHNYNIVGTYIDNGYSASSIKKRKEFKRMIEDVRRDEYILFTRLDRFSRNILDANKIVEALDKKNVSIVSIFEDDINTSTADGRFMFNLRVSLSQREIEKDSERILDVMQAKVAKGEVLTGRLPVGYKIENKKPVIDENQVEMVKDTFSTYIDTGNWDVAARILSKKYNTYISDTKVRGIIKNRRYIGEFRGIKDYFPRIIDDETFFEANNISKNKYVKHSKNEVTYLFSGLLRCEFCGRRMASSHRKNLSNSNYYICSRRENGKTAQHFAKSERKIELALLNEFEKLLNDRILELDKAERKRNTLSEDNISKIKNLKTKMKRIKNLYIDGFISENEFKSKYSRTEKELLELEMNCSTDIEQKRERYQYILDNKILTLYKTFSREQKAIFWRTIIDHIVVHKDDSLDIFLR

SEQ ID NO: 152 - protein, 531 aa, unidentified
  source 1..531: note = Bacteriophage uvig_136059 from the Index of /pub/databases/metagenomics/genome_sets/gut_phage_database (ebi.ac.uk)
MLYDIKSVDLENIIIYLRKSRSDDPSMSVEEVLASHERQLQEYSKTMFGEKIPEEHIFREVVSGETIADRPVMKEIMKLLETGMVKAVLVIEPQRLSRGDLEDCGRIVNTFRYTNTLIVTPPKTYNLSDEYDRKFFEMELTRGNDYLEYTKKILNRGRYASVKQGNFIGSIAPYGYKKVKNVSSHSKSYTLEIIPEEADAVKMMYHLYVDEGFGFARIARQLDELGIKPRHASHWSSSALKDMIENPVYIGKIRWNWRKTEKIMVDGQIVKTRPKTKDPSQWIYVDGKHEPIIDEETYNKAIGKRRINVSVRKSKEIVNPFAGLLFCGKCGKAMSYKRTYNRKKDGSKAYCLSMLCNDQAVCKTKSVKYDALEDRVIQVLKDSIADFELKLENDDGNAHKIQMDLIQDLQNTITNLKQKDARQKDAYEDGIYTKQEYAVRNAKVQEEIAEAKKALANAQNTLPPSVDYNEKIIKFTDCLNAFQSPDVSPREKNNLLKACVSKILYYNDGVSKVGIGRHVENKFNIEVTLRL

SEQ ID NO: 153 - protein, 507 aa, unidentified
  source 1..507: note = Bacteriophage uvig_279733 from the Index of /pub/databases/metagenomics/genome_sets/gut_phage_database (ebi.ac.uk)
MKKYVIALYIRLSLEDFKTDSLSISSQRMILQEHAAGLEEYGNAELMEFVDNGYSGANFERPAVQELLDLVRANRIDCIMVKDFSRFGRNSLETGYFIERVFPIFHTRFISVSDDFDTKKLKGDTGGMEVAFKYLISEYYSRDMSVKTKTAKYMKMRRGEYQSKICPYGYCKGDNNRMVPDPETSCVIQMIFEYAASGMNSAQIARELHSQAIPTPGEYKALKGQKYHDVSRTNGVWSNSTILRLLADERYIGTYVIGKKTVTEIGGNRMRTKDESEWIKIPNHHTPLVSKELFEKANASIKRFKIPKRKQHSYPLRGKVFCGSCKHAMHRSNETIYRCRFSYMDSSQPCYGMTIRESELESIVYEFLCKQFEVSLGIDGPNELKPVDKVAVRRAEFDNQIFELQEEKRKLYEALVIKQIDVNLYKEQKALIEQRLLEVQNTKAVVMTRLEAEQQEKERQHQQKDVLQSLVENKGLTSELVDMLIEKIFIYPNKRVEIVLKIKNDLA

SEQ ID NO: 154 - protein, 522 aa, unidentified
  source 1..522: note = Bacteriophage uvig_58086 from the Index of /pub/databases/metagenomics/genome_sets/gut_phage_database (ebi.ac.uk)
MGKVRIIPQTINPLTQVKIGTIKKKKVAAYARVSTDQEEQESSFDAQVQHFTEYIKSRDDWEFIKVYSDEGISGTSLKKRDGFNQMVADALDGKIDLILMKSISRFARNTLDLLTTVRKLTAKGVEVFFEEQNISTLDGGGELFLTIMSSIAQEESRTISENVKWGKKESYKKGNVSFAYSRFLGYKKEDGKIVIDKEQAVVVKQIYQWYLRDGLTLTAIAQRLNENSVKTPGGKNNWTVNNITSILTNEKYKGHAILQKTYCDNFLTHQMKKNTGQMPKYHVEDSHPAIIDEDTWNEVQLEIQRRREIGSCYSSTDVFSGKLICADCGSFYGAKLWHSTSKYARTVYQCNHKFKHKCRTPHLEVKFIKEKFIEAYNMVMIDKESLIEDTKEGITVLCDFVGLDGRLVELQNEMDIVSELSNKMIIENMHKLQSQEEYTKKYEELLKRYEKANVEYGRIQDEKLHKIGLSQKLESFIKDLENRPVSIDYFDETTFRFMVESVKVSRDKKLTFKFRNGKEIEV

SEQ ID NO: 155 - protein, 446 aa, unidentified
  source 1..446: note = Bacteriophage uvig_564581 from the Index of /pub/databases/metagenomics/genome_sets/gut_phage_database (ebi.ac.uk)
MRCALYIRVSSDEQKRNGFSLPEQRHALMQYAKEKGYTIVDLYADEGVSSSKNPQRRHEFQRMLSDVKKGKIDIIVFLKLDRWYRNVGDYYLTQAILDQYGVKWECVVEKYDTTTRTGKLGLNIKLTVAEDEAANASERVKFVQAGKVRNREPITGNQPFGYKIETIDGVKRIVKDPETQAECEDMFETFFATGSGGATSKYINAKYGRSLAENAIPRRLKNPFYTGEYRGVPDYCPAYITKEQHARILAIFAKRTRSTKRKKVYLFAGLIKCPVCRRTMVSCTMNKKTLGYRCRHHYMNKCTFVHTITEERIESFLLENIGSMLEQYLISYKEQNKAKKKPDPRKLEDRLSRLNNIYMMGNISDSEYTKKANEITAQIAAIKCANSNDLPIPEESIKLLSDKRFATLYADLPRESRKALWMSLIDSIEVEGLYPKQVFFIGQESL

SEQ ID NO: 156 - protein, 530 aa, unidentified
  source 1..530: note = Bacteriophage ivig_3762 from the Index of /pub/databases/metagenomics/genome_sets/gut_phage_database (ebi.ac.uk)
MKKQLNLYGHYCAYLRKSRADRDNMYATDEDVLARHESILADLSKRLGIVIEKTYREVVSGDTIAARPEVQQLLEQVEDGLWDGVLVVEVERLARGDSIDQGTISRSFALSHTLIITPNKIYDPDDEFDSEYFEFGLFMSRREYKTINRRLNRGRDQSAEEGKYIGNKPPYGYERVKLQGEKGFTLSPDPNKADIVRMIFDMYVKGEDSGSTGVSKIVRKLNAMHIPAAMGGDWTTSTVQDMLSNPVYIGKIRHKWRPAVKSVKDGVLSVSRPRDKERVTIYEGRHPGIISPDIYAAAQEKRKKNPGKTVPSRYIIQNPLSGLVVCGKCGRKMIRRPYKPPQKDTLLCYHTNCSQIGSPLYLVEQEILNALRAIVDDTINPSISLPETSDNTLKTKLKILNEKEKELDDLQLQKDRIYNFLEQGIYSIDEFRERSTRNTDEMEKIQTTVEVLKTEIKKLNSYQKKKKEFIPRCEHLLEHYEELTVEQKNDCLKELLDKVEYDKNERNKHGEGDKPNFKLHLYPKFFSDNY

SEQ ID NO: 157 - protein, 484 aa, unidentified
  source 1..484: note = Bacteriophage uvig_580293 from the Index of /pub/databases/metagenomics/genome_sets/gut_phage_database (ebi.ac.uk)
MKSSSVALYLRKSREEETETREATLARHERMLTDYCRNNGLKIVKTFKEVVSGESLDSRPQARAMLAEVADGHFDGVAVIELERLSRGNQIDQVEILETFKKSNTKIYTLNKVYDLAGDNEFDEEFFEFGLFMSRREYKIIKRRLIRGKKQAQKEGYYIGSSLPYGFGKVRGDKGYILTPNDETPIVQLIFQKFVYDDFSLADLRHYLDNNGIKPHRATAWSSAVLKKILKNKCYIGYINYNSRSTRTQECYKGKHDAVIDDETFERAQAKLAQSSHKLKKGTELKNPLASLVKCSECGSTLQRCNEYMRCLTPNCPTVLSYFDDVEKRLIDEITTELKGFKYYIANYGEEIERQRITRDKELAILQKEIDKRNGMLNKACEMLEIGVYSNERYIERVNILESEIKAITGQMTALSAISTDESEKAKKAIPILEKCLSAYWSLSAQDKNDMLKCIIDRVEYSKLQRSNRWHKVDSLELKIFLKL

SEQ ID NO: 158 - protein, 512 aa, unidentified
  source 1..512: note = Bacteriophage uvig_584862 from the Index of /pub/databases/metagenomics/genome_sets/gut_phage_database (ebi.ac.uk)
MNVVLYLRYSSDKQSEQSIEGQDRVCSAYCQANDMKIVGKYIDRALSASRHTEKRDEFLRMIRDSEKRTFDAVVVYKLDRFSRDRYDSAIYKNRLKRNGVRVISATENISDSPEGIILESVLEGMAEFYSKELSQKVSRGMNETALKCNSCGGHIPLGYKIESKKFVIDPSTAPIVKEAFERYAAGETVAEICDAFNNKGFRTAKGSAFNKNSFANMFANERYIGVYRYKDIRIENGIPVIIDKKLFEEVQRRLKKNACAPSRGKAKVEYLLAQKLFCGHCGGLMTGECGTSKNGDKYNYYTCSKRKRFHSCDKKNVSKEQIEEFVATKTLELFTPQKIDELADIAVKQAEAEAQENTVVPVIENEIKELEKSINNLLKLAERAPDSEALVNRLKELEDQKKAAERRLADENSKVLVLEKPHIVWWLNEFAKGDIHDEHFKRQIFDMLVNSVTIWDEPDGWKITIVYNLLSDVPRTFRCSDLTATGSPLQYNPNTILFLGHVMVYTTKYRTN

SEQ ID NO: 159 - protein, 492 aa, unidentified
  source 1..492: note = Bacteriophage uvig_195589 from the Index of /pub/databases/metagenomics/genome_sets/gut_phage_database (ebi.ac.uk)
MSYLWGLVVAIYLRKSRSDIEDEKKALARGEVYDTLQRHRKELLTFARKNKLKIVDIFEEVVSGDTIEARPEVQSLLENAKNGKYDGVLVVAYDRLGRGDKMDQGLIEKTFKESDTLIITPKTTIDLNDEQGEMQADFEGFLSRMEYRKIKGRLRDGKIRAINEGRNISAAAPIGYYVDNEQKLAIDPKEVHIPRMIFELAIQGFGCVQIANQLYEAGIRHRTGNPIGEQTVRHIIGNPKYIGTQFYSRYSKKPTFAPNSHTPIVSEEVFNEANRMIKIRKPSHNPASFPMRNPLSTILRCSKCDSAMVLRRYIVKGKEYNYYYCRKNYCETVSAGMDEVIDDLVKKLNNTLSNVAVEYEEDENSLLPTLENQLSQAQKKLKTFETKRDNIHDLLEDGTYTKDTFIDRLNKVEMEEQQVLDTIASLNEKIALEREKDSNLNRTLPAISNALEVFEQCDARQKNILLKSFIDKIMYTRTSKKEDFKLDISYHQ

SEQ ID NO: 160 - protein, 510 aa, unidentified
  source 1..510: note = Bacteriophage uvig_27141 from the Index of /pub/databases/metagenomics/genome_sets/gut_phage_database (ebi.ac.uk)
MIENYLDKIKQRLNVVVLHAVVYTRYSSDMQRGESIDAQIRLIRKWSDEHSIVIDKIYADEAQSAKSDERKQFQQMIADSKKQKDWQLVLVHKLDRFARNRMDSAAYRVELRKNKKYLISTTEQFDDTPESCMLEGIIESMAEFYSKNLAREVMKGLTENALKGKTCGGTPPLGYDLDERKYYKINEFEAQAVKLIFQLFLEGKTYGEIISKLNTSGYRTKCNRLFSRNSLYEILRNEKYKGILVYNKTQSRDEITGKRSGHRYKSDEEVIRVDGVIPQIVSPEDWDDVQLILNSRKKAFRNNAKETYLLSGKIRCGKCGGSYDGRRSFNSCGTKYIYYACNGKRNPNYKCNNNSIQRDWIESYMINIIDNYIHHLSKAQKQNIYQLCFDSVQSSKKADISILNQRLNSLNKELSRIVDVITITNSPTLIEKLTDLEQQKAEIQLRIKALSQEKGKILSKQKINLLLTKIKKMLKEKSVPQLKELMDLIVNEIIVNEEDVIVYLNIPITK

SEQ ID NO: 161 - protein, 547 aa, unidentified
  source 1..547: note = Bacteriophage uvig_173343 from the Index of /pub/databases/metagenomics/genome_sets/gut_phage_database (ebi.ac.uk)
MEKKMWKIEQKVTEISKRRRVAAYARVSVESERMQHSLSAQISYYSSLIQKNPAWEYAGVYADYGITGTKIIKRKEFQRMLADAEARKIDIILTKSIQRFARNTVDLLKTVRHLKEIGVEVWFEKENIRSLSGDGELMLTILASFAQEESRSISDNIKWRFQKKYEKGIPHAKFFIYGYRWKDGELVIQKEEAAIVRRVFKGYLAGKTRRDIQRELANIGAHTMYGNLFQDSTIKQMLQNPVYKGNLVIQKTFVIDPITKHQVINHGEKDKYVVENHHEAIIDTATFNQVQKEMAWRKEAGRQRGGYARNFLNISCFTGIIKCGICGKSYIHNIRKYKGKPSEYWSCLSNKGKAEKRCGAYGAIPQPALERACMSALEMATFDKTKFLQKVEKIVVPAYHSLLFYLKDGKVIKQSWKSTALKDMWTEKRKEQVRQRMVQYRKSGLSSRYSAFSERIFCPTCDVKFVRCLETRKNRRVAYWRSRNKHKCVHTSGIQEDWLKKTAAALLGESTFDEQKFREQVEWIEVQKNRTLLFRFYSRENKEVQLP

SEQ ID NO: 162 - protein, 494 aa, unidentified
  source 1..494: note = Bacteriophage uvig_9846 from the Index of /pub/databases/metagenomics/genome_sets/gut_phage_database (ebi.ac.uk)
MKKKGVLYTRVSSDPQEEQGFSIPAQEKFGREFATKENIEIVEVFSESHTAKQAGRPEFNNMLAFLKKHKDVQHVIVEQTNRLLRNEYDSAIIINLATTTDLTFHILKDHLTLNKNSSPMDFFMFTMNTAISAIYPRNLSRDVKKGMDEKAEEGYYPGRAPVGYLNFRESKKKSILVIDNTKADFIREVFRLYDTGLYSFQTLADKLAKDGFYPYKRPCSKNNVEDILKNPIYYGEFIYKGRQYKGVHEPIISKELFKSVQRRIESAGSPAKTLHDFLYKGLIKCSFTGQILSGDKKTGANNSGEYIYYRCTHKCPCGKQCKALKSEYVDEFVENIIKQIELTPEQINTVIEKIKEKYKLKNDYENTTIENIQKEVLTLKTRLNNLYIDKLDGKITEEFYSEKYRNWHAQVEEKEIYLKNILDGDKFFIQKANDLLELSKNAYKWYFQQNKENKRRYLKLICSNFFYDGENLTIAIKNTFKPMLESANFSNGGR

SEQ ID NO: 163 - protein, 512 aa, unidentified
  source 1..512: note = Bacteriophage uvig_278778 from the Index of /pub/databases/metagenomics/genome_sets/gut_phage_database (ebi.ac.uk)
MKRITKIDAAAKETKKLRVAAYARVSTDSADQLISLEAQKEHYEQVIKNCPNWEFAGLYYDEGVSGTKMAKRDGLLRMLADCERGLIDYILVKSISRFSRNTVESVETVRRLSAMGIYIFFEKENIDTGKMEGELMLSIMSSLAEDESRSLSENNKWSIQKRFQNGTYVIGTPAYGYKNADGKMVIDEEKAEVVRRIFDSVLEGKSGGTIAKELNAKGIPTARGVQWRSSVITAMIRNETYTGVAVFQKTYKDDQFNSHVNHGERGMYRIEGHHDPIVSEEVFLAANTAVDNNAKEKGVVRNSGKYSVRYALSGKIFCGECGGKCKRKKIYGDIWYGCETHARESKKCRQLPVRADMVEAAFVNMMNKLIYGRDAVLLPMSGRLLGGGDKEIIDRLAEINTELDAVAERRQAADKFFAKGLLDAAVYREELDELARKEKELHTVRAGIEGDPNLDSDRQRALNELLRYTAKAELLTAFSDEVFTKHVDRVIIFSRKEVGFAMKCGPVFRERI

SEQ ID NO: 164 - protein, 515 aa, unidentified
  source 1..515: note = Bacteriophage uvig_178349 from the Index of /pub/databases/metagenomics/genome_sets/gut_phage_database (ebi.ac.uk)
MNIEYSGLVADAYCRYSSKMQDDGNSIEYQIAEIEEFCIKNGIKIRKWHIDKAVSGKKVAGRDQFYNLIEDVKAKKINALIVWKTNRAFRNSYESHKYRKVLRKYGVKLISATQIIDEDTSTGRLTTNILSDIDQYQSEVIADHVKSAMREMVRRGFYTGQTIPYGYKVEDTNDNGKPRKKYIINEEEAVYVKRIFEEFANGLTIAHISRWMKAEGLKTRRGNVFDYDALRKMLKNDFYIGTRRYTVKELDTIEIENAVPPIIDERTFDAVQHVFLSRKKDTKPRSGKRTYGLTGKIVCAYCNEKFYGKAYANSPYYHCKNKVKKKTCDCKSIRKDKLEKKVLQEIKENILNAQSIEFIAEKVLKEIGSMPTQKVDRKELLKRKETLLREIKELVQLKLDGLINAEALRDMQMEKNGEIADIDLELALLEDREEKNIDKEFIVNYLNDLISYSNSDNDEILKVLFDKTVDKIVISNSGVELHLAVFFTKYTHKTDLAFPKFALSRDISRYDINKL

SEQ ID NO: 165 - protein, 539 aa, unidentified
  source 1..539: note = Bacteriophage uvig_286852 from the Index of /pub/databases/metagenomics/genome_sets/gut_phage_database (ebi.ac.uk)
MENVKRVYCLYRVSTVGQVEKDDIPMQKQFCREFVNCHSGWHIENEFYEKGISGYKVSAKDRDAVQEIQRDAVQGKFDVLLVYMFDRLGRRDDETPFVVEWFVRNGIEVWSAVEGQQRFDNHVDKLLNYIRYWQASGESIKTSVRVKTRMEQLTQDGLFTGGSIPYGYRLEKRGRINKRNREVCDLTVDDDAAKIVQLIFYKYVHEGYGAQRLCRYLTELGIRKADGRNFPNTTINRIIKNPIYVGQLHNGDATSERIPELQIIDQDTFDAAQQLMAARATHHADTPLNMKGQSLLVGNIFCGHCGNRLTLATSGRKAIQKDGTVRREIRCRYQCHYNLRHPGECDGQSGYGVTKLDGIVEKIIRHQFAQIKMASQDDVIAQQHEKAVELARARCNMAEMQLSEKRRELEDYQKEIIKVIRGESRLNVDLLNELIDKTQTDVEALPQTAEAARQELESRTADMETEQQEYDKLKTWADLYDNCNFAAKKMIVSQFIKSIHVYRDYTLEVEFNVSFEQFQQLQAACSGGANERTNVCIKA

SEQ ID NO: 166 - protein, 537 aa, unidentified
  source 1..537: note = Bacteriophage uvig_452261 from the Index of /pub/databases/metagenomics/genome_sets/gut_phage_database (ebi.ac.uk)
MLRQTTRNLITALYPRLSHEDELQGESNSISNQKRILETYAKQNGFSNLQWYTDDGYSGANFQRPGFQAMLADIEAGKVGTVIVKDMSRLGRNYLQVGMYTEMIFPQKGVRFIAINDGVDSAMGDNDFTPLRNLFNEWMVRDTSKKIKAVKKAKGLSGKPVTSKPVYGYLMDDDENFIIDEEAAPVVKQIYQLCLAGNGPTKIARMLTEQQIPTPGTLEYQRTGSTRRYHPGYECKWATNTVVHLLENREYTGCLVNFKTEKPSYKMKHSIDNPIEKQAIFENHHEPIIDLQTWERVQELRKQRKRPNRYDDVGLFSGLLFCADCGHVMYQQRYQTDKRKQDCYICGSYKKRTADCTAHFIRTDLLTAGVLDNLRKVTAYAQKHEARFVKLLIQQNEMGSKRKLAAAAKQLEQVQSRIAELSRYIKRLYEDNVNGKISDERFMEMSADYEAEQRELKDRAAALQGELDKAQEATVNAEKFMSVVRKYLSIEELTHTLLREMVEKIVVYECEYDENEVRRQRIDIYYSFVGKIDLPEE

SEQ ID NO: 167 - protein, 490 aa, unidentified
  source 1..490: note = Bacteriophage uvig_70560 from the Index of /pub/databases/metagenomics/genome_sets/gut_phage_database (ebi.ac.uk)
MNKRVAGYARYSTDNQTENSIEFQMRCIEEYCQKNNLNLVLRYHDDAISGTTMERPAFKQLCRDASQHLFDAVVIYDITRGSRDVSDWFAFRKAMDLLGVEIISTQDKLGDIMNPNDFLVELLGIGIGQHHVLQTRQKTIEGTTQKALEGKFLGGIPPYGYDIVDQEYVINETEAKNVQMIFEMYADGYSYADIIEKLHGALGKRGKPFGKTSLYSILRNDRYTGLYTWNRRNVKKLGKWAGGTPNSNIVQLENKIPRIISRELFDAVQMRLSKNNHRTSSDPVAPKSAKRTYLLSGYIVCEKCGCNYVGHTTHSHGYKNAYYYCGTKYRTRNCDAPNLPAERIEKWVIEQINVFLLNFSDAAADRILEEMKKRMNNCDSEKNRLREIELKLKNATDAILSGITYPELMEEIKSLRQERAELEATIARASSEKVPVTKKDIMNAFSERLDNENVDYRQLMRKYVISIKVNERQIKLSLGVVHFASSGNWI

SEQ ID NO: 168 - protein, 517 aa, unidentified
  source 1..517: note = Bacteriophage ivig_2547 from the Index of /pub/databases/metagenomics/genome_sets/gut_phage_database (ebi.ac.uk)
MASVTKLTKPQSKVQATLQVAAYCRVSTNSDEQEDSLANQQDHFKSYIQQQPNWLLHKIYYDNGISGTKAQNRPGLQALLKDCQNGQVDLVLTKSISRFSRNTTDCLRIIRQLKQLDIPVIFEKENINTDSMDSELILSVLGSLAQDESQSIAHNVRLGYQQRASNGVFHYSLPPYGYQKDANRDLIIDPIERKVVLRIFNWTIEGKSPGQIAQTLNEQAISTKRNGKWHDSTIRGILQNTVYLGTTEFQKTFTDDEYHRHPNQGEQGKIIIEEHHPAIIDQATFTQVQKIIMLKRKFYPQAKAKPQRHTFSRKIYCGNCQKLFKRQSRSGKVCWGCQTHIKSAKDCPVKSIREDALHLAFCTMVNKLIFSQKFLLEPLVEQLQADQNQEQAAKLSQVETELKEAKDKQDNLQQLRKQELIEKDFFTKQDAELEQEIANLQSEIERLKQLLGDQNSKLPLTHELLKLCQRSNYLTAFNAELFEQIIESITVDQDHNLTFHLKCGLNLTEGSKHHVKA

SEQ ID NO: 169 - protein, 500 aa, unidentified
  source 1..500: note = Bacteriophage uvig_443823 from the Index of /pub/databases/metagenomics/genome_sets/gut_phage_database (ebi.ac.uk)
MPKGIRAAIYARFSSHNQRSESIDIQVEKSREYCAENGLDVVRVYSDYAQTGRDVQRVEFQRMMADAKLGLFDYVVIYKVTRIMRNRDEMALARIRLRKAGVEILYAGESLGEGSTRVLNLGMLEVLAEWESAIDSERIRDGINKNAQRGMANGRTHYGWDIVNGYYEVNEREAAVMHRMKNMLFAGSTVAEIKRAVVGERGKRGKPLTHGVITKLLRREQNCGVYDYAGVRIEDGMPALWSREDQDMINSILGSNGRKHNKTRDTNDYPLSGKMWCPECGQYYVGTCGTSKTGRVYHYYKCKKCKRTFRRDAVEEAVLDTVLETIKKPDVRQRIVDVMALYNEMNEEKEEPESKRIEREIRRIDTSFERIWQAIEDGIAPPGGKERVAMLREQKAALEADLRQAQANEGANLSGEAIAAWLDHIAQEPDAAEIIETFVRLIEVDGDELKLYFAFDYWGDDFQPKQKKANPEKGSPNNPMVETKGVEPSASAMRRQRSPN

SEQ ID NO: 170 - protein, 565 aa, unidentified
  source 1..565: note = Bacteriophage uvig_268778 from the Index of /pub/databases/metagenomics/genome_sets/gut_phage_database (ebi.ac.uk)
MSQISQIKKIYHAAIYVRLSKEDGAVASHEKTESNSIANQKSLIRDFLKNKNDIEVVQEYVDDGFSGSNFERPAFQMMLEDIKKGKIDCVVTKDLSRFGREYIDSGMYIERLFPAMGVRFIAINDGIDSGEAKSQSDEIIIPFKNLINDAYCRDISIKIRSHLEIKRKQGDVITAFVPYGYKKNDKDKHKLEIDVYAANVVKDIFRMKLHGKSQDAIACELNSSGILPPAEYKASTGSNYQTCFKTKEKSEWTSVMVRRILTNEVYIGNLVQGKQTTPNHKVKKTIIKEKCEWIRIEKNHEPVITDRDFEVVQRLLAMDTRTSPDREEVYPLSGVVTCGGCGIPMVRKTSKVGGKTYAYYLCATHKDSKQCSSHRISTDKLEEVVLELLQTHIDNMIDLKRILSFIGNVPFQQLDMKKLEERREKKQAEVDRCADLRGMLYEDMKDGIISKEDYKELHTAYEQRKKSAEIAIHQIELEMEDVLNRKSKGFVWLDYFTEHKNIEKLTREVVVSLIREIKVFDKTHIEVVFDFDDCYKECLNVIASQGHSVDVDSTGKLNIRLKEAV

SEQ ID NO: 171 - protein, 649 aa, unidentified
  source 1..649: note = Bacteriophage uvig_579415 from the Index of /pub/databases/metagenomics/genome_sets/gut_phage_database (ebi.ac.uk)
MISQRAAAYCRLSKEDGDDEISQSIENQKQLLEEFAKKNNIIIDKFYIDDGYSGAKMSRPAFNQLKDDLNSDKVDLVLAKDLSRIGRNSPKVQLFLENIIEQEKRVIAPGNNYDSLNEQAQEMVGIQTWVDEKYVRDVSRKVRGAIDTMQRNGKYISCVPYGYYIDPFKKGVYYVDETCAMYVKEMFDMYLNGFGVRAIAKEFTIRNIPTGSMITKQRLERLGKPYKGTASNRWYPNVIMDMLKNDFYIGTLTLGKTKRRSIHGKKIKQPEEKQYVFENAHEPIVDKETFQLVQNTIANRGVTNFRGRRIQTRPNIFVGVLYCAKCGNRLTSAGKNKNTRYVCSLYNTHGTDFCSSHSITERDLKEALIYFLEHCKENLSEAINDLDNIIHKDSQKSEDNIIEVLEKDIARVEYEVKILLEQKMRETMKNPSMISMIDEMYEKMLEEKYDGLKSLKTQLEDKKSNMFDDNSIYKNLTSAMDIMTKIIETKDITKRQIATIVDKIVVHEDGGLDIYLKGNLHELCTNYVQYKMTDKEKILAATLDYIKTTPDYIIPTAAWKYSRAQGCRVGYPNYFRVFSILIKAGYVVKNEGYNKGYRLNRPFKTLYDDFKNNNIDYDTSLCKNNNVTLKNIKDICKWVQSLQYKKKLF

SEQ ID NO: 172 - protein, 555 aa, unidentified
  source 1..555: note = Bacteriophage uvig_465509 from the Index of /pub/databases/metagenomics/genome_sets/gut_phage_database (ebi.ac.uk)
MDEARLIFPFSLKEREIEMKKRVYTLYRVSTKGQVEKDDIPMQKESCRNFAESQGWEIVKEFSEKGVSGFKKSAKERDELQKIQQAAMEGKFDILLVFMFDRLGRRDDETPFIVEWFTKQGIEVWSVNEGQQRFDTHVDKLMNYIRYWQASGESLKTSVRTRTRLEQLTGEGHYTGGTVAFGYKRVRLGRVNKKNQEVCDLVVDEAEAEIVRLIFHKYVYEGYGAQKLSHYLYEQGVVGRNNKNIPNTSIVRMIKNKGYTGYLINGAVETECPQLRIIEPELFEQAQELRQARTCERGGTSLGTSSKALLTGLVYCGHCGNRLSLTSSGRIHTYADGHTVKEVRPRYSCFYKIRHPGDCDGQSGYGVSKLDSIVEEVVRQIFAQFREVSRKKLLESVKTNDAARIQKKIKKIQKDLEAKQKELDDLKAETILVIRGVSALDKELLGTLVAEAKDALETLEKQLVQAQEEYEEATKTAKRSNYICNELFTWADVYDTANHDERRAILQQFIKEIRVRKDYEISITLNASFDQVEQLKAVSTYDGAEIFEEISAKGA

SEQ ID NO: 173 - protein, 546 aa, unidentified
  source 1..546: note = Bacteriophage uvig_539852 from the Index of /pub/databases/metagenomics/genome_sets/gut_phage_database (ebi.ac.uk)
MVQEKLRAVFYARVSTEEERQLNALEKQVAECKDAVLQKGWKLVDQYVDEGKSGTQIKRRDEYKRLFEDLENDKFDIVVIKSQDRLQRNTLDWYIWIDRLTTHGKRLYMYLEDTFYSPDNALISGIKAILAEEYSRELSKKINNSYKRRIEAAKNGEKISIVNNSRSLGYDKVNGELVINEKEAEVVRMIFNMYASGEGLRAISNTLYDMGYRNRSGNEIDPTTISRMLSSEKYKGVYVINQRHYDFDTKKTVLNPKSEWVHIPGAVPAIVEPELWDRVQEIKGSKVQSIKNEKRGRNCGKSIFSGKIYCAKCGAKYWRSLENGYVKFKCSSYSKYGKIPGKGCDNKSFSENALYSILQSLSEQIVEINTAEVRKSLLNWLKSLRERLRASQGDDTIKEEIRKQTARKEKLTDAYMDGIISKEDYSKRYKELEKTLEDLKDKLLTLEVNEDLQSIEEVIQNIDKEMEEYLQTQSFNERRVEFLNQHLTKVTVNKDSFLLEFDLIGGAILTGKDFYLFVDNPRGNCKSSKGFVRCTGSLVCDCNLWK

SEQ ID NO: 174 - protein, 501 aa, unidentified
  source 1..501: note = Bacteriophage ivig_4470 from the Index of /pub/databases/metagenomics/genome_sets/gut_phage_database (ebi.ac.uk)
MHGEGETLARHEKILTDLAFGMGIVVEETYREIVSGESIAARPEMLRLLDDIENDKWDGVLVVEIERLARGDSRDQGLLLETFKYHNVKIITPLKTYDPNDEFDEEYAEFGLFMSRREYKTIKRRLVNGKKAAAKEGKFVGALVPYGYEKIKLDSDKGYSLRPVPREAEVVRSIFEMYTRGTVETKGRPVGMQSIATILNDLHIPPQKSDRWAPSTIRGIITNCVYAGKIQYGRRSLGKSVHNGVVTKTYPVNKDYPIYNGIHQPLIDPETWLLSQKIFADRTCVPNFRKYELQNPFASLLRCGECRRSMTRRPLKSGTNRAWIICKTHGCPTVGADLDDVEKRIIDSLAQWLHDYKLELSCTETFTGISPALLTNALSEKQRQADDLKKQLDHVYQLLETDVYSIEVFRERSGTLTDQLNGVKLDLEDLEGQLKKQADREKRRALLIPKFEGLLDHYWELSAGEKNDLLSEVVERIEYFKSSRGTKRTVPDFTLKIYPRL

SEQ ID NO: 175 - protein, 477 aa, unidentified
  source 1..477: note = Bacteriophage uvig_590420 from the Index of /pub/databases/metagenomics/genome_sets/gut_phage_database (ebi.ac.uk)
MKIAAAYIRVSTDDQIEYSPDSQRKAILDYAKRNDYIVPQEYIFVDEGISGRSTKRPAFQQMIGTAKQKSHPFDAILVWKFSRFARNREDSVVYKSMLRKQCGVEVVSISEQIGEDKTSILIEALLEAMDEYYSINLSEEVVRGMSEKARRGGTLGRAPFGYTAKNGELLPNEDAKTVQWIFNAFLNGTGMRTIATQLNSSGIRTAYGKPWENRTVEYVLRNITYAGHQHWTPGGTKDMKHAEKIKRNTIVKNNAHTAIVSEEQFAAVQEKIAENKRKYKKHEQPEVGIPFLGKGLLRCSDCGGALCMLGRGNGIQCHNYAHGKCNVSHYIKLEYIDKMIVDKIKSDVEAQNFRTILIPENAAESQEMQDNKRALERARKKLARVREAYENGIDTIEEYRQNKARIQKEIEELEAKPAPPKETQESAAEKLRQRILSNVTLLESDAPAGLKNDMLHTFVSRIVFDRKSTRVKVEYHG

SEQ ID NO: 176 - protein, 440 aa, unidentified
  source 1..440: note = Bacteriophage uvig_271148 from the Index of /pub/databases/metagenomics/genome_sets/gut_phage_database (ebi.ac.uk)
MIQKKITTIDAAPRLERLINVAAYARVSSGKDAMLHSLAAQITYYQNLITSHQGWKFAGVYADEAFTGTKDNRHEFQRLIQDCKDGKIDMVIVKAISRFARNTVTLLKTVRILKSINVDVYFEEQNLHTLSAEGEMVLTFLASFAQEESRSVSENMKWRIKKDFEQGLIWGSKPQLGYRIVDRRLVVVPEEAEMVRRIFSLYLDGYGFQGIANLLNAEGQTSTLGNKWSKTAIEAIINNYNYTGDLILQKTFRVDHLTKHKKLNRGEKAQYLVEDAHEPIITKEQYMMAQTLKKQRAQHFNLLDMTKQINLFTGIVWCGACGKHYRRKKQERRMWWTCSTFNTVGKEFCDSKSVPEEVLIEITKKVLGVKEITAEIIKSKVDHIDVLKGNRLVFHLKNGSTIEETWKSLSRKDNWTPEMKEKARQRAIAQYRRKEGKHNG

SEQ ID NO: 177 - protein, 553 aa, unidentified
  source 1..553: note = Bacteriophage uvig_373577 from the Index of /pub/databases/metagenomics/genome_sets/gut_phage_database (ebi.ac.uk)
MQMIPIDLSALTASEQRQFTENPSVLSTDCDVVCCLYMRYSSDRQTEQSIEGQLRELLTFCQQHRYRVSAIYVDRAISAHASMEKRPAFQQMLSDSSRAAWKTVLVYKLDRFARNREDAAVARMRLRKNGCNVESAKESISKNPEGVILESILEGMAEYYSLELSQKITRGMRESALKGQAVGGSVPLGYKIEKKKWVLDPLTAPLVSEAFTRYADGETVADICSDFNARGYRTAKGAQFNKSSFKNIFRNEKYIGVYKYRDIRMEDALPRIVEDDVWRKVQSRLKVNEQAPARGKAKVPYLLAGKIFCGHCGSPMVGECGRGKGGKTYNYYSCANRKRNGGCDKKPAPKDWIEDVVANDAINVLTDEVIEYVATTAAQQSENEIQQNTNIPALQAQIAETDRKIKNLLKALEAASTAPDVLVARIADLESQKKGLTAQLFEEKKSVIPLTKEMVVYFLESVRSQVLDLETQKPMLFSLLINSVTVYDDEPGYMKFETAYNLTQIPAKTYRVPTSGICKCSDMGLISPPLDANPNTITVFGMIFVQTRKHALP

SEQ ID NO: 178 - protein, 403 aa, unidentified
  source 1..403: note = Bacteriophage uvig_217517 from the Index of /pub/databases/metagenomics/genome_sets/gut_phage_database (ebi.ac.uk)
MRSDSELSSHIHAVFDETQLTLLSQNIRRSFDEKAKRGQFFGSMPPFGYKKDPNNKNHLIVDEDAAPVVRTIFEMAAAGSTYMQIAQHLNSCGYLIPSEYKKQQGYKVNGMYDRHMKIGKWTRDMVRTFISNEVYIGTVVNHKSTVLNFRTKKKGNVPKSEHIKIPNMHEPIIDINLWNTVQKLRQTRCKASSGKDGKKHPLSGKVYCEKCGSKMYKCKSGGISYFRCYRASSTGECDNHKRIRLDMLEKTIIDKINETISQYVNQDELSENIVIINRLDKKLESLKNQRFNIEKSLETTRKNLLNLLKSYNDGVVIREIYEQAQNDYMEQQNATKTKLKNIDIKINDVQIKIENQEDKEEILKKYTHIDKLTIPIVQEFIDSIFISEVTKDGQRNITINMAI

SEQ ID NO: 179 - protein, 537 aa, unidentified
  source 1..537: note = Bacteriophage uvig_581095 from the Index of /pub/databases/metagenomics/genome_sets/gut_phage_database (ebi.ac.uk)
MQNKQAVIYARVSSREQEREGFSIPAQLKLLKEYALKNGFQIVNEYSDAETAKKAGRTNYNAMLAFLKENPEIKTVLVEKTDRLYRNFKDYVTLEDYDLEVHLVKEGSIISKNSKSHDKFIHGIKVLMAKNYIDNLSEEISKGLHEGLEQGYWPFQPPYGYLRGAKKNLIIDKSRILFIRRAFELFATGKFSLRKLCEELFVEGYYYKAERPKITQCVLESMLKNVIYVGQMNCNGIIYQGKHPAIISREIFDKAQLAFHKVDKSKVRKNFDFLYPGIVKCGVCGYSFCGERQKKHNIYYRCSHFDRSCPNTCYISEKHLTQSFRMHLKRIGLDEDLYELVKYSLKECLGDEQEYHKTEITRITSEIEQCKEILKKMYLDQVNNVLDYNMWINLKNEYEVKLNRLSAEYQKHLYANTNFLDTGLKILDLCRKASLPATELSAEEVANIIRETYLSATAKDKRVKVVFKEPFATIENLVKLAKKEISEVGFAEFKSAIISSKDKCIKSIKKEPVGSDFNCSSCFKWWRLGDSVLLVRI

SEQ ID NO: 180 - protein, 557 aa, unidentified
MIKKRAYIYTRVSTGMQVEGYSLAAQEERIKQYANAFNIEIVQTYQDAGRSGKSILGREQFLEMLNNIESERDNIDCVLVFKLSRFGRNSADTLKSLEIMENHNVHLICVDDGLDSSKDAGKLVITILSAVAEMERENILAQTMAGRKQKAREGKWNGGFAPMGYSISQGVLQINEEEAELIKMIFDLYANTDMGSNKVAQHLVKLGVTKPIRQNGKTPYFSANVIRNILKNPVYNGKIAFGRRTSKFDSKTNKIRIVPSDSYMVVEGQHEALVDDALWEKTQAKLKAQSKKYEKVNRPKGEHIYLLSGIVKCPYCEASLYGNISKKKNKNKDGEYYKHYFYYSCKHRKMMDGHKCTFTKQIKMEALDREVLTIISKIVSEPSFAKKLQEKINIQIDTEEIDKILEQYETQLRKYLSTKLSLMRQIDNLDYEDRHYNQKFQDLNERLDSIYDMIEEVESLIEENKERKEVIQREKMTAENVYSILLKFETLLAVMEDIDKKRFCQLLIEKVVIRDEKNDSGRWVKSIIFKLPIIEKDLEISLDNNEHVECVALLVKN

SEQ ID NO: 181 - protein, 576 aa, unidentified
  source 1..576: note = Bacteriophage uvig_460604 from the Index of /pub/databases/metagenomics/genome_sets/gut_phage_database (ebi.ac.uk)
MARTRNRQMKQAEAFVQASPQKIWKAGIYTRISVDINGEKRESLETQKLIALSYAESHPDIEVVKFYKDDGISGTKFDRDDFVRMLGDIKTKEINTVIVKDLSRFGRDLEEVSKYLEKIFPFMQVRFISVNDNYDSISPECDNQMLGIMISNLANDMYAKDASVKMTSAMKIKMESGEYCGGDAPYGYKRAKDEKGKSTTVPDPLTAPYVVEIFEKLAAGQSYLKISREFNTMLLASPRVYARTGKLFLDRIDETDMHWQSSVIKQIAENRHYLGNTYSHKTRTSLLTKEKNVMLDKEEWIEHVNTHKAIVSAELFEKVQNVIKLKQEKALPKKDLSNMQTHGKQDNKYVGLIYCGDCGANMVRRYYYSEKNGVLYYNYYFICGNYAKISKEKYNCNRWKEEVIDELVYRALIMQLKTVCELKTQLKRFNDEYFETFQKYLNREQSKIVQLNKRNEARRFELYEQYVSGEIDTDAYNRMTERIIVVEKDLVTRQKEIEKSRKITEKLCKKNFSWLAEFSKGKNLEFLTKDVVRSYIKKISLYEDKRIEIEFKFQDEIQALSEILEEGVIRCQMVSA

SEQ ID NO: 182 - protein, 516 aa, unidentified
  source 1..516: note = Bacteriophage uvig_200966 from the Index of /pub/databases/metagenomics/genome_sets/gut_phage_database (ebi.ac.uk)
MQKNNNIGNRCVIYARYSCSNQTEQSIEGQMHDCEQFAARNNLQIVNSYIDRATTATTDKRPQFLKMIADSKQCVFDVVLVWKLDRFSRNRYDSAMYKKKLKDNGVRVMSAMENITDSPEGVLMESVLEGFAEYFSKDLSQKVKRGMRETAAKHKITNRIPFGYCKSEEDTYIPDPHTANAVCKVFDMYITGFRKSDIADWLNSNGYKTSYGNQFTLTAITPLIKNTRYIGKYYYADNEYTDETQRIVTDDIFYKAQQKAIANQHGGSCKAIERYLLSNKLYCGYCHNKMIGECGKNQNGLAYHYYTCVGRKRKHICNRKNIKKKDIEQYVINAISCLLNDEYAINKIIETAINYQQNDVEHINEIKDIESTIKEIERKISNILSAIEAGIFTDSTKNRLQELENQKTRLTQELNYKNQSSTKIPRTTLKQILKNLDLSEAATNPEKQNIIDLLIHRVYLWQDKILIVFNQSNLCDNEISVDDTDVNTIIKTLSEPNASSSDSVEYGTPDQSRTGD

SEQ ID NO: 183 - protein, 480 aa, unidentified
  source 1..480: note = Bacteriophage uvig_540211 from the Index of /pub/databases/metagenomics/genome_sets/gut_phage_database (ebi.ac.uk)
MKIGALYIRVSTDDQLEYSPAAQQKLGLDYAKKNGIVIPKDFIFVDEGISGRKVKNRPAFQQLISLAKSNEHPIEVILVWKFSRFARNQEESIVYKNLLKRAGVELVSISEPLPDGAIGQLVERIFEWMDEYYSINLGVEVLRGMSERARQGGCNVSPPLGYKMEDGSPVIDPEQAIIVKKIFDFFVNDKLSFYDIAVKLNSLGYKTKRGGKFQNRTVAYIVRNEFYDQQLVWNKTEKATRKLKDSSEWISVKGDYPRIISHELWEAAQERDKATRRPRGSRPASTYRHWLSGMLVCSNCGGKLVRVGTNKSGNTYFQCTNYNHASCSESHSTNARVIQSAILESFKDVISSGNVVYNATATKKDDSERALIEDSIKKISFKEARIKQAYRDGIDTIEEYKENKRILSEEKANLEQMLSELKDDNAEQTLLLKKIRSAYDIIASDETSETQKHEALTSVVQKIVFNKKEEKFTLYYFINY

SEQ ID NO: 184 - protein, 482 aa, unidentified
  source 1..482: note = Bacteriophage uvig_533354 from the Index of /pub/databases/metagenomics/genome_sets/gut_phage_database (ebi.ac.uk)
MQTAAAYIRVSTDDQVEFSPDSQMKAIQKYAKDHDMILPQDLIFADEGISGRHAENRPAFQRMIGLAKTKPKPFDVILLWKFSRFARNREDSIVYKSMLRKQCGIDVVSISEQVGEDKTSILIEALLEAMDEYYSINLAEEVRRGMQEKFSRGGVVSQPPYGYRMGDNVFVIQPDEAEIVRKIYHDFLSGAGRREIAVELNALGVVTRKGRPFDNRRVEYILSNPVYTGMLRRSKNGRQSSGDPFNQREDMQVIPGNHEPIIDRETFDATQKRLKEAKRLYVKHAHTEGRPFMLKGVVRCSNCGSTLVMAMRNTSLQCHLYAKGQCDVSHAISIAKANTAVLERIKEDLRLGAVGVNVENQHKKKKPTVDATSMLLQKEKQKLERIKEAYAAGVDTLQEYREQKQKITARIEELSKSATVEYHTPEQVSREIVKRIQASLEMLEDAAVSEELKNQAMRVLVEKIIFNRKKNLFEIVYRDPFA

SEQ ID NO: 185 - protein, 503 aa, unidentified
  source 1..503: note = Bacteriophage uvig_424088 from the Index of /pub/databases/metagenomics/genome_sets/gut_phage_database (ebi.ac.uk)
MLRAALYGRFSSDNQREESIMAQFRDSEEYCKKKNYCIVARYADEAKSGTTTVGRDRYNQMLDDARRGLFDVIVFHKVDRNARNEFDYYMTKHKLQQVGVRYEYSKQDINATTPEGQMMESMLVGMAAYYSRNLSNEIKKGLRENVLQGKHAGGPVPYGFLTDENKKYIINEKEAPAVRMIFNLYVAGVHYGTIRKKLFNAGYRNRAGREFTTAGIYEILRNRKYVGDLYLGKTLFRKGKRNSHRTSADVRYYENVIPAIIPRSLFMEVQEKMNRNRRRTGSGNAKTVYALSGLIFCGRCGSAMVAHSTKNSRGVKNYYYRCPKGRLVGDEKCHQKFVNRDKIEAAVYNLIRDTFTSPNAHDRIKEVISKNKIKINPEDYTEQIKRLKQQEAADVRSLDRLYDIYMAEQEDEFTISKMKKLKEGILRLRNQIEELETRQKIVQSEKFDIDRVIDTFQKQLKQKQSPEFIQTLFQLAIKSVTIYPDKIQVALLVTQERFELPTP

SEQ ID NO: 186 - protein, 463 aa, unidentified
  source 1..463: note = Bacteriophage uvig_334631 from the Index of /pub/databases/metagenomics/genome_sets/gut_phage_database (ebi.ac.uk)
MAQPQTALQRVALYIRVSSDEQAERGDSIRDQKERGTKYIDDHQNMILQDTYIDDGVSGQKLDRDDFTRLIGNVKAGLVDLIIFTKLDRWFRSLRHYLNTQVILDKYNVAWTAIDQPYFDTSTPYGRAFVAQSMTWAELEAQNGGLRVADVFRSKVEHGEVITGKVPRGYMIQNKHLVFSDEAPAMLDSIQYFHREQGLAKTVNYMRETHGINMSIQNLKNSILRNEKYTGRYRGNENYCPRLISDEMYQDIQRVLDNNSTIRSSQKYPYIFSGILICDECGHKMSGCHINVVSRRTSGKVYRYKYPAYECLQYRAYKKCSNGGEIREIRIEEYLLEHVREELSGYLVDFETGEAKRIDNRAKKNKIRRKLDRLKDLYLNEVINLEEYKKDRAEYEEQLAALPDMEQPIKNLKPLKQVLDCNFEIIYNNLNNEEKRAFWRSIIKEIRVSKSIGRNRKYQIIFL

SEQ ID NO: 187 - protein, 519 aa, unidentified
  source 1..519: note = Bacteriophage uvig_80185 from the Index of /pub/databases/metagenomics/genome_sets/gut_phage_database (ebi.ac.uk)
MEQYCLYLRKSRSDQEAEARGEGETLARHEQALLKLAKHQHLNVLTIYREVVSGETIAARPMMQQLLHEVEQGVWSGVLVMEVERLARGDTIDQGIVAQAFKFSDTKIITPMKTYDPNNEFDEEYFEFGLFMSRREYKTINRRLQRGRTASINEGKYVGNIPPYGYQRIKLENDKGFTLQPDPQEAEVVKMIFQWYAGNSGEQLGPSLIAQRLDQLGIKPRKNDTWSEATIRGILINPVYIGMVKWQTRAQVKKSINGTVKKTRPRNHHPLLIKGLHPAIIDEQLYDQVSNRLACYAPAPINRSQTIQNPLASIIVCAKCGHKMIRRPYVNKPSMLICRQPNCDNIGASLELVEKMLLAALKEWVKDMKVSTDTLDLQPVNTLSLKNNQLTIISNDLKVAYTQMDRTYDLLEQGVYSTEKFLERSNALSEKIQSLQTQQKQLEVEIKKEEEEVAQRSTYLPKIEKLVDIYWAIDEPGARNDLLKEVLDHVTYSKEARMKKNHSDAGFTLKIYPLIMPKK

SEQ ID NO: 188 - protein, 537 aa, unidentified
  source 1..537: note = Bacteriophage uvig_538824 from the Index of /pub/databases/metagenomics/genome_sets/gut_phage_database (ebi.ac.uk)
MASQTRKVKRNGAQIKRAIAYARFSSNNQREESIDAQLRAIREYCEKNGIVLVDVFTDEAISGKTDNRDDFQKMVKGVLKGRYDVDAILVHKFNRFARNKYDSALYKKRLREIGVRVVSVTQKIDDTPEGELLEGFLEVIDQYYSSNLSVEVRKGLKENALKGKHAGGQVLFGFSLDSEGYYIPNENAPIVKRIFEEFAAGVPKSEICERLNKEGCRNQRNKPFNTRTLYDLLRNEKYIGVYEYTIDRTETIRLENVIKDPIIDKRLWNTVQQLNHEGSTKGRYRKQKRYYHLTGKAFCSCCGSPISGAGSKRSRNGTLNYYYKCVGKVKHKNGCDNPSLNKDWFEPRVLKSVVNAVMTGEQIKHIAKLTYQELEEMREKPLVDVNTLNKELDSIAKKQEMLTDLLLEGQIDKDMLNTKNASLNQRKFEIQEELEKRKMIVDSDNVTEEMIVQYIQEYVEYLKTTYTAEEEFMRAVLNEFVEKVEVDKENITVYILCEFSHMDGGDNEWFSGASHHLPPAKMKRRFSRKRNIRNKNS

SEQ ID NO: 189 - protein, 519 aa, unidentified
  source 1..519: note = Bacteriophage uvig_390438 from the Index of /pub/databases/metagenomics/genome_sets/gut_phage_database (ebi.ac.uk)
MNTNQIPVVSYSRFSSDMQHETSIEAQQDAINKYAAANGYTIIEDYVDRAKSATTTAKRDEFNRMIEDSKSGKFKFVIVHKFDRFARNRIDSTIAKAILEKSGVRVLSVLEPTSDTPEGELMEGMFELLAQYYSSNLGREVMKGFKVRAGKCLHNGGKPPIGYDVDPVTEKLVINESEAQTVKTIFQMYIDGHGYEDIINTLNKRGSRTKNGNEFGKNSLHDILRNKKYAGYYIYNRWDGKHNRHKEKSPEEVICIENGCPAIISEEMFNKAEKVMEQRKMSPGAKSAVKTYLLTGLIRCGECGNLMSGTQRKNGKGYMYRSYRCKHKNMVHHCSNKEIRADKIEEFVLLQLQKYIFDDKNITAIVDEVKKQLIQHNAYVVEELRENERALKRLQNRRQNIINAIADGLMQDDFKEVLAQLKNDEKILLERQQELTIRNPDAAFTEDDLRSMISEFSGYVLNRDIPECKKFIAQFVKQVTVYNTKIEVTLRVASILLYGADYTITKSIGRTFLPTPELQ

SEQ ID NO: 190 - protein, 494 aa, unidentified
  source 1..494: note = Bacteriophage uvig_91735 from the Index of /pub/databases/metagenomics/genome_sets/gut_phage_database (ebi.ac.uk)
MKELIPAVIYARFSSSGQREESITGQLRDCKRYAENHGFEIINEYIDEAKTGTSDNRPSFQKMIKDSESKRFNAIIVWKLDRFARNRYDSAIYRARLKKNGVKIYSAMENISDSAEGIIMEGLMESMAEYYSANLSENVKRGNRESALQLKTLGRKIFGYGRSEDDHYIINETEAPVVRRIFNEYTSGKSIQDIIKGLNNDGIMNSRNNPWNKSSLKNIIGNDKYIGTYRFMDYVVPDGMPAIISKDMFSIAQEIKDRHKKSPARSREARYLLTGKLFCGHCGSPMTGEYGVSKTGKKYHYYRCIKANKHKCDKKRAKKDWIENVVVAELLNQLNDLTYIDQLADRFMEYQKKQQSDDSELKVLQDRLHGVNKSLGNMVKAIEMGIITPTTQARMEELEEQKQQLHTAIEQLKFSKPPMIERDEFLFWIDTLKQDTGNYDFKEKLIDIFLNAVYLYDDGYIDIGTNLIKGTKRVDSSTLEQLCLLNHPFQYELE

SEQ ID NO: 191 - protein, 605 aa, unidentified
  source 1..605: note = Bacteriophage uvig_188377 from the Index of /pub/databases/metagenomics/genome_sets/gut_phage_database (ebi.ac.uk)
MKNTKKIVSLILAVCMIASLAISASAANTVDASGGTGTSSVTLSSTADGSLDGDPSATTKWSVGEYNRLSKEDGDKPESDSIQNQHSINQKHLEYLREHGEQIESVTVYSDDGYAGGSFNRPRYQDMIRDIERGKINCIIFKDNSRLGRNYPELGRLMEDYFPQKGVRVISVLNNLDSVKDPRGYCSAIVSFSNIVNDDYIRQLSIKIKCTLAMKRERGEFTGNYAPFGYQKDPTDHHKLVVDEEQAEIVRKIFDWYEGGMSANSIAKRLNAMQVMTPGDFKIRDGCKSFITHNQKSSKIRTWAVNTVATILKNEVYIGNMVQGKHKSASYRSKKMVLTDESEWTVVEGTHEPIISDEQFAIVHERYARRTRVAPEQTHTYILSGLIACGQCGHTMSRVVSQGYARYRCLTRTYAPDKCQCPSVKEDYLEELILQTVQSQIQRLVDVKAVIDAARQFKSSSGAKNEYMLALNKAKREQERLQDAQFHLYDDLQSGLLRREEYVRFRERYEAEIAAQETKIEQMNQSLLQLKEARQQDDAFVSFFQKYGNIERLDRDTVNQLIQKVVFHDKQNIEVYFRFADEYEKLCSFANTIQEQTTSQFAAAT

SEQ ID NO: 192 - protein, 471 aa, unidentified
  source 1..471: note = Bacteriophage uvig_192283 from the Index of /pub/databases/metagenomics/genome_sets/gut_phage_database (ebi.ac.uk)
MIPAIVYARASTDHQEYSVKDQLKYIKDWAKHHGYKIIKVYIDDGISGAFVAKRPGFLSMIEDVTTNISGAKALLIWDSYRFARNMVEFLTYKQMIRQHGVSVIAVTEPIVEDEDAQLYIDAINGASGELYLRKLSKDSKRGLRAKVVERHEHLGFAPYGYRMDRNTGQLEIQPEEARWVQYIFQSVIDGAPYLQICEALRKAGVKTRKGCAWTNTQVKYTLTNKTYCGLLEVHLDGKHGVYDGKHEPIIDRETFDNVQTIIEERAAKHKKYARNTNKYKHWLSGLMRCPYCGGALSYVQGSGGRADRYRCNSRTDGKGCVNTSVKVNVAADFVLDQLQQIYDRPEILCTLKTTTPQPANRVDYDAEIKKLRGQLTRAKKAYMEEIDTLEEYRENKTRITAAIEDMETQKNAAAAGIIKFDPAAFQKKCLSALSVLQSDVDTEKKVAVSHNLIEKIDCDNLNKVLTIYFYS

SEQ ID NO: 193 - protein, 543 aa, unidentified
  source 1..543: note = Bacteriophage uvig_180924 from the Index of /pub/databases/metagenomics/genome_sets/gut_phage_database (ebi.ac.uk)
MAGQPKYNTALYLRLSKDDGTMSESSSIQTQKEMLTRYCRENGFAISQIYIDDGWSGTNTNRPSFQRMLSDIEDGKINCVVTKDLSRLGRNYLETGSFTEIYFPEHNVRYIAVTDGVDTAKGSTMDITPFKNLLNDMYAQDISKKIKSSLLTRQKQGKFIGTKAPYGYVKDPADKNHLLIDKRFAPTVRYIFKLAKDGIGITQIARQLRSEKVPRPVAAAAEELECYDRYLTTEESIYKWSMGSVREILRNPVYKGAVRGQKRPKISLKSEKRKPVQSAGTFVVEGMHEPIIDPEEWELVQRLITSRKKTRKVEKKYDNIFSGLVKCADCGFAMTFTKAHRNWNSENIYANYDYQCNNYRMEGKSVCTHHRITALNLYNAVLADIKRLACEALGDDKQMISAIAARLGKSEKENVRQAERELKRANKRLSELDRLFAKLYEEHVNGKVNERNYNSLSATYEAEQNELESRIAELNAAIKTERENDENAVNFVDLIKQYADIDELTQALLNTLIDRIEVHEPEDLDGELIQKLDVYYKFVGRLD

SEQ ID NO: 194 - protein, 499 aa, unidentified
  source 1..499: note = Bacteriophage uvig_129321 from the Index of /pub/databases/metagenomics/genome_sets/gut_phage_database (ebi.ac.uk)
MSAKTDHRPDFQRMIKDSAKGLFDVIIVWKLDRFARNRYDSAHYKALLRKYGVKVLSATENISEGPEGIILESMLEGMAEYYSAELSEKVIRGHTENALKCKYNGGTPTFGFIIDKEKCYQIDPHTAPVVLESFTRYADGATMKEVMQYLVESGFTTVRGRKIDLNFIARLLKNRKYIGEYSYRHIVTPGGIPAIVPQDLFDRVQQRLEANRKAPARHKAEDDYLLTTKLFCGTCGAMMVGESGTSASKGRKYHYYRCVNTKKHKTCNAKHKSVRKIPLENAVVSAVMAKVMNDDFVEYIADRVLEIQGMESSELPALRQQLAETERGIENMLNAIQMGIINQSTKQRLDELEERKKEIELRIIQEEIKKPMLSREDVTFWICRFRKLDVSRLEERRRLIDSFVNSVTIFDDYLLITFNYKDGETRLDFKDIESSDLQSVGGRDRLRVDIPFRISTCFVLLSIRYRRLPGMPSSGQQSSYATGTGKDSACGHTLSPAFR

SEQ ID NO: 195 - protein, 519 aa, unidentified
  source 1..519: note = Bacteriophage uvig_127383 from the Index of /pub/databases/metagenomics/genome_sets/gut_phage_database (ebi.ac.uk)
MFYAGVYARASREDGDRTESETLANQRELILNFLEKTDDIEVFDFYNDDNYTGTNFNRPAFQRMMADAYEGKINCIIVKDLSRFGRDYIDVGNYIQRVFPKMKIRFIAVNDNVDSFKRPEYDILMPVKNIFNEQYARDISNKIISTVRSKQHSGKFIGAFASYGYAKDPNDKYKLVIDPYAAEVVRKIYALFNNGMGKISIAKKLNDEGILCPSEYKKVSGQKYRNSKKLDRTSYWTYSTINHVLRNRIYVGDMVQHRANHSKFDYSGREVDKNDWIIVEHTHEPIIQRDIWERTQDLLKRRGRTLRLKDRVSLFAGYLVCGDCGRAMAKVEYKDQLQYICGTYKNCSSKLCTRHRINHDTLKNIIIADINLILSKVESLNEMIEDREQKNQGISTSDKKTQLNGLQIQLDKLKERKKSLYDDYKEGLIDKEEYIGYRNEYDGRISDTNTLISKLGEEPNEETSPSENSFISQLKNTSKVNDINRIILSTFYDKIVIYEDKKIELRYKHSQIIEHLKSL

SEQ ID NO: 196 - protein, 521 aa, unidentified
  source 1..521: note = Bacteriophage uvig_184013 from the Index of /pub/databases/metagenomics/genome_sets/gut_phage_database (ebi.ac.uk)
MDNKLKVVLYLRYSSHKQNEQSIEGQQRICEDFAKQQGYNIVDIYIDRATSAKTDHRPSFQKMIADAAKNQWDAILVYKLDRFARNRYDSAIYKTKLRKYGVSVLSAMENISDSPEGVILESVLEGMAEYYSADLSQKVTRGMLEGAHKCQTNGVRIYGYTETPDKHYAIDEHAAQAVRTIFKMYTAGEYPKEIIAYLKSNGYKTYEGKDFSYSKIQRILNDERYTGVYKFSDIVISGGIPAIINTETFNKAKQRAKANQLKKSTQKAKVKYMLTFKLFCGTCGAAMVGESGRSKNGNTYNYYKCSAHKKGSDCKGRTIRKEYIEDIVINEIYDNILMRKDIIEKIAVRISKIYIDEAKQNDNSEHLKKELAETEKSISNLLKAMEQGIITNSTKERLEELEYLKLDLKGALQKAAIYSAPKISKQEIVDYFSNIADGDKTDMKYRQKLVDMFVKSIHLYDDKIIIAFNYGAPTDDTDDDKKFKNKISEIPIDISECSDIKSTGTPSGIRTLDTLIKSQVL

SEQ ID NO: 197 - protein, 562 aa, unidentified
  source 1..562: note = Bacteriophage uvig_538870 from the Index of /pub/databases/metagenomics/genome_sets/gut_phage_database (ebi.ac.uk)
MATNKNIQGQEVKITALYCRLSQDDNLEGESNSISNQKKILMTYAKKNGYLHPQFFVDDGISGTTFNRPGFQEMESLIEAGKVSTVIVKDLSRFGREHLLCGHYTEIVYPTLGVNFIAIQENVDTTKGMGTEMMPFHNIFNEWYAAQTSKKIRAVNEMKASKGMRISSTVPYGYKKVEGNKEQWYIDEPAAEIVRKIFSLCISGKGPSQIARQLEAEKVLTPTAYFNSVGKKTSNPMPVNIYHWRENSIVHILENRQYTGCTVNGKSTTVSYKVHKTVERPVEDYQVIPNTQEAIISENTWLRVQELRKNKRRNTATGRKSLFSGLVYCADCGFKLHFCASKSLKKNQEFWRCSSYKDGRGTCTIHFIRDVVLETIVKEAISELADFVRCYNSAFLYLISEKKGAESVCREKSLRVKTESAKQRISDLDKLFSRIYEDNILGKLSDERYSRMANEYEAEQKRLISEVEENEKSLIELQKQTVDMKMLYQGLMEFTEMKQLTPTVVNKLIERIEIHNNEKKHSHNNVKVDIYFTAVGLFDIPTEQQLIDTMERVKQKNAEKSA

SEQ ID NO: 198 - protein, 444 aa, unidentified
  source 1..444: note = Bacteriophage uvig_254484 from the Index of /pub/databases/metagenomics/genome_sets/gut_phage_database (ebi.ac.uk)
MKRAVIYIRESTKFQDPDTQEKECRAYCKENDFQIVKTYRDIASGKKNDRKGFLQMLDDLDEDRFDVLVLWELSRSTRDFITYKTLLDTLIQNNKELHSLQEGILTQDDIDVEFSNDIRALINAHERKRVGRRIKFRKNFKTREGYWTNGQAPFGYKLDNGVLIPDEEEAPVVKEIFELFIAGATIREIGEKFNIPWRRISRVLTNVVYLGKLKVNETEMINDKRVRNKEVEIIEGKHAAIINEDTFSLANSLKRKKPNKYKNGKFILPNVYCWTGERMYPFTSLKQEYYSTKFSRHYVDREFLEKIVLDNILNFNFDTLNENMEVVDYTERREFYKKEVEKLKNNEKKLLKKYLDNVIGEDVFDNFMQENKKNIIEFEKKISEIEKLILNSSKKEDNAKLLKEYLKALKNTKDRVQLQQILNILISEIRLVNNFRCVVITTIF

SEQ ID NO: 199 - protein, 569 aa, unidentified
  source 1..569: note = Bacteriophage uvig_295592 from the Index of /pub/databases/metagenomics/genome_sets/gut_phage_database (ebi.ac.uk)
MSKKQIDIYRTGIYLRLSQGDEDIDGLEKKESNSISNQKLLLEGFIDAHDDLKLVDIFIDDGYSGSNFERPEFHRMMTSMKAGNLDCIIVKDLSRLARERIGADELIQKTFKKYNVRFIAISEGYDSLTASSSETHTIIPFKNLLNEQYNGDTSMKVRTSQGILRRNGLFIGAFAPYGYQKAEDNKNHLVLDPYAAGVVQGIFAKKLSGMSASGIAKILNKNCVLAPSEYKAKCGEKYSTSFKGAGQSKWSAQTVSRILKNVVYIGTLAQGKRTTVSHKVKKEIAVPECDWVVVENAHEAIISRMDFDAVQVLMSRDTIAVAGKNESYMYAGILYCGDCGSSMVHRKESYKGREYINYICSNYNRNGKDACSRHCIREEDLNQIVLGELQGYINSMCDCEKVLAHLDELNVNYDEAVAHDKEIVALKQELTKCSAFKASLYQDLRDEIISKEQFTRYREEFSAKERELEQAIREQETIIRDIYENGIAVAKDLEQFREGLVIGNLDRVALFSFIDRILIYDDFRVEIVFKYRQEMEKVARLFDVANEKNAEPVYTMVDGLPVLELKEAV

SEQ ID NO: 200 - protein, 540 aa, unidentified
  source 1..540: note = Bacteriophage uvig_280868 from the Index of /pub/databases/metagenomics/genome_sets/gut_phage_database (ebi.ac.uk)
MRKKANIAPEARAVIYARYSSANQRDCSIEQQVAKCRELAARLGLAVIEVYEDRAISGKTDRRPSFQRMMKDADRGIFDIVLAWKSNRMGRNMLQAMTNEERLRDNGIRTIYAEEDFDDTAAGRFALRNMMNVNQFYVENMAEDISRGLMDNASKCLSNGSLPLGYKPGEDHKVVLDEAEAAVVQEIFTRVACYEPFIDIARDLNRRGIKTKKGAEWGRSSFHTICRNERYRGIYIYRDVRVEGGIPRIISDELFYKVQEVLKVKKNPQGRRKRSGYEEYLLTGKLYCGHCGSPMTGIAGTSKTGAMHYYYTCQKRRTEHSCDKKAVRRDQIEKAVAVAIQQQLLDDETILWMVDQTMAYNAKTEIEYRLQGLQDQLNANKTATANLLKAIEMGIITDTTKARLLELEQEQGCLLAKIDAAKSEMVPIEREDLIAILTRYRKGSLDDKKYLAALFDTFLVRVDLYDDHLKITFDPTGGKTPVDIPIGVEDSPESPGDSPDSADFSAPSQDAEKVRFDSSQLHQNPRTFVRGFFVLVICLG

SEQ ID NO: 201 - protein, 563 aa, unidentified
  source 1..563: note = Bacteriophage uvig_428055 from the Index of /pub/databases/metagenomics/genome_sets/gut_phage_database (ebi.ac.uk)
MREVQVLQATKTAPNSRGRNSNYAVQIDRIRVAAYCRVSTDGDEQLGSFESQKLYYEEKIRKNKEWAMAGIFADEAITGTKIDKREGFQEMIRKCLNGEIDMILTKSISRFSRNTPDTIKYVRMLRDKNIAIMFEKENINTLDMNGEMLLTILSSLAQEEVESLSSNVKMGLQMKMKRGELVGFNGCFGYDYHQDTKTITVNETEAETVRLIYDMYLQGNGCGTIAKRLVELGIKNKRGTVEWHDHGVMGMIKNEKYKGDVLLGKTFTVDPISKRRLANMGEENQYYIRDHHEAIVSREIWDKAEEIRLKRAKPKLMQTTGNRERYTRQFTFSSMLECGYCGHKLSRRTRHQTTTTKKPVWQCMNATKNGIDNCPNCKAVDEVIIENAFLEAFRLLADSFDDVLQSVLNTIEDILKDDTELKRVKQLEKDISTIESKKSRLTDLLIDGKIEQEDYDEKKLSFQRKLHKITEEKAYLEENIGQQKNISRRMSQLRQTLENENALDEFDRIVFESIVEKVIVGGYDAEGNPTPYKLTFVLKCNQTLKVDNAKADYRANQKGKKVS

SEQ ID NO: 202 - protein, 513 aa, unidentified
  source 1..513: note = Bacteriophage uvig_565627 from the Index of /pub/databases/metagenomics/genome_sets/gut_phage_database (ebi.ac.uk)
MKRITKIEAADTGAVRKLRVAAYARVSTDSEEQLISLDAQKNHYEVLIRSRRDWEYAGLYYDEGISGTKMAKRDGLLSMLADCERGLIDYIIVKSISRFSRNTVESIETVRKLCSMGIYILFEKENIDTGKMEGELLLSILSSLAESESRSISENETWSIQKRFRNGTYKIAYPPYGYDYIDGEMVVNPEQSEIVKWIFAEVLSGSSTTHIANALNARGISTKRGGRWTGHTINGMIKNEKYTGDVIFQKTYSDDTFTRRRNNGERDRFFVQGHHEAIISHEDFDAANDMIARNATEKGIYADSRKYQNRYAFSGKIICGDCGAVWKRRKISGYFGYACTTHLEDKDVCGMKSIREDSIMAAFATMMNKLIFARDKVLLPFSNALKTAERAEYLDEFTALEEGLEKNLQKRQQITQLFTKGYLDPAVYAQQNDELLSASARLTAEKDAIIAKISGGSRQKKALEDILHYTSGASMLTEFDEDLFTRFVDRVIVYSRTEIGFDMKFGPVFRERI

SEQ ID NO: 203 - protein, 566 aa, unidentified
  source 1..566: note = Bacteriophage uvig_118880 from the Index of /pub/databases/metagenomics/genome_sets/gut_phage_database (ebi.ac.uk)
MAEKIMQGIKQISELIGQAVKKRVVCLYRVSTVGQVEKDDIPMQKQYCREFCRGQSGWEIVKEFSEKGVSGFKVSAKDRDAIQEIQKMALKGEFDILLVFMFDRLGRRDDETPFVVEWFVKQGIEVWSAMEGQQRFDTHVDKLLNYIRYWQASGESIKTSLRVKTRLEQLTQEGYYTGGRVPFGYQAVKRGRINKKNHEVRDLAIEPGEAEVMKIIFQKYVYEGYGALRLHRYLMDQGLRTKDGKTITMGIINRVIKNPICIGIIQKGESQSSVLPELKIIDEEVFARAQEIVRERVVPQSEVPLTTRGQSLLVGNVYCGHCGARLSLATAGRNYKKKDGTVVKKTYSCYKCYNKAMAAEKCDGQTTYGVSKLDNLVDQIIHIQLQRIQKAPPQALIEKQRDREAEQVKAKAKLLREQYQQKQRDYQDLKEETLKVVRGTSRLNVDLLNNLIEETTVQMAELEGQIRTAEAELREVLSGAEQVRQEYAQLMDWAGLYDNCSFEAKKMIAAQFVKAVRVKRGYEVDIEFNVSFEEFQTLYLEPESEEDRRSRSATYLSLVEKSGQAG

SEQ ID NO: 204 - protein, 528 aa, unidentified
  source 1..528: note = Bacteriophage uvig_124951 from the Index of /pub/databases/metagenomics/genome_sets/gut_phage_database (ebi.ac.uk)
MNNKAVLYLRLSKEDRNKVNKGDDSESIINQRIMLSDYAMRHNFQVVKIYSDDDESGLYEDRPGFSQMMQDAERGLFDIIIAKSQSRFTRNLEHSEKYLHHKLPLWGVRFIGVVDGVDTMDENNKMTRQVKGLTNEWYCETLSKNVRSVFLSKMNQGKFVGSSCPYGYMRDSEDHNHLIIDEYAANIVRKIFRLYLEGNGKAHIASILSSENILIPSLYKTRVLQQNYYNSKLKDTTKTWCYQTIHTILNNQTYLGKMVQHKDIKISYKDKKKRRLPKEQWIIVDNTHEPIIDQEIFDRVQAIQKIKRKSVNTEYSDNIFAGILFCADCKHAMNRAYAKENKKGSIGYICKIYKTMGKKHCPSHMIKNEELEEAVLSSIKNEARKILTEDDISDLDKVQKIDSREQFYKKQIQIVDAELEKYQKFKKRAFTGYMEEMITPQEYRSYVAEYEEEISKLERQKEEILTKLADENSLQNQHDEWVEAFKDYINIEKLTRDVVIELIEKIEVHEDGGLDIYYRFRNPFQVAN

SEQ ID NO: 205 - protein, 565 aa, unidentified
  source 1..565: note = Bacteriophage uvig_295592 from the Index of /pub/databases/metagenomics/genome_sets/gut_phage_database (ebi.ac.uk)
MARTKNRFNAVQIPEPATADIPAKQRKSFRVALYARLSVELKSRPSESIANQLSILREFIRDKAEFIEYQEYVDSAVSGTSFDRPAFGQMMDDVREGKISCIIVKDMSRFGRDYIEASNYIETIFPFLGVRFISVSDHFDTEAEFNQNKALEIALKNLVNDMYAKDISKRVSVSRRLDMERGKFTGSNAPYGYKVDSGDALRKYVIDRAAAAVVRQIFELAADGVTLREIAKALQEYRIALPGDYLKTGNLYVEEGAEAKAWYPGTISNILKNQAYIGNMVQGKRRTSLYDNEARHATDENDWIVVENTHEAIVDKELFNKVRAVMDKKVEESIFTSDRGKNLPIKEDIFAGILFCGNCGRRIPLASRILEKDGVLERQYFYSCRYNYDFGGKQCGCTIMEQDLIKVVHNLLTTQIAVLTDSARTEASMRGVMDRELKNHDMRIQKIQKQIDRKNYEESKEYQSYVTGEITKADFKCRQEKNADAIMRLRGQISDEEASRRRVKRFCEKKIQWLKAIYRFQSEVTLDKNMIKILVDSIYLYPGKRLVINLNFKDEYARMADGEEI

SEQ ID NO: 206 - protein, 477 aa, unidentified
  source 1..477: note = Bacteriophage uvig_30637 from the Index of /pub/databases/metagenomics/genome_sets/gut_phage_database (ebi.ac.uk)
MKIAAAYLRVSTEEQDEYSLDSQLKLIREYAKNNDFLVPDEFVFTDDGVSGRNARKRESFQRMIALAKQKEPPFDSILLWKFSRFARNQEEAIVYKSLLKKAGIGVISISEPLPDGPFASLIERIIEWMDEYYSIRLAGEVKRGMIEKVSRGEPVCHPAFGYDLKEKRYYPNSDADWVRWVFSSFSSGMGMRQIAAHLADHGVRTGRGGLPDNRFVEYMLNNPLYIGKIRWSPEGRKASRRKYDDPSNMIVDGLHDAIIDMETWEKTQGRLKQLKAAYRKHQRPGQPVQFMLKGLVHCSSCGATLVYQSLACPSLQCHNYNRGKCKTSHSLSVSKANAAVISALEYSVDNLDFALDPDENTTKRASERDYKKLISAEQTKLGRVQQAYEAGIDTLEEYAEKKRRILEEIESLRQQANEEKNVQKFDPIEYAKKVSAVLELIKNPTVAENAKNEALRSILSRIVYEKKKQNLALYFYI

SEQ ID NO: 207 - protein, 528 aa, unidentified
  source 1..528: note = Bacteriophage uvig_230232 from the Index of /pub/databases/metagenomics/genome_sets/gut_phage_database (ebi.ac.uk)
MLKEDGIYYAYLRKSREDHIAEKNGAEDTLARHEFLIKELAARNHIQISRWYKEVVSGETISDRPEMLRLLSDIEMTSPDGVLVVEVERLSRGNPQDQGRVMDTFKYSNTLIITPMKIYDLNQESDEEWIDFGLLRSRMEYRTIKRRMQNGRLTSAMQGKYIGNITPYGWIRQKLKGEKGYTLIPDPETSRIVKLMYQLVTTGNETTGWTPVGTPTVARMLDDMGIPTPRGSAEWECSAISKIIQNPVNIGMVRIGHRKEVIRVVDGVMKKSRPLNHDAVLVPARWEGIVEKDVYDRACSRFAKYARLGTFVEISNPMAGVVRCKLCGRPMSGRPSPKRNMLFCRTRNCPTVGAYTDLVEERLVASLEDFLADYKLHVSSPSLRVLNTESNDNQAILNELHAKLDKLNAQYKKICTLFEQDVYDVQTYLTRSQDVKNEIAAVNARIGAIDGKLAKAQQDATVRENFIPYFEYVLASYKESTDPKYKNKLLKEIVTSVDYSKTTRAGRNQKGMDSFVLDVHVNLQAHPI

SEQ ID NO: 208 - protein, 537 aa, unidentified
  source 1..537: note = Bacteriophage uvig_220226 from the Index of /pub/databases/metagenomics/genome_sets/gut_phage_database (ebi.ac.uk)
MSDTNKITALYCRLSHEDELAGESNSISNQKDILQKYADDNGFYNTEFYIDDGYTGVDFERPAFKRMIDDVDNGRIGTIITKDLSRLGRNHLHVGLFTEEYFPRNNVRYIAINNNIDSDNPDSSAIDMAAFYNIFNEFHVKDTSRKIKASCLIKSERGQRVASRPPYGYMKEPNDHSKIIPNPETVPIVRHIFQLCAEGLGPAQIAHRLEEEQIYTPAMYEYSKSGTVISNFDTSYPYRWNPTVVANVLEDVSYIGHTCNFRFGRASYKDHRKLKLPESEHRLIENTHEPIIDINTWEIVQRLRQSKRRFTRSGEKSIFAGIIFCADCKQKLYFHRHVREKPENWKFVCSSYRKNSREQCTMHGIKESHLKEIVLHEIRNVTAFARERTDEFAEYISLKSNSAVKKELSDANKKLKKSEKRLAEVGIIFRKLYEDHVLGTIDNDQFRMLSQGYTDEQNQLKAEISDLNKAIQELKSQTANTAKFTAMAKKYTDITELTQEILHTFVSRIEVHEKRKDDNGSVTQEIDIYFTHIGIVK

SEQ ID NO: 209 - protein, 531 aa, unidentified
  source 1..531: note = Bacteriophage uvig_229288 from the Index of /pub/databases/metagenomics/genome_sets/gut_phage_database (ebi.ac.uk)
MNVVIYARYSCERQTEQSIEGQLRECEEFAEKHDMTIVDTYIDRAISGTSTNHREAFLKMIADSEKHTFEGVLMYKMDRFARNRYDSAVYKAKLKKNGVRVYYAKEQIPEGPEGIILESLLEGMAEYYSAELSQKIKRGMRENALKGKATGGSTAIGYKITPDKTFAIDEDYADVVRHIFRSYARGERVEDICKDLNEKGIRTPKGYLFNQSTMRKMLQNEKYIGVYICKDVRLEDAIPPIIDKSLFHEVQQILAKNRKAPARAKAKVDYLLSGKAYCGKCGNGLVGESSNPNSDSRPHYYYKCANRKKGLGCDKKTIRKEELENLVAQKVAEVVLRPEKIKEIAQRCEEMQRDMVRTIRNPEADMLKKQLEKTKKSIANIMLAMEQGIFTKSTKEHLEALEQRKETLEIEIQRTSMVEKVDIITADQIEFMLLQFLPEANTDVTAYADDIISCFVHSVYLWDDSCAIWLNLSNQQPKPHKNRCAKVTPESTQRLQLSVDLLSGNVKKNLVQKNVGENSHLETSPPPHKNT

SEQ ID NO: 210 - protein, 534 aa, unidentified
  source 1..534: note = Bacteriophage uvig_51701 from the Index of /pub/databases/metagenomics/genome_sets/gut_phage_database (ebi.ac.uk)
MKRIHTLYRVSTKKQVDKEKNDIPMQRLACKEFAEQQGWVITREFEEKGVSGFKVSANNRDAIQDLKEAAIKHEFDVLLVFMFDRIGRIDDETPFVVEWFVKHGIEVWSVKEGEQRFDSHVDKLTNYIRFWQASGESEKTSMRIKTRKEQLTLEGCYTGGTVPYGYQLIRKGRLNKKGNEMRDLAIEPAEAEIVREIFNKTIHEGYGSYRIADMLNKRGLRTHSGSKFQCNTIIRILRNRLYCGYIVSGNVTSEALSELTIVESDIFDQAQYILDQRAEKDTQKRQIAFTTKGQALLSGNVFCAHCGGKLTTIRYKDKYMRKDGSEYSVDQIKYSCYHRSRKLCKCDGQATYQSERVDAAVIQIMHDIFDKMAGAPDEDRLKAMIKRQTVGCQAKQRKLSLELQKSKAQLEKLQLEIANALTGNSLFSPEDLSSSITTMKGRIAAAETELHELEQSEFQQRQSIAKILPAYNQFKSWADEFDSATKEQKKMIACQLFKRIEIGRNYAITCELNMTYQQFCEEWSNTEISKKMAI

SEQ ID NO: 211 - protein, 553 aa, unidentified
  source 1..553: note = Bacteriophage uvig_254558 from the Index of /pub/databases/metagenomics/genome_sets/gut_phage_database (ebi.ac.uk)
MLSNNLSKTYLCGGYLRLSKEDGDFAGSETLQSNSIENQKEYIEDYIHSKPEIEIVDFYIDDGYSGVNFDRPDFQRMLQDIKNKKIDCVIVKDLSRLGRNYIEVGKYIERLFPLLGVRFIAINDNFDSADDTAVSNNIIIPFKNLINDAYCRDISIKIRSHLEVKRKRGEFIGAFAVYGYMRGKDKNKLIVDPYAAEIVKEIFGMKMDGMSQQAIADELNSLGILSPAEYKKEQGSGYKTVFQTHSKAKWTAMAVMRVLTNEIYVGTLIQGKESTPNYKVKVREKKPREEWIRIENAHEAIISRADFEIISDIIQKDTRVTAGKRAVSIYSGYLVCADCGCSMVRKKAYSGSFEYVYYVCSGNKKNKDTCSSHRISENALNLAVTKTLQLHLKHLADLQESILYIRKTSCNSDKIKMMVLQFEKIKGDIEKYNRLKLECYEDYKNELITQDEYLLFKKELDNRIEDTKKAATKLSKKKRMLLDGRYEKESFMEKFLTSKDIELKRSLFVRFISQIYVYEDRRIEIIFRYQDEIEQLAGLVGEIKQETAVREVI

SEQ ID NO: 212 - protein, 518 aa, unidentified
  source 1..518: note = Bacteriophage ivig_3141 from the Index of /pub/databases/metagenomics/genome_sets/gut_phage_database (ebi.ac.uk)
MNYRSFEMRLLVYLRKSRSDVEEERKAAAEGREYDTLARHRRNLMDVIKREGHILVEPPYEELVSGDSIIERPEVQKMLNRMDEGDIDGVLVIDIDRLGRGDMYDSGILDRAFRYNNIKLITPTEIYDPEEENWELVFGVKSLVARQELKSINKRLQGGRRDKAKMGRSISKKPPYGYLRDENLKLYPDPDTAWVIQKIFEMTVKGNGRQAIAKKLDEWSVAPPDTNRNHWSPSTITAIVKNEVYIGKIIWGKITYLKRGGQYTRRKMKPEEWIVKDEAHEPLVTKELFDAANAAHSGRFRPSTKANNVLSNPLAGILKCELCGYTMLYQPRKDRPNSMIYCTKAQCRGKQKGAMLYLVENRILVSLEQYIKEFEIPKQQDAKNNSSIIQFQEKALDKKKKEIAEANKQKSALHDFLEKGVYDINTFMERQKVLVDRIEKLKDETRLIVEDMEKEKFREKNTKQFIPLVKSVLTAYRETDDIEKKNRLLKSVLERATFLRKKEWTKIDQFVIQLYPKI

SEQ ID NO: 213 - protein, 563 aa, unidentified
  source 1..563: note = Bacteriophage uvig_123245 from the Index of /pub/databases/metagenomics/genome_sets/gut_phage_database (ebi.ac.uk)
MYQNINKIYHAAIYVRLSKEDGDISSSAKLESNSISNQKALILDFLKDKKDIEVVSVRVDDGYSGSNFERPAFQAMLEDIRHGIVDCVVVKDLSRFGREYIDSGKYIERLFPALGVRFIAINDNYDSLKGKNQADEIIIPFKNLINDAYCRDISIKIRSNLEIKRKKGECVTPFVAFGYRKTKTDKHKLEIDPSAGGVVQDIFKMKLQGMSQDAIANRLNELGILSPFEYKISSGSRYETGFRQKEQALWSSVTVRRILENEVYIGNLVQGKRTTPNHKVKQTYVKPEDDWIRIEKNHEPLVSDRDFEIVQRLLGMDTRTSPDQKQVYLLSGIAVCADCGAPMTRKVSTVAGKKYAYYLCSTNKETKRCSSHRIPEKDLEDAVLVMLKQHIQNILHLKRVLEFIGTVPFQEINMKKLQDRLEKKKQEKERCKELRMMLYSDMKEGIVSKEDYVELHAAYGKRLRNAEESIRAIQKEMDNELEKADKANTWLDYFVKYQDIEELSRTVVVELIRQIRVYDKKNIEITFDFDDCYQTLLNQLPAMGVDMVIDDDNNLQVNVKEVV

SEQ ID NO: 214 - protein, 541 aa, unidentified
  source 1..541: note = Bacteriophage uvig_138779 from the Index of /pub/databases/metagenomics/genome_sets/gut_phage_database (ebi.ac.uk)
MSESTLKKAVFYGRYSSHLQHETSIEAQRDIVTRYALNNGYEIIAEYIDRAKSGTTTARRDRFNQMILDSRNGEFQYVITSKIDRFARNVKDFYISENKLDENGVKYISATEYYDDSTMSGIIIKALGVAAADGYSKNLANELVKGKMVNAKRAKHNGGIAPLGYDVELSTGTLKINEEEAKAVRLIFDMYVSGNSYGDICHKLNELGYTTKKQRKFGKNSLYDILHNEKYMGVYVFNKRAGKKNSHARKPDNEIVRIENGVPAIISKAVFDKAAKLMEYNKRNSGANTAKHNYMLSGLVRCGHCGCMMSGCAKKNGKGIVTHVYRCGHKPGEKCENHEINSDKLDEFVITMVKKYLLCKDNIPVLLNILRELSAKRITGISDDISEYSRRLKDIKTKQENLLNALETGGQIESVIDRLKKLEQDKSTVESKISELEQKKSVSVTEEQLNKALNILPAFIMSGRTPECRLFIRNIVEQVIVSKDNAAVTLRVTAVSCMRNRKDRKHILSSGIDPKIYQEDKHHERKQKCRAVCKIQLRYAA

SEQ ID NO: 215 - protein, 557 aa, unidentified
  source 1..557: note = Bacteriophage uvig_22285 from the Index of /pub/databases/metagenomics/genome_sets/gut_phage_database (ebi.ac.uk)
MFIDDNRPKRVAAYCRVSTDKTDQANSLVSQQRYFSEYINRNPLWELYDIYVDDGISGTNTKKRAAFNHMIEDAVNGKFDLIITKEISRFARNIVDSITYTRELKKHGVGVLFLSDGIYTLDSDGELRLALISTIAQEESRKTSERVKWGQRRQMEKGVVFGKDMLGYDVRNGKLFINEEGAETVRKIFHKFLDEGKGVHRIAKELREEGVKTAARMKDWSYTNILRILRNEKYCGDLVQQKTYTPDYLTHQKKRNYGEVETVTIRDHHEPIISRERFEAVQRELKRRRPSESTIKAYANRYALSGKIICGECGAGFVRRQKKRKDGTFNVKWVCAESRKNGGSHQEKDGETAGCTTNSISDRDIKQILQRVVADTMNGREELVSKLLQTVESVIKTVSGNDDLYRIEKETEKCAEKKKRLLDMCLNGYIEAKDYRAACDALETQIAELQSALVKEKEKQKMIADKEKLIEDIKKFISNISCGAEWNDAFYRNIVDKIVVYKGRKMDIHLKFIPDRWQVQILAGVKEINAYESKMRASVCSAPISVSRPFNSGSGIE

SEQ ID NO: 216 - protein, 527 aa, unidentified
  source 1..527: note = Bacteriophage uvig_67879 from the Index of /pub/databases/metagenomics/genome_sets/gut_phage_database (ebi.ac.uk)
MNIQQNRITALYCRLSRDDDFGGDSASIQTQKTMLSQYARDNGFTVTEFYVDDGYSGTNFDRPDFCRMIDDIERGKIGAVIVKDLSRLGREYLKTGYYTEIFFPEHDVRFIAVNDNVDSDHGENEFAPFKNIINEWYAKDCSRKIKSALHLKARNGEFLGGYPAYGYRRSNGDRHSIVPDENAPIVKQIFELLLEGKSCYEVAKYLEQNLILTPRAFLAEKYGVYKNSASAKHPYAWEDRSVYSIATNPVYVGDLVNGRRKCKSFKSKKVCKTSEDEWIVVRDNHEPLVSREDFEAVGQRLAVKQHRKVENPDNIFRGLMVCGECGRKMVFSKSGKSGRYSCAIYKRYGKSECSRHSITLKQIKQVVLTSIQRNAALSSEGKDRFVEQMLSASSSKKSAELSALKKEAEKLTARKLALAKIFQSLYEDKALGKLSEEVYSELSGNVERERTEIQERLRQISEQLGKSQLLTENAEKFAELIRRYTDITELSEELVHLLIEKIVVHERDCVTNTMRVEIYYRFIGKVD

SEQ ID NO: 217 - protein, 522 aa, unidentified
  source 1..522: note = Bacteriophage uvig_505551 from the Index of /pub/databases/metagenomics/genome_sets/gut_phage_database (ebi.ac.uk)
MPKVRVIQATKGSLANRLPVAAYCRVSSNSEDQRHSFVAQVREYTARIAENDKWELAGIYADKGITGTNARKRPEFQRLIEDCRQGKVKRILTKSISRFARNTQECLEYVRELKMLGVSVYFEKEGLDTADIAGELLISVFGSLAQEESSSIGGNMRKSYEYRMQSGKFIGNIAPYGYRWKNRSLEIYEPEAEIVRWIFNSYLNGTGRAQIARELNQRENGRNMWYVTTIQYILNNERYIGDALLQKKYTTEIYPKQEKRNRGDVPQYYLVESHPPIISRDTFERAQRLCQRRRNPQVTPSSPTDNNNTFFRKKAYCAECGRALRRKKQSSGYVSWVCSRHDESKMLCPAPPVAEAALLNSYKNMAGILLSSIDRILLPMAVQLRRLRERSIMGNEDINILNQQILSLTDQLHAVSKLHNLNILDVSAYREKTNALNALLDEAQRKRKLLISGTIEDDKLEKTEALISILQDTMQSPTALEDGEIFEQIVDKVLVDRNKKIMFRLINGLELTGSEGNSDGEK

SEQ ID NO: 218 - protein, 529 aa, unidentified
  source 1..529: note = Bacteriophage uvig_433950 from the Index of /pub/databases/metagenomics/genome_sets/gut_phage_database (ebi.ac.uk)
MIPFSVSSSALPDGCSGFLRAVIYARFSPGKNQKEISIEGQLRECREFADRNNYEVVGEYIDRRISGRSDNRADFQRLMRDCEKRCFDVVIVWKFDRFFRNRQESAIYKKHLADFGVKLVSAKEFIPDGSGGIIMAGMIETVAEWYSANLSENVTRGMYETASKAQSTGHLPLGYVTGPDKRLKIQPVEAEAVQIAFQMYSDGANLKEIADALNESGHTTKTGRPFCVNSFGAILTNPKYIGVYKWHDDIEIRDGCPRIVSDELFFSVQRRLERTRRTSGRGRATTEYFLSTKIFCGHCGKPMCGESALKRGMRYYYYACSEKKRFHNCKKKNVPKDKIENLVFEKTLAMLTDDNIAYIAREVERIAADENINLAALRQLEGQLAEVNKRLSNIGNAIAQGIITETTKELLVSAEAERAAINKKIAQERLLMKGTVKAENVACWLHSFKTKKRSDLEFKRQLFASLVHSVYVYDDHLKVIFNVEKYGAVEISFDELSSATSSDVVGLAQPAKRPQRTLILCGLLAFVTH

SEQ ID NO: 219 - protein, 563 aa, unidentified
  source 1..563: note = Bacteriophage uvig_123245 from the Index of /pub/databases/metagenomics/genome_sets/gut_phage_database (ebi.ac.uk)
MARKSRKNIPEVVSSATVQTEVSRPFRAGLYARISMETEETLERGTIETQVELMKNFVADTEDIAVAEIYKDSDYSGTNFDRPGFTQMMEDIKHGKINCVIVKDLSRLGRNYVETSNYIERVFPFFHVRFLAVTDDFDSFREGVDLTVPLKNIINEFYSKDLAKKSSSAKKALWKEGKFTGAWEPYGYRKSEQDRHQLVVDEEAAGHLREIFTMYMDGCSYSDIAKRLNTDGILSPTLQREYYKTGEKPSPESKPWNNYEVKRVLQDVHCTGDSVYGKYQQSVFQGNKQRNLPESEWLYAENTHEGIIDKELFRQVQEKIREFTEAYKKKHQLNNGAIRNHNFYTGKIRCGGCGNRMVLSREKTGTFYYICGADANHKSGGNQCKGHRVKKEYVDEDVLRLIQSHMKAVLDTEKLIREMNSASRNQTQYLLLDKEVGKLRRELSRISKRKSDLYEDYSERLITEEEYMQFSRIYSNEIENIKNRLDVVLAAQVRYSKDYHIEEGWGKVIHTYMSKRKLTKEMADAFVDSIIIHGKYDYEIKLVYDDQFADLQKLKKEKEAQSR

SEQ ID NO: 220 - protein, 544 aa, unidentified
  source 1..544: note = Bacteriophage uvig_205573 from the Index of /pub/databases/metagenomics/genome_sets/gut_phage_database (ebi.ac.uk)
MPAEINFNLPGNKKSEHNSRDKIAVVYARYSSHSQTEQSIEGQLAAAQAYAAAHDYTIVHEYIDRAKSGRTDSREQFQAMLHDTAKKQFGVILVWKVDRFGRNREELTINKLKCKKNGVRVEYIAEKIPDSPEGVILESVLEGFAEYYSLQLSQNVRRGRAESAEKCQVLGGTNLLGYSTGPDKKYVIDPNTAPTVKMIFEMYASGSTTPEIVRHLNSLGLRSSRGTPFTKNSLCGILKNEKYTGVYTYKDKRIPGGIPRIIDDETFQKVQALLKVNKRAPSHKWSRAEYILTDKLFCGKCGSPMAGESGTSHTGAKHNYYLCTKHKRQGKSACDKKAIRQEQIEDAVLNAAIELVSNDELIDFITDCTWEYYQKQDFTKAEVEALQKELSRVEAAIKNLLHAIELGIFNEATKARMDELTAQQKELTASIAEKELASGFRLTRDHIKYFLGQFKNKNYKDRECQKQLINTFVNSVFLYDDHIDLNFNYSGGSRTLSLTESEEKGGSEGFVCCLPCSTITRTYEPNIVWFGHVFKIRIRLPESY

SEQ ID NO: 221 - protein, 470 aa, unidentified
  source 1..470: note = Bacteriophage uvig_311654 from the Index of /pub/databases/metagenomics/genome_sets/gut_phage_database (ebi.ac.uk)
MRKKIRVAQYERVSHEDQKKFGSSIAAQRQHLNKFLDEHPEMVLIDEYCDEGISADKLNKRTELQRMLKDIEEGKIDLVIFTKLDRWFRSVAKYYKIQEILEANNVAWQAVLEDYETVTANGKFKVNIMLSVAQQERDRDSERIKDVFAYKVSQGEAIVPSSSLHFPFIVKEIDGVKRVVHNPETEAMTYDWIEHLKTYNSQSRAAAYINEKYNKDFDYNSLVKTSKDTLLYGCYRGNENYCEPYMTKEEFMQLQENLKKNIRVKKNNHVYIFSSKMKCPRCGQSLVGGWTMYKTKESDKNYSYYYKCNFAHHKRKIKSAKACSYTRAIGENYLEQKMITNLKKYIIDFISEKEANVKKDVPKNTKNIKRKLQDEIERLNKMYQKGRINEEDYDAEYDRIEKKINALEEEKKESYDSTKLEELLKTDVIEQYYNSDRLTRQGFWNTLVKEIEIDENKEIVRVDFFRLTSM

SEQ ID NO: 222 - protein, 530 aa, unidentified
  source 1..530: note = Bacteriophage uvig_268018 from the Index of /pub/databases/metagenomics/genome_sets/gut_phage_database (ebi.ac.uk)
MAQENYIIYLRKSRADAEAEARGEGETLARHEKALLELARRQKLNVTDIYREIVSGETIAARPVMQRVLAEVEQGRWAGVLVMEVERLARGDTMDQGLVAQTFKFSGAKIITPMKTYDPSNEFDEEYFEFGLFMARREYKVINRRMQRGREASAREGKFLGNHPPYGYVRKKLEREKGYTLEPHPGQADVIRMIFDLYTIGYPLEDGAYRRLGVSLIARRLNEMAIPPQKGGAWSESSIRDILINPVYAGMIRWNTRPHVKRMVDGQITVTRPRARPEDRICVKGLHEPLISTDTFDAAQKLMSCNRPAPIGRAKGVKNPLAGIVVCGVCGRKLVRRPYPAGRGQPDTLMCPNASCSNVSSALHYVEEHILSALRDWLAEYKLKLLTQGETLSPSALASKKMTLRVVEAELSKLNKQMERLHDLLEQGVYDVDVFLNRSRILGEQIAKAKASIEALNEEIKLEEARSGAYKNIIPKVQHLLDSYHDLSNPKAQNDLLREVLDKAVYTKTIKGRWHAAPDDFEITIFPRLS

SEQ ID NO: 223 - protein, 513 aa, unidentified
  source 1..513: note = Bacteriophage uvig_490592 from the Index of /pub/databases/metagenomics/genome_sets/gut_phage_database (ebi.ac.uk)
MPTVTVIQPTISEEQNTKIRCAAYCRVSSDSEDQLNSFMAQMRYYSQVFDNSETEELIDIYADEGITGTREDKRDEFQRLMKDCRKGKIDRIYTKSISRFARNTRDCLKNVRELKSLGITIYFEKENIDTANMTDEMMITIMGGLAQEESTSISQNLRWGIKKRMENGTIKMCTPVFGYELVDGNLILKSDEAEIVRQIFDWYLNGYGLAAIAQMLNALKIERFGRTSHWTASTVGVMLRNEKYIGDQLFQKKYTTDTLPFRQVVNKGERDQYYYSDRHKPIISRDDFDKVQNILAEHKKSFKGLKQDHIFAKKIYCGECGSTFKFKCRKNKNYWVCRLHDAESDKCSNKQILEANAISAFIMLCNKLWYNYKQILLPCQAALQDLKLKKFSGKTQVMDIHKEIAKLREQAHVLARLKTKGFLDEAKYLEQTTELTAKINKLQTELKKLTRSDDEDEMLEQIEMLIDFFEKRENIMIDFDESAFENIVEKIVVIDQYELEFHLIGGLKFKENI

SEQ ID NO: 224 - protein, 488 aa, unidentified
  source 1..488: note = Bacteriophage uvig_220844 from the Index of /pub/databases/metagenomics/genome_sets/gut_phage_database (ebi.ac.uk)
MNAVIYARFSSDRQNEASINAQVRACTEYAERHDLTVTGIYADEAISGKESKTAARAQYQKMLRDAHKGLFSVILIHKYDRVARSLAEHVNLEGRLKADNIELVAVAQDFGNTSEAKIMRALMWSMSEYYLDNLSAEVQKGHRETALKGLHNGGYAPFGYDVVNQQYVINELEAAYVRRIFTAAQEGTGFKPIIAELEAAGITGKRGKPIRYTQIYEMLRNEKYTGVYLYTPQEATERAQRRQKPEAIRVEGAIPAIVTKAQFMEVQAIMNSRKNAGRKADYMCSGLVYCSCGAKMHACKSTRKGHTYYRYVCSEHCGRPTVLMSAVDEAAIRYLRELLSEPNQMLITAAMRRYQSDSKNRLTAFYDVLNARIAEKQKEYDTLLKNLSSGVLPSDVVADIGQRMTEIKDEIKALEATEPPEDYTVDTITRWLNALKNDPDEKAVKLLVKRIDVSGDKKNNVFNIQSTLNTLLEIMVAETGFEPATSGL

SEQ ID NO: 225 - protein, 535 aa, unidentified
  source 1..535: note = Bacteriophage uvig_127324 from the Index of /pub/databases/metagenomics/genome_sets/gut_phage_database (ebi.ac.uk)
MYNATKYLRLSYTSDRANESDSIANQRKYIDEFVKRNPDIKIVNEQVDDGYSGIVFDRPAFKSMLEDIKSGKINCIIVKDLSRLGREYNETFTYLRRVFPALGVRFIAINDNIDTAKEAVTGDISVSFKGVMNDEYCRDISVKVRTALNIKRKNGDYVGAVPVYGYKKADDNKNQLVVDEYAAQVVKDIFKMRTDGYSAERIANELNYLAVLSPREYKKDNNIPLPTGGYCDKENSKWSATTVIRILKDEIYTGKLIQGKCGKPNYKVKEYVKRNADEMFVTENAHEAIIGRQDFELVQKIMRIDTRTSPKKNELHLFSGILICGCCGNRMTRKTVTHNGEKYFYYYCPTGKKNGCTGGNMIKETDLVNCVTDSIKGHIKNVASLNALIGGINNNAINKDMCNKISVQISEVQKQLDKTSEYKSTLYENYISGILNKEDYKSLNTSYSKDKKRLEDALKQLETELDECRNNTSKKLQWIERFKAFENIDKIDRNIVIRLIECIHIYDKTHIQIAFNFKDEYEQALSALNEYREVV

SEQ ID NO: 226 - protein, 543 aa, unidentified
  source 1..543: note = Bacteriophage uvig_418530 from the Index of /pub/databases/metagenomics/genome_sets/gut_phage_database (ebi.ac.uk)
MSFSPPRKAALYARFSTEHQCSIEIQFAKMQEFCLAQGFSVSPLHAYSDEALSGMRTARRSGFQDLMVAAERHEFDVVVLYDLTRGSREVVDWFTFRRKMQSLGIQVLSMHDRLGNLDDPADFLPELISVGMGQVHVLTSRLKSMDKVDFLAQQGKFLGGYAPLGYEIKDGEYFICEREAAYVRTIYAMYADGKSYNEILAALPSALRGKRGRPIGKNSLYTILRNDRYIGRYSWCKRQVKYFSEWAGGGQSDRAVIIEDAIPAIIDKATWERVQTRMQENRINKTNHSSAHREYLLSGVLFCGSCGASFFGATTINKKGFEYKFYKCGNKNRTGTCHSKNISANDIEPLIVNLLRNALLNGSLIEKTADAILSVGAGNSSTDLKTLNAQLAQLDLKISNLVDALSNGLSSDAVREKLGLLESERAALKLKQDSLEPCHETLDRDFIISELQRDCEILQNSPSAMKQLIKKYIPHIDVFDDHIEIHCVADLAATSGIPLKTKKDGVSNISAENTITNGCGSAQHGVLVFTIPRSILALLNFSA

SEQ ID NO: 227 - protein, 524 aa, unidentified
  source 1..524: note = Bacteriophage uvig_169032 from the Index of /pub/databases/metagenomics/genome_sets/gut_phage_database (ebi.ac.uk)
MKRVLCLYRVSTIGQVDHDDIPMQRIACREFINQHPDWVLVEEISEKGVSGYKTKTEDRDALTRIKEKALAKKFDILLVFMFDRIGRRDNETPFVVQWFVENGIEVWSTKEGEQRFDNHVDKLLNYIRFWQASGESEKTSMRIRTRHLQMIQEGLYRGGLIPFGYKLEFMGRTNKKGQPVRDLVIDEAESKIVKEIYHKSVSDGWGANRIANWLNERGIPTKRQKTFWRATSIRALVRNPIYTGRIRFGGDLSEPFDHLRIIDDDLFGLCDQTIEGRCPRHPDKRVGHLRSTSNGLLTGILYCGSCGERMCFNHNTTVRILADGTKRSYERDVYRCYRKIHSRRTCQGRSTYSAERIEKDILAVVHTYFENIRSKPTLQMLAAAGNRKRSIQQDAIAQAEAALKKAQIELAALEDAAVKAITGETNMDLELINSLFPKRRMNLDKAMQEVERLRAELADSEKLESAANHELNMILSWADTFDAASRETQRSIIAMLIDKVVVNTNYHLDIHFRITAQQYLGKAS

SEQ ID NO: 228 - protein, 499 aa, unidentified
  source 1..499: note = Bacteriophage uvig_572866 from the Index of /pub/databases/metagenomics/genome_sets/gut_phage_database (ebi.ac.uk)
MDAIYARQSIEKKDSLSIEQQIDMCKKSAADAVEIYKDIGYSGKNTTRPDFQRLLGDVKSGTVNRVICYRIDRISRNLLDFMNIWQLFQQNHVEFISVSEQFDTSTPVGKAMLYIAMVFAQMERETIGTRITDNFYARTAAGAWGGGPAPYGFKKVRGMLHGKTQTLLEPVPDEQENIKWMFTEYATGLRSLGWLGREMWKRDPDRGIRWTNVSLRRILINPLYAAADADLYAFFSRSGINIVSPLAAWDGKHSALQTGSRSADTRVRRPISEQQLSVFSTNPVVSSQTYIRVQKQLAKNRQIKNTGKGQWSWLSGKIKCAECGYSCTLCHSPGVTRTKAYIRCSGRYGQLAEKRCTTRHTETIESVEEYVLAQLKDHLSGVAPSKRSKKSAAQERKRNELKLQLIEVQQKQQNAAAAIAEGGATIMRLMMPEIEKLDAEATKITDELSTLAGSEQQSWMPDMALDFDAIDDTGLRDLVALTIDKVLVSPSRPPEIIWK

SEQ ID NO: 229 - protein, 519 aa, unidentified
  source 1..519: note = Bacteriophage uvig_327543 from the Index of /pub/databases/metagenomics/genome_sets/gut_phage_database (ebi.ac.uk)
MKKVTKIDKIQPAKNAENKLRVAAYCRVSTATDAQLESLEAQKNHYENYINSRDDWCFAGVYYDGGITGTKASKRPELMRLLADCKAKKIDFVITKSISRFSRNTMDCLKIVRTLLNLNIPVYFEKENINTGSMESELFLSVLSTMAEGESASISSNNRWSIKKRFGNGTYRLSSAPYGYKLESGGLQVVSEQADIVKRIFRELLSGKGMYSIAKELNAEQVPTQKGGRWTSTSVHNILTNEKYTGDCIFQKTYADSNFNRHTNNGELNRYLIQNHHEAIISHEDFNATAALIEQRAAEKGIESGNDKYQQRYAFSEKLICGECGNTFRRRIHKGKYNSYVAWVCNTHLSDTNRCSMLFVRDDALKLAFATMLNKLIFSYRLLLKPYLAAMQSNTADEALLRIQYLENQLDQNAEQRSTLHKLMAQGYIDQIIYTQESNELLLQARDFRSEIEALNNTVAGDTTKVYETERLINYCKRGEMLTDFNESLFELFVDHILIYSRQKIGFVLRCGLTFEEMI

SEQ ID NO: 230 - protein, 506 aa, unidentified
  source 1..506: note = Bacteriophage uvig_177600 from the Index of /pub/databases/metagenomics/genome_sets/gut_phage_database (ebi.ac.uk)
MYCIYLRKSRADMEAERQGIDTLARHEKILTSYAAEHGYSIGKIYREVVSGDTIAARPQVQQMLQDAEAGMWEGVLVMEVERLSRGATIDQGIIAQVFKFSNTKIITPYKVYNPNDEYDEEFFEYGLFQSRREYKAITKRQQRGVLQSCQEGKWVYNKVPYGYERYKLEHEKGYSLRIVPEQGKVVRMIYTLYRDGMGYSSISDYLNNMNIPAPGDHWTYNTVCSILQNPVYNGKIKRGARAVVKTTEGGTLKSSRPRNKHYNIYEGLHEPIIDDILWRTVQDKFATHPSKPVAKALEIRNPLAGLVYCQVCGHKMIRRPQDRCRTMIICPVKSCHNISCYESVLEHTVIDYLCKYLEELKTNTGISIDTTTLEMLKASLQKSNKEIEQLNNQMDNAYDLVEQGVYSADIFMKRQKSINCKLAAEKLKNEGITAQIHKEEKVIRQRDTLIPRIENTLNVYWDLDPAEKNRMLCDIIDHIEYVKKERSKKNGPYNNFQIVVHPRIPV

SEQ ID NO: 231 - protein, 529 aa, unidentified
  source 1..529: note = Bacteriophage uvig_457951 from the Index of /pub/databases/metagenomics/genome_sets/gut_phage_database (ebi.ac.uk)
MTETNISTARVPQVTVIDPRIPEKAKLRVAAYARVSSDSEDQVNSYIAQVDFYSKYIAGKEEWEMVDIYADEGISGLEARNRDDFNRMMTDCREGKIDRVLCKSISRFARNTQEYIQFVRELLRLGISIHFEKENIDTGKMTSEQVAQIYGAFAQMESTNHSSNMRFSVRMRMEKGLFVPSSVPYGYRLAGRDLEIIPEEAEVVRRIFSAYLSGQGKDDIARELNQLGVDRGRNREKWHPSTVAYILTNISYTGDMIWQKSCATDTIPFRQVRNLGQKPRYFVEHSHPAIVSCADFQRVQELMSSRKGQFHGTHRISKGSLYDKHIYCGGCGSLCRKKITVGKTYWVCRRHDGNKADCPTPQIPEPEITAAVLRLYHKLKLGQETVLRPVLSQLQELRERELRSNRKISDIDNEIARISEQNLVLVRLKSKGYVDSALYLSQMDEIDRKLRELRKLRRRLLEAAGEDRQIHDTERMMEYLEDGPEWLDEVPAELFGELIERIIIISPERLKFRLLNGMELAENIERTVR

SEQ ID NO: 232 - protein, 475 aa, unidentified
  source 1..475: note = Bacteriophage uvig_580269 from the Index of /pub/databases/metagenomics/genome_sets/gut_phage_database (ebi.ac.uk)
MTTAAAYIRVSSERQDEYSPDSQKKLIREYAKKNNIEVPEELIFFDDGISAKTATKRTQFNRMIALAKEKEPPFSAILVWKFSRFARNQEESIVYKNILRKKGIQVISISEPIIDSPFGDLIERIIEWMDEYYLINLSTEVKRGMTEKLSRGEALCPPAYGYDIQDGKYIINSDEAPHIIEIFNDFLSGLPMRQIALKCAAKGLRTHRGNPFEARTVRYILYNPVYVGKIRWSTDGRASSLRDFSNPSTVIVDGIHEPIISQEVWEATQAKLSKIQTMYGKNQRPDQQVEWMLKGLMRCECGATLTMLGTSCPSMQCYAYTKGTGKCVTSHCLSISKANKLVIANLERLVNNKQFNFVPAENITQTVDYDTLIKKEYARLARAKEAFLAEIDTVDEYRENKARITKTIKQLEREKSSHKVEEIDVDEFSERIRQVLRTITDASVSEKAKNETLRTVIAKIVYEKSKKRLVFFFHT

SEQ ID NO: 233 - protein, 517 aa, unidentified
  source 1..517: note = Bacteriophage uvig_576757 from the Index of /pub/databases/metagenomics/genome_sets/gut_phage_database (ebi.ac.uk)
MNKVWNVAIYARVSTDKKEQSESIPVQVENLKKWLLEKSKTDTDAIYNMVDIYEDNGKSGSNFDRDEFIRMKNDIENKKINMVITRDLSRFSRNYIMAGYYLEDYFKVNNIRFISVLDNVDTISEYNDIIPFKNILNEMYIKDCSRKVKSALNTRMQNGSSIASKPPYGYKFDEVYEGNQKKIVLIPRLDDTTEVVKEIYSLYLNGWGAGKIATYLNNKKIPTPSQNIKNFARAKFGKWNNNTIMSILRNPKYGGYMVQGRYKKPSYKSKKIILASRDEWVYGGEFDGIVSKEVFDKVQEVMNIRSSKNYRYKNGVIHPFSTVLVCGGCRGSMTYRGKYEGYKCANSQMGGKRCTPHSIKEKDLIEIVSINLKELISKYIDEKSICEGYDKIQIFDNSQNQLDGIEEKITRLNIKFKKLYEDKIDGIISEYNFSNMIESLQMEQEQLLKKREKFIRLINNKSIKNDLLSEYKGQLKQLLNGECIDRKLIESLVDKIVINEVGGNREKEVNIYFKFSN

SEQ ID NO: 234 - protein, 521 aa, unidentified
  source 1..521: note = Bacteriophage uvig_157917 from the Index of /pub/databases/metagenomics/genome_sets/gut_phage_database (ebi.ac.uk)
MKNGNYAMYLRKSRADREAEARGEMETLARHEKLLFETAKRMQITVSAVYKEIVSGETISARPVMQKLLVEIEQGIWDGVLVVEVERLARGDTIDQGIVSQAFKLSDTKIITPVKVYDPNNEFDEEYFEFGLFMSRREYNTIKRRLQRGRLASVREGKYVGNRPPYGYERVKIPNDKGFTLSPLPEQAKIVKYVYDLYAYGLDGEEMGTAKIVRKLNDLQIPTQSGGKWIPPTIRDMLYNPVYIGKLRWNRRAATKKVCDGKITYSRPTSKEYEICDGLHPAIIDLETFKICQKKLSKNQSRPISLNKTIKNPLGGLVICSKCGHRMVRRPYSKTGQRSTLICPYTHCDNVSSPLEDVETMVLEAIADIVKNERIEPTTSVIPSDTIDILKDALKNQETSLETLQKQQNSLYDLLEQGIYTTDVFLERSNTLKDQINTASASIQDLKRKISAEQNRLKVQADFIPKCEYLLDVYDTLDAPEKNRILKELIDHIDYLKEEKNVPFTKKDAKVFIHVYPKTPE

SEQ ID NO: 235 - protein, 510 aa, unidentified
  source 1..510: note = Bacteriophage uvig_555782 from the Index of /pub/databases/metagenomics/genome_sets/gut_phage_database (ebi.ac.uk)
MPKNAVIYARFSSENQHAESIEAQIAECSAYCRRKGYAVVKTYADEAITGTSTAKRRSYNKMLSDARIGVFDIVIFHKIDRNARNEIDYYRFKQSILALGLTYEYAAQPIDATPEGQFMEAVMVGQAAYYSRNLSKETKIKAIPFAKKSNFMGGVPPLGYKIVDKKYVINEDEAHIIRRIFSMYLAGKSYASILDDLNGSGYRTRHGNVFGKNSLHDILRNVKYAGTYIYNKVVKLPNGSRNSHGEISPEAIINQGALPAIISEIDFERVQEMLNKRKNSPGQFTSKRSYILSGLVRCGICGRTYLGHTKTIRGKVYSYYECSGSYSKGRKEKCKNAHLNAEKLEDMIINAVLDNICEEDLDNILEDAEKIINGNAEVKEQLSNLEKKKTGLKVRMNNLYSAVERSGMDEFDIERLTTLKTELRTIEKEISQLRVLPELHVTREELQACWKDFVFALKQKTDPTLVKSVLERTTSVVVMPDELIVTIDVASVLVPGTGIEPVRVSLPEGF

SEQ ID NO: 236 - protein, 501 aa, unidentified
  source 1..501: note = Bacteriophage uvig_193710 from the Index of /pub/databases/metagenomics/genome_sets/gut_phage_database (ebi.ac.uk)
MAEITIIPAKNHADEIVRTAAYARVSSDSEDQLNSFAAQIRYYTELLQNSTDAVFVDMYADQGITGTSAAKRTEFQRLMSDCRKGKIDRILTKSISRFARNTKDSLEAVRELKTLGISVYFEKENIDTGEISSEMMLAIYSQFAQEESMSISRNVRMGFQKRMADGSYVPSAVPFGYIRENGKFVIDKEKAEIVRGIFSDYLNGVSAEWLAEKYRVKLATVKYVLTNEKYTGDSIFHKWYTTDTLPFDCRENRGERDKYYVSETHPAIISREVFQSVQRLIERKGRAHKGKTTQSYPLRKKIYCGECGTLYKRKERGSRVCWVCRNHDSSADKCSAKQIDEREIYGAFIVMFNKLLQNYKVILVPLQRQIQELFNLKMRENAQIVQLRKELAESREQAYLIAGLRSKGILDAAYYTEKAAALEKNIDSLQKRLDAFEEDDENGRILGKFRKLIGIFERAETITEFDEIKFGQIVEKITVLSESKIRFELIGGIGFVEQIMR

SEQ ID NO: 237 - protein, 484 aa, unidentified
  source 1..484: note = Bacteriophage uvig_363401 from the Index of /pub/databases/metagenomics/genome_sets/gut_phage_database (ebi.ac.uk)
MSNNTPSSLPDLRTGALYIRVSTHEQDDLSPDAQTRLGLDYAKSNNIIVPKDYIFVESVSGRKAKNRHEFQRMIGLAKSPEHPIDAIIVWKFSRFARNQEESIVYKSMLKKDNVDVISISEPLVDGPFGSLIERIIEWMDEYYSIRLSGEVLRGMNEKALRNGYQLSPPLGYSAVGGGNPYIINEDEYKMVSYIFEQYDVYDKDWTAIARSMNQKGWKTKRGSAFDIRSVERVLKNPFYYGLVVWNDTSFMGTHEVRLTKEQYDKRIEKMQKRYRPIKRRNPSTCLHWLSGVLKCGHCGAGLVYNSANRCPNFQCWRYAKGLHKGSHCISEKRVVAAVYEYFEQILDGNPFTYTYRAPIQPETDDARKSLLDELEKLKIKEQRIKLAYENEIDTLEEYKENKLRLKAAREKIESELEEIAAEEAQNKPTGPTKEEALAKVKTVYDIISNPDVDYTTKGNVLRSLVESITYYKEDEKLEFVFYIS

SEQ ID NO: 238 - protein, 507 aa, unidentified
  source 1..507: note = Bacteriophage uvig_195006 from the Index of /pub/databases/metagenomics/genome_sets/gut_phage_database (ebi.ac.uk)
MRKKVAYLRKSRADIELENTTGEDTLKRHREIIKKLAKQNSVILDTYFEEVVSGETIQARPKIQELLKEVENNEIDEVYVVDVDRLARGDTEDQGRISKTFKFGNTKIVTPGKTYDPNNEFDEDFFEFGLFMSRREYKIINKRLNRGRLSSINEGKFIGSVCPYGYSKEKLKGQKGYKLIINEEEAKIVKIIFNLALSGIGASNIANHLNRIGSKPRKAEIWVSASIRDIIHNPVYYGMIKWNYRKTIKTMKNGIIYKSRPKQKEYILVEGLHEAIIDEETWKIANNNSKIKEGKSVKKDLTLQNPLAGLVECGICHRTMQRRNYRSGHIDGLICPLPHCKNVGSHLHMVENAILDSLQRYLNQYEETLASYKKNEQVHELDTNNVELIEKEIEKTKNQLNKAFDLLEQEIYDNTTFIERSKSLKIRIDELKKEKEKYSIKTKQEKIEKIKDIIPKLRNAINTYSTSLPATDRNELLKSVINKVYYIKSVRGKGHEEEFELQINIKL

SEQ ID NO: 239 - protein, 511 aa, unidentified
  source 1..511: note = Bacteriophage uvig_180433 from the Index of /pub/databases/metagenomics/genome_sets/gut_phage_database (ebi.ac.uk)
MLWNIGVYLRLSNDDGDKAESNSISSQRTLALDYIKKNISDGEIIEVFIDDGFTGTNFNRPDFKRMIQFIENGEINCVIVKDLSRFGRDYIGVGNYIEKYFPLHDVRFIAINDGYDSSTKNSSDDFSMPIKNIFNAHYSKDISKKVKTSFRTLQNQGQFVGAFASYGYKKDENNKHKLVIDEPSAIIVRKIFNLFLSGNGKNSIARILNEDGIPCPSEYKRLNGLKYTNGSRLELTKYWTYPTINSILHNRMYIGDMVQNKYGRKFVRGKAKKNSVEDWIIIEGTHEPIIDKHTWELTQDLLAKNTRQLSLDSNVGMFAGYIICGDCKRAMSKIKYRNNKSYICGSYKRYGKDICYRNSIKEEELEEIILAKLNEQISKIDKFEEIKANTKDYTSDINKLNILLNKVRSKKKRIYEDYQDDVLTKEEYLGYKQDYIKEESHLLKQIEELNNETNKLLDNDTWLQKINKYKKIEHLNREIVAELIEKIIVSHDGDKDDSSIKVEVIFKFKFL

SEQ ID NO: 240 - protein, 523 aa, unidentified
  source 1..523: note = Bacteriophage uvig_557335 from the Index of /pub/databases/metagenomics/genome_sets/gut_phage_database (ebi.ac.uk)
MIPAVIYARFSSHSQTEQSIEGQLAACYDFAEREGYTVIGEYIDRAISARTDDRPDFQRMIADSAKHTFEVILVYQLDRFSRNRYDSAVNKQKLKKNGVRVVSARENITADASGVLMEAVLEGMAEYYSAELAQKIRRGMDISGSKCLATGGRPALGYKVDETKHYQIDEDTAPMVVKIFEMYASGMTVAQIITELNQQNIKTSTGADFNKNSLRKMLTNKRYIGIYTYKGTETPGGIPRIVSDELFNRVAEMMEKNKKAPARARAKEEYLLTTKLFCGHCREMMTGISGTSKTGTIHNYYTCNGRKKKLCSKKNVQKEYIEDRVIALARAQLTDENISKISKAVAALCEREKESSEYRRLERQRRDIEKQKANLVDALKYGKATETLLNEIAKLESSIEGIDRQILMEKVKCLDLKEPEIAFFLTKLRDGDINDITYRRAIIAVMVNAVYLYDDGRLTVIFNSSDRPVEVTEGLLADVEEDAAEFVSGLCRSTNLIAGRTPEVTIVVLPYGFVLATQIKDRL

SEQ ID NO: 241 - protein, 525 aa, unidentified
  source 1..525: note = Bacteriophage uvig_89445 from the Index of /pub/databases/metagenomics/genome_sets/gut_phage_database (ebi.ac.uk)
MAKVTIIPSKKNPITLTPINEIIKKKVAAYARVSTDSDEQFTSFDSQCKVYEDYIKSKPDWEFVKVYADDGISGTNTKNRVQFNQMIEDALAGKIDLIITKSISRFARNTLDTISYTRKLKASGIEVYFEKENLWTFDDKAEFLLAIMSSIAQEESRSISQNVTMGKRWKMQEGKVQFAYKNFLGYKKEDGQIKIDDDQAVIVKLIYKMFLVDGKTCSYIANYLNSNNVLTPARRHNWSKQNILSILKNEKYKGDAILQKSYIKDFLEHKAVKNNGELPKYYVENSHPAIIEKDMWEMVQAELKRRELIGASYSSCNVFSSKLICGDCGAFYGKKVWHSNDAWRKEIFQCNKKFAKGKTRCKTPSFSEQVIKDKFIKAYNLMMVDKNTVVNDAKDVINKLTDTTTLDVQISKYENEMEIVSELVKKLVKDNSIHLQDQNDYEVKYQELVNRHNKAKELYEKLSEEKKYKQAKAITLKSYLSTLENADTEILEWNDALWMTVLDKAIVNRDETITFKFINGKEITL

SEQ ID NO: 242 - protein, 509 aa, unidentified
  source 1..509: note = Bacteriophage uvig_576812 from the Index of /pub/databases/metagenomics/genome_sets/gut_phage_database (ebi.ac.uk)
MKIAIYSRKSKETDTGESIKNQIRMCKEYFTRQYDDCTFEIFEDEGFSGGNTNRPAFKRMMQLAKHKQFDIIAAYRIDRIGRNTLDFLMMFEELKQYDIKLISVTEGFDPDTPAGKMMMSMLSSMAEMERMNIAQRIKDNMTELAKMGRWSGGTPPTGYKSITNVNSYGKKETYLDLIPEMEEKIKYIFKRAAEGYTTFQIGKETNLSSKTVYNIITNPVYVKSTEESAKYLESLGYLVYGELNGLGFMPYNRRPKKSGKKLFNATGMFVSVSKHNAIIDAPTWIKANSNISNRGQESRPRISPNSFLSHLIKCSCGNNMFVHQGRANSSGEKVYYFRCSAQKNKQNDCTAKWLKVSSVEESVLKILEGFALDKKTLEKFITSKKDIDYDSLIKDVKKDIGRKNKDIENLTEKLILIEGPAVKIVTSKINELSKEIDNLNSELLSLERKKIFQEQDKININTLHSSIIKLVNHFPTLPIEDKQTSIRGIIKEIRFNGNDEIEVVLVGGI

SEQ ID NO: 243 - protein, 523 aa, unidentified
  source 1..523: note = Bacteriophage uvig_1903 from the Index of /pub/databases/metagenomics/genome_sets/gut_phage_database (ebi.ac.uk)
MTTSKLRVAIYCRLSEEDRNKQSETDDSNSIQNQKSMLLQYSLEQGWEVYNIYSDDDYTGSDRRRPEFNRLLNDAENHKFDIVLCKTQSRFTRELELVEKYIHGLFPVWGIRFISIVDNADTANKGNKKSRQINGLVNEWYLEDMSENIKSVLTDRRKNGYHIGAFALYGYKKDPDQKGHLIIDEEAAKVVREVFTLFSQGYGKTAIARILNDRGIPNPTEYKRLHGLRYKQPKTQNSTLWRYFAISDMLVNEIYIGNMVQGKYGSVSYKTKQNKPIPKDQWIRVEGTHEPIIERELWDRVQSMVTEKAKPFTVGTVGLFARKARCMNCGYTMRSSKTSDGRRYLKCSCRHVSKDSCIGSFISIPKLEKAVIDELNCLSREYLNKDELEQKVQFNNNLQEQKKSVENEISIYEKKISEYTKGIRELYLDKVKGVLSESDYLDLSKDFSKEKERLEKLVADTQKQLDVIERKMQAGDNRRQLIEQYTNLEHLDREIVEILIDYILVGKKDPVTKNVPIEIHWNF

SEQ ID NO: 244 - protein, 521 aa, unidentified
  source 1..521: note = Bacteriophage uvig_151346 from the Index of /pub/databases/metagenomics/genome_sets/gut_phage_database (ebi.ac.uk)
MNVILYCRVSTDEQREYGASISFQQDALNDYCIRRDYTVVGCYIEDYSAKHHDMKRPEMRKLYEYCKRHKREVDLILFLRWDRFTRNIEFASKYIREFKEMGITVNSIENPIDFNSPDWSTLIGVYCGNAQAENAKISKRTKQCIRETLKKGKWSNKAPRGYKNVRTSKFETHIEIDPETAPYITQAFREVAKGVESVERIRLRKFRNIPQSSFLPMLRNPFYIGKIRVPATMTEPEQLVDGQHEPLIDEETFYRVQDIFSGKKKESPKLSKTADPMLFLRKFLVCPICGHSITGATSKGNGGRYTYYHCCHDPKHLRARAEAVNEAFAKYVGALRPNNAVMRLYEAVLRDVNGEDILNRKEAIKRLEKQRDEVSEKIGKADDKLLDGVINQSTHDRIMERCKNDLADIAERIAMLETCNRTKLEPKLKYAMSLINNLYTMVTDAPMEVKIPVLGSMFPEKIEFDGEKYRTNSYNKVLDIIYQQTNELRGGDKTKRGADYSTPQFSTRTRARTGMDCSNGV

SEQ ID NO: 245 - protein, 479 aa, unidentified
  source 1..479: note = Bacteriophage uvig_282034 from the Index of /pub/databases/metagenomics/genome_sets/gut_phage_database (ebi.ac.uk)
MDQSNKENINQLRVGCLYIRVSTTDQEELSPDAQKRLLLDYAKSNHIVVPDEFIFEESVSGRNAQKRPKFQQMIALAKSSEHPVDVVLVWKFSRFARNQEESIVYKSMLRKDHVDVISVSEPLVDGPFGSLIERIIEWMDEYYSIRLSGEVLRGMKQKALNNGYQSSPCLGYDSVGKGKPFIINEEDFKIVSYIMDQYDNHNMDPTAIARKCNEIGYRTRRGGLFERRSIEYILRNPFYCGVVEWNGIRFEGTHEVRYTREQYENRIRLMDSRKPPKRHRNISACQHWLSGLLKCSICGATLSYNYNKQCSFFQCWKYAKGFHKQSSCISVKKVERTVKECLELLMRGENSAYIRRQPKPVDNTDEINSLTRELNRISVKEMRVKDAYENGIDSLQEYKENRIRLNKQRQELEERIKVLDSQTTHCKSESEFLKDCEAAYNAIVDPDVSNEERGTLIRTVFESISFDRKSGELLFDAKS

SEQ ID NO: 246 - protein, 577 aa, unidentified
  source 1..577: note = Bacteriophage uvig_69193 from the Index of /pub/databases/metagenomics/genome_sets/gut_phage_database (ebi.ac.uk)
MARKVRNHPVPRDKMSENKLSEQTPKVKTHDFSVALYIRLSKEDSGKNNQNTVENQKALLEDFVKDKPDMKVVDIYIDNGFSGTNFERPAFQKMMEDAKRGKINCIIVKDLSRFGRSYLEAGNYLEKIFPFLNIRFISVTDHFDTFAVISSEDVRGVANGIEIPLKNIINEVYAKDISRKVGSAIEIQKREGRYGGGVAPYGYKKSSTVKGKYEVDEEAAEVVRYIFRLRSEGYGYCSIVKILNEKGIKSPSAYRYEKGIVRNEKGSNVLWKIYAIEDMLRDEVYLGNMVRGKTHSAMHKGEKRHYVPRAEWVIVPGTHEPIVSKELFEAVQAVNEKKAQEHKDNLEKAKENPKRDNLFKGKIFCGDCGITMGGAVGNYNSMSYYCPNYRENGAMGCVKKHISARKLEKAVLEAVQIHLKIFLEGREEIRSRNGSAEIGKRRMVLESETRDLRQKEAQYQQKLSSTYLDYKDKLLTVQEYFMLKNKYQAALAELEVARKEKELLLNKMQETYGEDLELSHAAEKYFGQMVVTKDMVDALIERIEVFAKGRIHIIFRFEDEYRSLLEKRADMEQEGAN

SEQ ID NO: 247 - protein, 508 aa, unidentified
  source 1..508: note = Bacteriophage uvig_318656 from the Index of /pub/databases/metagenomics/genome_sets/gut_phage_database (ebi.ac.uk)
MQKYVIALYIRLSIEDYKYDSLSIENQSLVLHEYAASMPEALNAEIMEFIDNGYSGTNFERPQVQKLIELVRANQIDCIIVKDFSRFGRNSIETGYFIERVFPLFHTRFISISDDFDSSKFKGDTGGMDVAFKYLISEYYSRDMSIKTKSAKYAKMQRGEYQSKICPYGYRKSADGRMEPDPEAAAVVQLIFQLAAEGINATAITRELFRRNIPTPGQYKAARGNHTHDISRCHGIWSTSTILRILEDERYTGVYVIGKRAVLEVGGNRSRLKDRESWYIIPDHHPAIIEKAVFDTAQASQLRFSQPNKKKRDYPLKGKAFCGCCGHALSRTMQKTSYYYCRHSEADEESRCHKMRLNAAELEQAVFLTLKKQMEAAAPLAPDGTLRVDASVPERTEYEQQIEALQDGKRALYERYLMGEIDLNTYKAEKTACDELLLKTKNAYAAVLAQAKQKRDEQARQDSRMEASKAIFDADTLTTELAELLIDRVLVYPDKRIEIAYKIQDIFD

SEQ ID NO: 248 - protein, 460 aa, unidentified
  source 1..460: note = Bacteriophage uvig_227965 from the Index of /pub/databases/metagenomics/genome_sets/gut_phage_database (ebi.ac.uk)
MAKQLIRVALYTRVSSDEQVEKGDSIRDQQERGKKYIDSHDNMILQDIYTDDGISGQKLKRDEFQRLIQNAKDNLVDLIIFTKLDRWFRNLRHYLNTQATLEKHNVSWTAIDQPYFDTSTPYGCAFVNQSMIWAELEAKNGGQRVRDVFKTKVTHGEVITGKVLRGYRIEDKHLVLSQEAPIIYDCISYFLKTQSLGRTIKYMRTTHGIIMTLQNFKNSYLRNEKLTGRYRGNEGYCPRLISDEMFADIQRILDHNSNVRVTQKYPYIFSGLLICAECGYKMSGCHINVISKKVSGKVYRYKYPAYECKQYRAYLKCSNGGEIRETTIEQYLLDNIAKEVDQYIAKYATVQKDVIDNRATKNKLRKKLERLKELYLNEIISIEEYKIDRIALENQIESIPDIVEPKQNIMELKRLLASNFETIYSTLSNEEKRKFWRSFIAEIRVHKSVRRSRKYDIDFL

SEQ ID NO: 249 - protein, 513 aa, unidentified
  source 1..513: note = Bacteriophage uvig_182406 from the Index of /pub/databases/metagenomics/genome_sets/gut_phage_database (ebi.ac.uk)
MAKRLHGALICARYSTDNQNPDSIEVQVAKCTEWCHTHNIPVLGVYADEATSGMKDTRPRYAAMMRDLRDGVGDMVVIYDQSRMFRKMTSWFSFRDQLTQMGVDVVSVTQPMIGKDLRDPTNFLTEGSMALFNQIWALQSRQKVMEKMRFMAKNGQHTGGKPALGYEVVDGQLAICEAEAKIVRRIFEEYGSGKSYREIVAGLNADGIKTKRGSAFGANSLHDLLKNEKYIGTLVYGQRPYREDGTRNTHAAAADSIRIENAIPAIIDKELFAKVQDKMAANKRQQGGRPPTKRDYPLKGKVVCAECKSAMTISTSQKIYDYYKCSGKKRRHDCDGVNISVDVLERTVANAVRQVLGSPKNVERLITILRDQSGEIQAQAVDALRQLIAREREISRKLDNATDAILGGLSSPTLLARVKDLEQEKTEIDRQMRELKATVDASAIPETRLREIIDEISGDNPAGNAALLAIVCRVEVAKDTITIWTMLDTHPDGTFDWSEEGVLITPGTTSGVP

SEQ ID NO: 250 - protein, 507 aa, unidentified
  source 1..507: note = Bacteriophage uvig_166254 from the Index of /pub/databases/metagenomics/genome_sets/gut_phage_database (ebi.ac.uk)
MPNILNNNVVYDDNTKQLLYQSEDENGNTRVSTEMQPQSALDSQEAVACEFAKCNNIDIIKVFSDKGISGTTDNRPNFQEMIKYVENQNNDIQLIIVYKLDRLFRQEQLFNVYEYRLNKCGVFVLSATEETYKNDIGSRVLKAVTLINNEFEAKKIRENVKRGQTYTAKQGKTNGGIAPLGYDINADGKYVVNPEEAKIVKKIFEMKSNGVTYEQMADTLNKQNYRTKIGRKFTKNSFHEILTNPKYKGVFVYNRSALATEYNKSPNRHKYKSADNIITVKGKIERIVSESLWDSVQPKKNLSGKTNKGKYLLSGLVKCPICHNSYHVDTKGNVQYLRHNKNKTDKCINSIPMDNVKEKVILKVINKIFSKYNVEYFTNNFDTISQTQTASIEQHIKKLKFKINALKVKYDNLLNTLSETTDENIKTSITDKLTSINTEISTYTNSIEKLKNSIPQPPTKDNIRTSKKKLKAFLTNPNNILDSKKLIHSIIDSVYITENDIKVIFKE

SEQ ID NO: 251 - protein, 517 aa, unidentified
  source 1..517: note = Bacteriophage uvig_586179 from the Index of /pub/databases/metagenomics/genome_sets/gut_phage_database (ebi.ac.uk)
MVAAAYARYSTERQNETSILAQLQAIEAYCAQHDLTLYKHQYIDQAFSGTNTDRPAFQQLLSDANRHCFDAVVIYDISRGSRDVVDWFAFRRQMQQLGIAVYSVTNTLGDLDDPNAFLTEMITAGLGQHMVLQTRQKSIAGKRIKAAQGLFCGGVAPYGYRIENARYVIDEREAPAVRLIFDMYVNGHSYGDIIAALSASGFCTRSGRRFSSTALHDILSNQRYSGRFVWFERVERHMHKHVGKPGDPITVEDAIPRIISDEIFERVQKRMETKIIRKRGKREYMLSGLLKCGLCGASLAGTTVTSKGIEYPRYSCIRRHKEHNCDLVTLKADILDKAVAQIIREKILNRDLIEQTAQLVIDRYSASKEDTSKLQARVAASSAKIYRLISMAADLPETPPEMRQQIIDETARKKALEAQLVAAQKSELPVTKDDVIALLERDCDRLAETPSLLREMALTYIKQITVYNDRLDICYYLIPGLKNNNPSDTDGLLTGALPRYESRLLYNLTIPRPDLAA

SEQ ID NO: 252 - protein, 514 aa, unidentified
  source 1..514: note = Bacteriophage uvig_275384 from the Index of /pub/databases/metagenomics/genome_sets/gut_phage_database (ebi.ac.uk)
MTKAVIYARYSSHNQREESIEGQIRECQDFATRNDLTIVGEYIDRAISGKTDNRADFQRMIKDSERGHFQVVLVYAIDRFARNRYDSAIYKAKLKKNGVKVFYAKQHIPDTPEGIILESVMEGYAEYYSQNLAIHIKRGMKENALQCKVTGGTTPLGYRISENKTYEIDPAGAKIIREIFEMYAGGASATQIVTYCNEHGYRTARGGSFNKNSLRTILLNDKYIGVYRYEDVEIEDGVPAIIDKELFEKVQTMFHHNHAARARTKANADYLLTTKLFCGHCGSNMVGESGTSQNGEMHYYYKCSNRKRSHSCNKHTERKEWIEEFVVRHTVNTVLTDNNIEMIATKAAELMEKEFAESSVLTTLEQTKKDIEKRIKNMLDLMEQGIVTASTRERLLELESQKSDLEQRITRETMKKPPLSKERILHWLYSFKGGDINDMEYRQRVIDTLVNSIYIYDNDGGNSRKIVFTFNISGQNTSVVNCSDIACFAPPYGANPNTFFFVKNVFGFAIEVTV

SEQ ID NO: 253 - protein, 515 aa, unidentified
  source 1..515: note = Bacteriophage uvig_128002 from the Index of /pub/databases/metagenomics/genome_sets/gut_phage_database (ebi.ac.uk)
MSYLIYLRKSRKDLENPLMTTEEILNRHECILLDLAKKMNLSIGDIYREIVSGDSIAARPVMQKLLREVESGMWEGVLVVEVERLARGDTVDQGIVQRTFQYSETLIITPQKTYNPSSESDQTFFEFGLFMSRQEYKTIKRRLKSGVMSAVREGKWPYNSAPYGYRRYKLENQKGWSLEFDDQERPIAELIYHLFCDEKRGLGYISDYLEARNIKSRTGGRFTESFLREFLRNPVNDGKVFYGRRKVVTKIVNGSSVRTRPRADEYIEVAGLHDPLIPHDLFLKAQERFRVSTPRNPSSYTVKNPLSGLLVCSECGHKLQRRPASTSKRGAPYDVLMCKTRGCPTVGSAVEVIEGEVLYALEDIVRGYEADVPSVPSLVPQKEELLHNAILHRTDLNKQQERIYTLLEQGIYSTDVFLDRSKALEKQMQEVNHSIEVLKNELEEEKIKYNNWKSFVPTCKQLLEIYWTLTPDAKNSALKEVIDRIEYKKLTRNPKGMCDVATFELTLYPKIPMKS

SEQ ID NO: 254 - protein, 542 aa, unidentified
  source 1..542: note = Bacteriophage uvig_8240 from the Index of /pub/databases/metagenomics/genome_sets/gut_phage_database (ebi.ac.uk)
MQVYKAIKYIRLSYTDDKTTESDSVANQRRLIDDYIARHPEIEVVAEKIDDGYSGVLFDRPAFQEMMRMIEQGEANCVIVKDLSRLGREYIETGRYMRRVFPAYGVRFIAINDNVDTENDAADDLTVSVKNIMNEAYCRDISVKTRSALEVKRRSGDFVGAFTIYGYIKVGDKHKSLEVDEYAANVVRDIFRKRLEGFSASHIADELNWMGVLSPLAYKRNNGMPHAKGGYTDRKDCKWSATTIIRILQDETYTGTLVQGKQTTPHFKLKEREDKPSSEWIRVEGAHEAIIQKHDFDLVQRLRRIDTRTSPKSDKVYLFSGILICGCGGCRMTRKTNRYKDKEYHYYYCPTGKKNGCTSSVMVKESDLIECVQDSLKGHIENVASLDALLSSISQERINRELAQEYAAQIRVNEKRVAQTEGFKAKLYENLVSGILTKEEFLSYKRKYNADIELLQKAIAEWNEKLTDVLENRSERNRWINHFMQFSTMEDIDRRAVMQLIRSIRVMGKDELHIEFNYQDEYQKAVSLAEQIAAHNEERKVG

SEQ ID NO: 255 - protein, 507 aa, unidentified
  source 1..507: note = Bacteriophage uvig_86984 from the Index of /pub/databases/metagenomics/genome_sets/gut_phage_database (ebi.ac.uk)
MKKMKNNELLMGEYLLLYLRKSRQDNENETVEEVLSRHERQLQEYAAKTFGAVIPEDRIYREIVSGETIDDRPEMKKVLKRIEDPACKGVLVIEPQRLTRGDLLDCGTIVHAFRYSKTLVMTPTKIYDIEDKYDRKFFEMELTRGNDYLEYTKEILTRGREASVHEGNYIASIAPYGYKKVKNGKEQILVIDPVEAEYVRMAYHWYVYDGLGAANIGHKLNEMGAHPRKSKYFRPTAIRQMLTNEVYIGKIRWGHKKVIKVFEDGKVVKKRPRNPDYELIQGKHEPIISEELFNLAQEQKNKSTREHYDSTLKNYYAGLIKCKKCGYAIGMRIHRQKGVVYRRDRYYCRNGRYCDQKGSNAEIVNDAILKSLKGYLQDFKIKISGTNKELYETQMTVIENMENELGKLSKKEMDLYDYLEDGLYTKEVFKARMDLLKKEREELIEKIKKAKQTMPSVEKYQRQYYSLMQAIDAIENPNISAKDKNQLLKNIIEVIYYNKEQADIQTK

SEQ ID NO: 256 - protein, 563 aa, unidentified
  source 1..563: note = Bacteriophage uvig_425758 from the Index of /pub/databases/metagenomics/genome_sets/gut_phage_database (ebi.ac.uk)
MQKNIQSVITGNTFTTSPIKGTDTGITALYCRLSQDDGNVGDSDSIINQKKILAEYAERNGYTPYQFYIDDGFSGANFERPQFKQMIEDAQKGIVKRIICKDLSRFGRDYIKVGLYTEFIFPDKDIHFIAVNDDVDSNVQKDNDLAPFKNLFNEWYARDTSKKIKAVKKAKGLAGEHMSCVAPYGYRKNPDNPKEWLIDEESAEVVREIFRLCVDGYGPRRIANILTERKILIPSAYALEKGYAVRNNIPKNPCQWSSTVVVDILERMDYLGHTVNFKTHRKSYKQKKKIENDKSEWKIFENTHEPIIDKSTFDIVQKIRENRKRPTKIGEIPMFSGILYCADCGKKLSFHRRVNDPDSKHNFVCSNYRSNTHNCSMHYIRNVVVEQLVLENLREVVSYVKAYEDEFVQMVMDADIKQKNKELAKKKRLLSDKEKRYVQLDGLFQRIYEDNVSGKLSDERFMKLSQGYEAEQKELQAEIESLRMELSQEEKQSVNVKSFLFTVKKYTEIPELTPEIVHEFIDRIIVHEADKSSGKRIQEIEIIYNHIGVFDRSKVNVYMGKAV

SEQ ID NO: 257 - protein, 408 aa, unidentified
  source 1..408: note = Bacteriophage uvig_158104 from the Index of /pub/databases/metagenomics/genome_sets/gut_phage_database (ebi.ac.uk)
MAPKALEIGAAYIRVSTDDQTELSPDAQLRVILDEAKKDGFVIPPEYIFEEKKGISGRKADNRPEFQKMIAIAKSQSPAPFKRLYLWKFSRFARNQEESTFYKGILRKKCGVEIKSVSEPIMEGMFGRLIETIIEWFDEYYSYNLSGEVVRGMTEKALRQGYQSSPSLGYEAVGEGKAFVINEETYKIVEYIFQSYYDGKDMTAIARACNEHHWRTRRGNPFERRTISRILQNQFYNGTVLWNGYSFQGTHEVRPSVTKIFPAVQERIRAEYRPLNRREVSSCGHWLSGLLVCSVCGASLSLNRVRSNHGSDFFQCWKYSKGLHPGSCAITVAKAEQLLLHSIKTVLESESVEYEYLPQETTAAATEQDLITDALDKVTLKELRIKEAYEAGIDTLEEYKENKLRLAA

SEQ ID NO: 258 - protein, 555 aa, unidentified
  source 1..555: note = Bacteriophage uvig_567103 from the Index of /pub/databases/metagenomics/genome_sets/gut_phage_database (ebi.ac.uk)
MTKQPDKITALYCRLSRDDEQDGLSGSIKNQQTILEKYAQENGFRNTRVFIDDGWSGTNFARPAFTEIMELAEKGLIGTLIVKDHSRLGRNRLIVGQLLEEGFDSLGVRYIAIMDNIDTAKGISDLVPMQDLFNEWHAKNTSQKVRNVFKSKGMSGAPLTTNPPFGYQKDPESKNGWLVDEEAAKTVRQIFAWCVDGLGPTQIAKRLKAGKIPTPTEHWSNIGRNCSKLPAVPYNWCSATVADILGKQEYCGDTVNFRSTTKSFKNKKKIERPSEEWQIFKDTHPAIIDRETFALVQELRKHRRRPTKSGIVSPFSGLLYCADCGEKLYYSVTGSYKREQAYFFCSSYRKNSEVCSAHYIREKVVEQIVLESMQRILLNVQVFEKEFARKQMDCYTEDKKKLLAAKRRELGKVKKRIAEIDTLIQKIYEDNASGKLSDERYATLSLSYEEEQKTLKAAVPEMQAYLEAETDKTESLQRFIQKVKQITELKALTPELIHEFVDRIVVYAPRYLDGKRVQLLDIYYSGVGILHELTPEEMEEAFQHHLTERNKEKTA

SEQ ID NO: 259 - protein, 386 aa, unidentified
  source 1..386: note = Bacteriophage uvig_58544 from the Index of /pub/databases/metagenomics/genome_sets/gut_phage_database (ebi.ac.uk)
MIQRRDKKRTASAKRIQAAFLEENHIDIEEIPPKEEYVRDTVNKQLRVCAYCRVSTDEESQQSSYELQVQHYTEYINKHDNWTLVGVYADEGISGTSVNHRVQFLQMIQDAEDGKIDMIVTKSISRFARNTLDCISYVRRLKALKPPVGVFFEMNGYNTLDTISETFLTLLSTVAQGESEAKSEALKWSYRQRFKKGIPVNNMWAIMGYDTDENGKIFIIEKEAEIVRFMFTAYLEGKSTVEIAEALTMAEIPTPKGNVRWQPGTVAGMLHNEKYCGEMRMQKTVTVDLFSHKSVKNEGIVSQYRMKNYHPAIVSRKVYEDVQERFLDGGNRARHTKEPKVKVKFKPIKSGLLTGFVPIPSAVEKIDIEQLKEISKKQKSRRTKKC

SEQ ID NO: 260 - protein, 558 aa, unidentified
  source 1..558: note = Bacteriophage uvig_42250 from the Index of /pub/databases/metagenomics/genome_sets/gut_phage_database (ebi.ac.uk)
MDIHETRQKLKLKNIFDINLRVTFYARVSSEKDEQLNSLDNQISYYKNLIKKNKNWQYVDGYIDEGISGISVKKRENFHNMIKDAKAGKFDLILTKEITRFARNTLDSIKYTRDLLSYGVGVFFQNDNINTLDEDSELRLTIMSGIAQDELRKLSSRIKFGHQQAIKNNVVLGNSRIFGYVKDGKRLVIDETEAEMVKELFTLYATDNYSMKQIENIFWEKGYRNLNGNKIVHSTMSNMISNPKYKGYYCGNKVKIVDMFTKKQKFLPPEEWVMFKDETGEIVPAIVDEDLWERANKVLQKRSNDVKNRKGICNHDNLLTGKLFCTHCGKPYYRRDSKDRNGNKNSIWVCSGKVKNGKDSCPSFSIYESEIKPILFQVFKDTSADVDSLIEQYIEMYKSLDEDNCISKSIKSIRNKVDLANRKKSKLLEYNISGKLSDNDFINMNTQISKDITKFEEEIAALEEQKNSKDKLKEHIEKMKKLLKQAEAEAQEKIIDKEFIKKYIDKIYVSPENGHLKLSIKIFTGEVTEKYLEDFKSRTGHTFKTNCRTFAKNFQVSN

SEQ ID NO: 261 - protein, 562 aa, unidentified
  source 1..562: note = Bacteriophage uvig_198610 from the Index of /pub/databases/metagenomics/genome_sets/gut_phage_database (ebi.ac.uk)
MARAKNRGYQQSFSPSYTIRRWRLGIYIRLSKEDLKKGKDDSNSVKNQRDLLNDFYRRNIDEFESITEYVDDGHTGTDANREDFQRLLADVMSGKINCVIVKDLSRFARNYSDAGSLIDNLFVQMGVRFISLAENVDSYKNPDSVSNIIVPITNVMNDNYCYQTSKKIRQVFDYKRRNGQYIGAFAPYGYVKHPKDKHRLIVDPDAAENVKLIFTMLIQGSSKRAIALYLNEHGVPSPSAYKVQKGLPVSTRGYDDPMWGARMIHSILTNPTYTGDLAQGRSRVKSYKVHQIEAVPREEWVEVAGTHEAIIDYETFDKVQALLQRDTRTSPKGREVHLFSGFLKCADCGRAITRCVGKNNNVYYSCSTYKNRSRTACTMHSIKHERLEAAVLFAVQHQVHLAVSYSEIVTQINSAPIKKSQSYRLDDLIAAKERELTKITRYKQSLYQDWKDGEITQQEYRDMKADYERQTSDISAVLTRLNAERAELANGVDNEHPALVAFMKYQNIEALNREILVELVDYIKVYENGNISVKFKYADEFRRMAEYIELNSHSRTTVCEFS

SEQ ID NO: 262 - protein, 535 aa, unidentified
  source 1..535: note = Bacteriophage uvig_507007 from the Index of /pub/databases/metagenomics/genome_sets/gut_phage_database (ebi.ac.uk)
MSKEYNIGIYIRLSMADEDTGYGSKAESDSIGNQRMLINRFLDNHPELSHCQRSEFADDGYTGTNFHRPQFTQMMEKVKRGEIDLICVKDFSRFSRDYIETGNYLECTFPFMGVRFISINDGYDSNDYKGTTGGLEVVMRSIIYAAYSKDLSVKTTSAKIQMMKQGKYVGGYAPYGYVLHPSIRNKLAVDPEAADVIRRIFREALEGSNTSQIARSLNDDGIPTPGQYFKSKHPDKKKFSNMSEKISWETVMVYNILKNLVYTGTLVSRKMKSCGVGSKKRVVNEPIIVEGTHEAIISKEDFELAQKVIRGGGRNPTRKQHDYPLKGLVRCGNCKRAMTRRKNKAGIRYFQCIHSVNNGNTDCPVGRSFPEMDIEKVVFHALTQFLALAQKEAVQNREVGDLRKSAIKECADKIRTLQKQNEQHKASKLRLYEKYAAGSITKEAYIQQKAAAGVKIAENDGAIQRSHERMKELDSETACSDEKLDAVCEQYADCKALTYELTHAFISAVYIYDLDNIEIVWKFKDFLTTSEGEAK

SEQ ID NO: 263 - protein, 531 aa, unidentified
  source 1..531: note = Bacteriophage uvig_232060 from the Index of /pub/databases/metagenomics/genome_sets/gut_phage_database (ebi.ac.uk)
MNDKIAIYLRLSLADGDLKKGSKDESNSIENQRMLLHDYIGKQEDLFGEIVEYVDDGYTGTNFNRPAFQKMIVDLKQGNIKVIMVKDLSRLGRDYIGVGDYIEQIFPLMGVRFIAVNNSFDSMKLNNGTPGIEVAVSNLVNNMYSRDIAKKIRAALETNWKNGKATCTNVPFGYVWNKKGGRRWEIDPEAAVCVKKVFELALSGCNTTQIAYGMNELNLPTPGLYAKRKNLLMGSNPIIAPDSEMLWNAAIVWRILRRYEYTGALVMGRRKKIDVNTTSVRTLPEDKWIIAENAHAAIVTRDEYYQAQKAIRNVTPIQYKVGDDFALKGKICCGNCNRQLRHERQYGEMVFYCGYKRSAGKFSKCYGGYYREYSVNAKVARAIKTVFYALDVVNQGMQEKQSVTVRCMDIEDLEKQAEAIRVEQIKLYESYADGVLRRDAYIEKKKALSEKLAALQDSIRTEKEEQECADELDEEIRALTKQASEKTYIGGLTKECVDAFVSMVYLYDDQTMKIEFNCEDVIRRALEKYGT

SEQ ID NO: 264 - protein, 489 aa, unidentified
  source 1..489: note = Bacteriophage uvig_598290 from the Index of /pub/databases/metagenomics/genome_sets/gut_phage_database (ebi.ac.uk)
MDDLLKIGASYIRVSDERQDEYSPDSQLKKIREYASKEGYIIPDEYVFYDDGISGRSVKRRGDFKRMIATAKEKDHPFDTIYVWKFSRFARNQEEAMVYKNLLRKSNVSVVSVSEPIPEGHFGTLIERIIEWMDEFYSVNLGAEVSRGMEEKFTRGEPTCSPPFAYYMKDKKWLVDEENAAIVREVFQRFADGEGTRAIAVDLGNRGIKTKHGSVPDNRWIDYMLNNPAYIGKLRRSPNGSRAISKRSYRNDEIMIIDGCHQAIISKELWDSVQERIKMIKSIYPKYAKREQPIDYMLKGIVKCSSCGGTLIMSSVTSGKSNTPTLQCCNYSRGSCTVSHSITVPKMEKALMDGLDRVIRTKQFNIVPRTPKDPDAAPVDYDRLIAIEERKLERAKQAFLAEVDTIEQYAQNKEEITARIERLTAKRDEEAPRTEIDLDAYVRRVTEIVNFVNRNDVSEGAKNEALRTIIESVICEKNRDNLAIYFYEF

SEQ ID NO: 265 - protein, 623 aa, unidentified
  source 1..623: note = Bacteriophage uvig_73872 from the Index of /pub/databases/metagenomics/genome_sets/gut_phage_database (ebi.ac.uk)
MSKQPEMVIARNPRATRNNDTTLNLDNQMYQQPVTSFQRVSNDAPLSEETKTAIQNTVLQFYVHSQPQEEAEGITACYERLSQEDKLDGESNSISNQKRILEKYCREHGYTAIRHYDEDDGYSGTNFNRPGFQRMLADIKAGKIKRVVVKDMSRFGRNYLQVGMYTEMLFPEYGVHFIAVNDGVDSVRGDSEFTAIRNVFNEMYAKDTSKKIRATWQSKGRSGEHLTTIPPYGYKKDPENKKRWIVDEEAAAVVQKIFALCMDGMGPTQIAKWLQENKVLSPVAYCYENDLPTTSKRPTDPYKWATKTVVHILERLDYLGHTVNFKTSKQSFKSKKVLWNDPADWVIFENTQEPIIEESVFLIVQKIRQGRRRPTKMGDMGMFSGLLFCADCGGKMYLCRANHFKPEQEYYLCSTYRKDRTLCSTHSIRRVVLEEIVLRNLREAIQYVTQYEDDFVQRAADQSLRERDKELAQKKDTLAQSQKRIAELDVIIKRLYEDNISGKLSDERFIKLSRDYELEQTNLTNLVEHLRQEVKEQEKQKVNVRQFIAAVRKYTDMQQLDAYILREFVDKIYISEVYTPDENEPRIKVREIEIVYNFIGAFDFEEAREQSQAAQKEKKTGVA

SEQ ID NO: 266 - protein, 441 aa, unidentified
  source 1..441: note = Bacteriophage uvig_41106 from the Index of /pub/databases/metagenomics/genome_sets/gut_phage_database (ebi.ac.uk)
MEMKITKISTLPQLDRKKRVAAYARVSTGKDAMLHSLSAQVSYYNNLIQNNNEWEFAGIYADEAMSGTKDNREEFNRMVDDCKAGKIDLIITKAISRFARNTATLLSTIRELSSVGVDVFFEEQNLHSISGDGEMILTLLASCAQEEARSASENVKWRVKKDFKQGILNGGNDCYGYKLIDKKFVLVPEEAEIVKMIFAWYICGEGVVAISKKLDDMGIKPVRAKYWLPNTIMRMLKDRCYVGDLILQKTYVTDYVSKKKKRNHGEFDKYFVENDHEPIIDIETFKKANALMVERAKRFKAQDRTALRYPLSGKIVCGECGSRFGHKVYMHSSPGWICSAFDRKGKKACQSRKVPEYAMDEAVDAVIGGYDNIKVLDFIEVFNNNRLLFHLKNKEIKEFIWEERSRSQSWTDEMREEAKKRTIINNKNKKRGANGKWQKSE

SEQ ID NO: 267 - protein, 551 aa, unidentified
  source 1..551: note = Bacteriophage uvig_53580 from the Index of /pub/databases/metagenomics/genome_sets/gut_phage_database (ebi.ac.uk)
MKVIGYTRVSTNNQDLKRQKDLIKDYCKQKGYMLSQILEDNGISGAVDDREGYKALLSVTKDDADLVIVSELSRISRSEDVQNTLYNIHSLLAKGIKLIMLDEPEHIYEGKLDLSQFLLLAIKAYGAAEERLKTRTRMNTGKETRMITNPMADLDAHKPYGFVSAPNPKHGLSGEPKKVWAIDEEKMAQVKEIFELVASGMSLFKTAEYMNIRYHDRGFLMKSIFEIIHRTEYKGIRKRAGKIYQLPVCPIPVELWEAANKGLKDRTAIKDNHRLYFNPLKGIGKCVCGRNLGVNQESKKLSYQCADKMINRGDKRKCHVPTTNYNLVNLVVWNICRQMVLDKDYEAKSNEAILKLEADNQRLEESKVEYHNSISELDEEINTTAEKFASSTDLNPAILNALNVRVNKLDAQKKELENRVVDIDREIALNNRRIQEERKIQTQKELSDVSLESKSKFFHQILNSVYTYSARAKSGVIVVNFKNGLQVIALWKNHFKTSVWYLPVGFQFDIEKRMIYVKTMPKTEGLDFTISEPETKFYEYRDLFKHFDLTK

SEQ ID NO: 268 - protein, 594 aa, unidentified
  source 1..594: note = Bacteriophage uvig_504803 from the Index of /pub/databases/metagenomics/genome_sets/gut_phage_database (ebi.ac.uk)
MEISGTNKLILPKDIILADRERERIIVYYGRVSTEHEAQLSALENQLQWYDDQSKYHPNWKVLRKYIDEGITGTQAKKRPAFLKMLEDAKNGQFDLIVTREVCRFARNTVDTLVTTRELKKIGVEVYFVEDNIWTMDGDGELRLTIMATLAQEESRKTSERVRAGQKISRDNGVLYGNGNILGYDRVGDTYVINEEQAETVRLIYNLYSQGLGFKKIINELVSQHRKDSYGLVRWECTKISRILHNATYKGYMGYLKSFRNNYLEQKSIINRDESTHLYIKGKFEPIVSEELWEKCRQIRESKAMKIKSYGGKERVVGFKPSNDIWVKKMKCRCGSSFRRCKWHKNKSGELIYGYQCYNQLNNGSKKIRESAGISTEGYCDMGTIGDWKIDMMAQKIFQGLCGEQRECINRSYSIYENNFRAKGNNSNNQKEVLLSKIEKSKVKLNNLTNMRMEGEISKEEYQECRQKVTDEIATFQKKLKALVEEKKEPDPAVIKMSLDEFAAILIEKIDFNAPIIDRGIIEQFVEKIVPRNTLEFDWYLNLIPHIFEDNSSTGYNEVWTFVINFDEAEKYRKLRGGFLRKNQWRDLTVHVFV

SEQ ID NO: 269 - protein, 549 aa, unidentified
  source 1..549: note = Bacteriophage uvig_198801 from the Index of /pub/databases/metagenomics/genome_sets/gut_phage_database (ebi.ac.uk)
MEEFYDVIDYNTILEKINNDLNNEIYLFYLRKSREDIEYEKENKEYKTLERHQKRLITLATSMGIKVNEDYIIPEVVSGDSIAERNSIKVVLKLIEHPKVKGVWVIDVQRLTRGDLGDQDKIIKTFKYTNTLIMTPEKEYNLQFPADEEYLIDKLAYSRKEYLGIKKRLTEGRKDSVMEGKVPYSRAAFGYERYKLKGQKGYSLRIVPEQAEIVKDIFKMCLEGKGTFAIATELNKLGIPSPNGCKWRKNGIREMLHNKTYIGKVKWQERQQIKIIEDSQIKTKTKRNKENEYLICDGLHEAIISEEDFEKVQELLKQSSTKYVPLDLSMKNPLSGILRCSVCGKVMARREGGQNVYYSPRGSGLNPKYYKAKDLVWCSTNKECGTVSNNLEDVEDMIIESLKEIVKQRKQILNNYTKNENTVLDNINNQLEIIDNQIIKEEKKLNKLRDFLEDGIYDKKVYIERSSIILSNLEKLKNKKLEINENNEHLKMEKLREAIPKVEKGIKEYYKLDVVDRNIFLNEFIEKVLYTKTKIRSESDLKLDIYPKF

SEQ ID NO: 270 - protein, 610 aa, unidentified
  source 1..610: note = Bacteriophage ivig_3837 from the Index of /pub/databases/metagenomics/genome_sets/gut_phage_database (ebi.ac.uk)
MKRPDNNKITALYERLSRDDELNGDSNSIVNQKKMLEKYAKEQGFTNLAHYTDDGYSGTNFDRPDWKRLTADIEEGNIGCVIVKDMSRIGRNYLEVGFYTEVLFREKGVRFIAISNGVDSTHSESNEFAPFLNIMNEWYVRDTSRKIKSVLRNKGMEGKHLTSNAIYGYKKDPEDNNHWLVDEEAAAVVRRIFQLIIEGNGPMQVARILTNEKVERPSYYLAKQGLGTCRGKCDMTRPYSWTATTITDLVSKPEYMGHTVNFRTFKESYKDKHSQYANPEDWLIFRDTQEAIVDEDTWYMVQKIRETKHRPIAQGKANPLTGLMFCADCGAKMFNHRTKGYEKKDKDGNPTGKYTNAQNNYTCSTYSKAKGHFENKCSQHHVRTDVVRDLILTTLQYTASYVKEHEDEFLEKVRKSNVLKQELDTKALTKKIAKSEKRVAELDHLIKRIYEDNVSGKLSDKRFELLSTDYEKEQSELEEFLTSAREQLATAKEEASNVNKFIALVHKYTDFSELTTPMIHEFIDRIEVHEADKSTGERTQEIDIYLKYVGKLDVPMPELTPEELAEEERKRRKRAWNRTYNRRKAEKERAEKEKAALEAATDTDKSKKGA

SEQ ID NO: 271 - protein, 521 aa, unidentified
  source 1..521: note = Bacteriophage uvig_58201 from the Index of /pub/databases/metagenomics/genome_sets/gut_phage_database (ebi.ac.uk)
MPRQTKKLQTKATKGVIWARVSSREQEDGYSLDAQIENSKKYAERIGIEIIKTFEVTESSTHGDRKQFHDMINWVKRQKQSIAIICDKIDRLQRRVSEVPILEELRKEGKIELHFSRENRVIKKDTNGSDLACYRMIVVMAENYTDCIADNVKRSFNQMRKEGKWAHKAPVGYKNVKDSKGNSDIIVDPDRGFLITALFKEYASGIYTLEQITKKAREIGFTMPKCKKLYKQTIRNILTNRFYAGEMYGKGDYYAHQYKTLIDWKTFNRCQEILEGRINHKEQKHEHLFKGIMKCQKCGAMISPYISIHPAKKKGGEKIAYKYLFCPKCKGTHVNEAKGVEKIIQALNVLKTLPRGVLEKMVACLDDLIYEDHKIEIERKKALERKLASFNDKEARWHELYAEASITRDFHSKKLTELSKEKRAIEEELLNYQHIAKQDFVTLKYLASLFLHADQIWNFPKIEQKQKILKLLCSEILLDGKNIVISIRKPISALAEIGSCQIWQGRQDSNPRHSVLETENQ

SEQ ID NO: 272 - protein, 627 aa, unidentified
  source 1..627: note = Bacteriophage uvig_312745 from the Index of /pub/databases/metagenomics/genome_sets/gut_phage_database (ebi.ac.uk)
MTEKQGFMTALYERLSRDDELNGESNSISNQKKLLEQYAKEHGFTNLVHFTDDGISGTRFDRPGFLAMMKEVESGKVGTILIKDMSRMGRDYLKVGQYMELLRQKNVRLIAVNENVDSFREDDDFTPFRNIMNEWYARDTSKKIKSTFKAKGKSGKHVASTTPYGYLKDKDDPNVWIVDEEAAVVVRRIFHMTMDGYGPYQIAKALKEDKVEIPAVHMAKKDAGLWKGRVEEIKDPYGWGSSTVAGILKKREYLGHTVNFKTRKHFKDKKSHYVSEDNWTVFENTQEAIIDQETFDNVQRIRSNVRRYPDGWGEAHPLTGLMYCADCGSKMYVHRVNNGKRVPQYTCSAYSKVPVGTLCQTQHRINADVVMELIKELLKAVAEYSQLNREEFLETVKKAQTSQQSSEITRLKSRLAEAKKRVQELEKLICRIYEDNILGKLPDERYAILDGQYSKEQKDLSAEIADMEAELSGYEEGRRSAEKFIALVDKYQNFEELTTYMLNEFVEKIVVHERDRKGSVETTQEVEIYFNFIGRYLPPHFGEVKMTPEEIEEMEKREARKDRLHQNYLRRKANGKQQEYYERTKAKKKAELDAKKEEIRQEDIAKGVFIPLSLLPPAEPKKGVASA

SEQ ID NO: 273 - protein, 562 aa, unidentified
  source 1..562: note = Bacteriophage uvig_287346 from the Index of /pub/databases/metagenomics/genome_sets/gut_phage_database (ebi.ac.uk)
MAGQENQQYTVLYGRLSQEDERAGESNSIQHQRTLLEKYAKEEGFENTIFLADDGYSGTNFERPSWKKIVEMIEAGQVANLIVKDASRLGREYLQVGYYMEIYFPQKNVRFIAVNDGVDSTVESSNDFNPIRNWANELHAKDTSRKVRAVMKMKAEQGERLGGRPPYGYRKSDGDANTLVPDEDTAPVVKRIFSLCAAGNGPKRIATILTKEQVVNPSNAYYRKTGKSHRGLDTTRPCLWSSNSVTSILNNEVYLGHSVGLRTTTISYKNKQRVERPESERFVVKNTHEALVTQEQWDIVQEVRQHKKRVPKHMDEPNIFSGLVFCADCGKPLVLHRASTMKRAEYNFKCYTYGKKGKTVCTPHHIREFELKAVVLEDLRRVTHFARMKEKQFAAYISSKNTLELRREMNTIQKDLDTMRRRREELSKLFKRLYEDNVLGRVTDEQYRMLAGDYTIEQKALEEQIPKKEARLEKLKAASANVNTFVEKAKQYTAIDELTPELLRLFIQRIEVGERTEKYSRSSHQSIRIVYRDIGTVDSAMEQGEAQPHIAPPLSEVFELPA

SEQ ID NO: 274 - protein, 503 aa, unidentified
  source 1..503: note = Bacteriophage uvig_569915 from the Index of /pub/databases/metagenomics/genome_sets/gut_phage_database (ebi.ac.uk)
MYNDSKGIYLMYLRKSRADEYNQDVENILKRHEKELQSLAKREFGELIPEKYIFREVVSGGTIKDRPLMKEILKMMESGIIAGVLVVDPQRLSRGDLLDQGHIINAFKYTNTLIITPYKTYDLNDTTGTDVKLLKMELNHGADYLDYYKMIQARGKLASVRAGNFIQPIPPFGYRKVRYGKVTTLEPIEDEAKIVRIIFQKYAEGKTICGVTNELNAEGYIPPSKQIWTKGSVKRILSNPVYDGKIRWGFTPNETVMEDGKLKKCRPERHDYLLFDGKHDAIVKHGLFMSVQERLSKNKSFTNDRSLKNPLYGIMYCKRCGRKISRQNVTESRGGHRYACPNKLCDVQSSRYDLVINAVIDAVQHAIDDFDITIYDCNTSDSSEKIRDLRQELTKLNNKEETLFELLETKVYSTSVFTQRHAELEKKRQEIIGEINTLSLVVPPESCNDKKMRFKDALLALKDESMPPKEKNRLLKNCIERIDYDIEGVRYHSKVKLDVYFKF

SEQ ID NO: 275 - protein, 635 aa, unidentified
  source 1..635: note = Bacteriophage uvig_380944 from the Index of /pub/databases/metagenomics/genome_sets/gut_phage_database (ebi.ac.uk)
MLDTESKRRKEQQKQKVKKRYNVTIDPENYLFIPAKKQTDYYDNDVNQRVAIYVRVSTDDVRQTTSYELQKKYYEEFVTRHPNWTLVKIYADEGISGTSLKKRDEFNRMIADCRAGKIDMIITKSVSRFARNVEDFIGTVRNLAELKPRVGVFFESEAIFSLNDDSQMALTFQATMAEEESHTRSRSMETSLRMRLDHGIPLTPKLFGYTHDEEGELQVNPEEAPTVKLMFYMYLYGYSTQQIADTLIAQERLSYFGKLCWTASGVASVLRNERHCGDVLTRKTYTENYRTHRTLKNCGEKPQSWYFNHHTAIVSRDDFNAVQRMLDNAKYGNKSILPELRVIDSGVLKGFVTINPRWAGFKEADYMNAAQSVYIEDDNVPSESQEPEEMTIQVEAGDFDLRGFEITRTEFFGGYTYPTVTFQDRKIKFSTECIKKFGTKNFVELLINPVEMKFAVRPTDASNRNGVLISKTCGGRPKPRDIPSAAFSDTVFSLFGWNTECKYRMTGFLFEGEGELAYIFDAKDSEAFFKSYVLPTKESGEGGASSVQPLTPIGKHIRAIPAQWTRTFGKEFYLHEQPFSSLASMTKSDWELRIKGQLFETGKKLNVTGFDELKQYITHELGGVMPQEVSNGNLE

SEQ ID NO: 276 - protein, 532 aa, unidentified
  source 1..532: note = Bacteriophage uvig_585281 from the Index of /pub/databases/metagenomics/genome_sets/gut_phage_database (ebi.ac.uk)
MPEKYAIYLRKSRADMEAEARGEGETLARHLAMLQNLARRNGHDIGQVYREIVSGESIDNRPQMQQLLHDVAAGMWAGIYCTEVERLARGNTTDQGRVAEAFQFSGTKIITLAKTYDPNNEFDTEYFEFGLFMARREYKSINRRIQAGRKQSVMEGRYIYSRPAYGYRKVKIHGDKGYTLAIDEQEAIVVRRIFEQYATTDDGLVVIARQLREEGTPTGQYGSVWGESRVHRMITNEVYLGMIRDGHDKQIKVMQNGVILKKRAITRDYTLVQGLHPAIISRELYDACQRKLHSPRPRGTAASPGFNHAQGIPKNDGQYRANSLAGLLVCAECGHIMRRKASCGRQRDRLFCHTPGCPTVATYFEDVEQSILSTLRQWMEAAETDGQPDPNPAIASALARIEALKKEKAATAAQLDKLYDLLERGLYSEELFTARRIALKQRMAALDGEIAEANRQAKTQYVPIAQLYDQIKSLLDVYDHSSAGQKNRMLKSCISKIVYHKSQRGNIINGRTVVDGNQFELEVYPRLASQDE

SEQ ID NO: 277 - protein, 552 aa, unidentified
  source 1..552: note = Bacteriophage uvig_85227 from the Index of /pub/databases/metagenomics/genome_sets/gut_phage_database (ebi.ac.uk)
MKVWLYYRLSRDEDEELNSLNNQRKIIYNFAVSNGHEVVGESFDDNVSGMHFNREGIDKIYEVVEAGKIEAIIVKDLSRLGRHRTQTALFIDYLREHDVRVLSATENIDTFNENDDLIIGFKGLVNDFYARDGSRRVRTGYRQKQKEGLVTIPPFGYFKDKNTKKVVIVEEAAETVRMIFTAYVGGSGMKAIARILNEQRRKTPALVQAELLNKRLPNTQDGILKKYLWDATMVARILRDESYIGTLICHKSERNKINKTFRFTSPDEQFRHENYLPVIVTREIWEQAQALLAERKEKNVRAGTNRGILRYGGLLRCKDCGRTFIGKRIKLKSGERVAYVCDTYHRYGKEHCSSHMVDEETLDRLIGAEILRTKKMYEENWSRMEWLVEKWTPKASTASAKISKLQEHILLLEEEVEVILMERIRDKANAERYDRMIAKREEQIAEAKKQIEDLQNISEMLRSRQAKLKRDISLIDDILREGKMSEAHLRMLVEKILVHEEDGRLDLEIRLKAPFRDHLDVFENGAQTDCFPTADFDYDRLGAAIYGDYYAG

SEQ ID NO: 278 - protein, 622 aa, unidentified
  source 1..622: note = Bacteriophage ivig_3177 from the Index of /pub/databases/metagenomics/genome_sets/gut_phage_database (ebi.ac.uk)
MIDKTKRLEKEQAKAKTKKRIYVEVDPENYDYFPETRQADYYDNDVPQRVAIYVRVSTDDVRQTTSFELQKKYYEDFVIKHPHWTLVKIYADEGISGTSLNKREQFLQMISDAKRGKIDMIITKSVSRFARNIYDFIGIVRDLAERNPPVGVFFESEGIFSLNDDSQLALSFQATMAEEESHTRSRSMETSLRMRLDNGIPLTPKLLGYMHDADGTLIPNPDEAPTVKLAFYMYLYGYSSQQIADAFNALGRKSYLGNINWTSNGIVQILRNERHCGDVLTRKTFTPNFRTHKAKKNRGQRPQSRYRNHHPGIVSRDDYIAVQRMLDNAKYGNKSILPEIRVVEDGVLKGFVTINPRWAGFKEGDYYLASKSVYSSPEEEPHPEEEIQFEVEAGDFDLRGFEIARGEFFDAPRQPHAIIYHKFIKFSTACVRKFGTQNYIEILINPISRKLAIRPTTKENRNSVMASKPEKGILYPRLIPTAAFSETMFNLLGWNIEYKYRILGTLYEQDGVVAYIFDTVDSEAYFKPNVLSKENGEEDCTNVQPLMPSGKRIRAIPESWTSSFGKQFYAQEKSVTELQRQSEEDWMLRLEGQLFETGNKLHVTGFEELKSFITQELQGVDI

SEQ ID NO: 279 - protein, 739 aa, unidentified
  source 1..739: note = Bacteriophage uvig_83127 from the Index of /pub/databases/metagenomics/genome_sets/gut_phage_database (ebi.ac.uk)
MIERFDIAGYARISVDEELDRDNVSIENQKSIIEDFVTTHFPNSTLTFFEDRDRSGYTFEQREGYQEMRRGLMSHKYDILIVKDFSRFSRRNSRGLVELEDLRDAGVRIISIGDNIDFPNDDDWLKIQFQFLINEMPVTDTSKKVRSVVKRRQEEGRWLCAAPYGYILNKQQVFEVVPTEAEVIQTIFKLYLDGWGYKKIANYLTDNNVPTPRMSECERRAAAGEPVRRKTKAAWAIVTVQGILDNDFYIGTLRQGKFTRVKINGTDRKLDESEHRVFEHHHQEIIDYRTFATVRSLRESRSTNNYRGVKVNDNVYSGLLVCGDCGSPMFAMSRSDLAPAYTCGTYHRRGLKGCTSHHIRVETLDALVKDYVRKVRDNSSTMLERLNADLEKEQTDIAETKRTEENLEALLLDKQEELKATKRQRIRDMMKHPEQEALLEETYDELEAELTQRIAGIQHQIEFASDKRNTIIRINRVAKTAMDVFHDILEKPALDRNDLNLMIEKIRVFEDHIEVQLKADIDSLLKTGALPEDAANFNWDTENSESQLVGADDSVRPRVDVGIDPYETEIVQGAAHRKDKVFRVSVISSGDPLEIYTEKDGEVIFKKYSPMGDLGEFAGQICEAIGKNTGYIAAVCDRDAIIAVHGVQKRELLDKRCSQELEQLMELRRSYRYQDGDLPVRPTDASDRYRVGAAAPIVTEGDLMGCVLLLSEDGAPALGEAEQRLVQTVAGFLGRQMES

SEQ ID NO: 280 - protein, 489 aa, unidentified
  source 1..489: note = Bacteriophage uvig_205904 from the Index of /pub/databases/metagenomics/genome_sets/gut_phage_database (ebi.ac.uk)
MKAVILTRVSSKEQEDRLSLDAQNTRLTEYAKRKNLEVINSFQIVESSTKGDRKKFREVLEFCKKQKETIALLADAVDRVQRSFKESVILDDLVRQEKIELHFLRENMIIGKNASSINVLQWDFAVMGAKSYVLQQSENIKRSNKYKKDAGEITYQAPLGYQNYHNELGKATVRPHPIFAPVVTRMFEIYSLGKTSMKELQEYAAEHGLLGRNGKPLYLPTIQKILKNPFYYGMMQRCDGLKPHIYPPLISQELWERCQAVRTRISAQNRPYKRPKREFLYHGIIHCANTGKICSCEIKKEQFTYIVCYDKNGKRKYIREQDVTDQIAYILHSIKIPEKMLIDFHKHLKTAKDAEIKFREAELTQLKTDLTKTLTRIDRLFNLYLDGNIDKETFQEKNNQLIAEKEKIKNKIAAHSAADDTFNEVICELIDIMNNSWDIFLKSPNLALKRNLLKLIFRTLELKEGKLGYTLAFPFNKLSSFDDTSNWWS

SEQ ID NO: 281 - protein, 543 aa, unidentified
  source 1..543: note = Bacteriophage uvig_239031 from the Index of /pub/databases/metagenomics/genome_sets/gut_phage_database (ebi.ac.uk)
MELFYCYAYGRLSKEDGDKIESDSIKNQRDLIHSYIGQHPELKLVMEGYDDGYTGTNFERPYFKEMLEAVKEQKVNCVIVKDLSRFGREYIEAGRYIEKLFPALGVRFIAINDGYDTAYLDASSSLILPFKNLINDSYCRDTSIKVRSHFDVKRRNGEFIGSFAAYGYSKDPKDKNRLVVDPEAADVVREIFARRISGMSCQAIADELNTLGVPSPMEYKRSRGMKYKSGYRVHNKTRWSATAVRRILQNEVYLGVMEQGKRTTPNYKVKTVVYRPPEEWMRVEDTHEAIISREDFDLAARLMRTDTRTAPGKKAVHPFAGLLCCGDCKGGMVRKTTYYDGKTYHYYGCITHRSDTAACSPHTISEAKLEQAVLEGVNLHIRTVIELNGALEAIARRPLQKVAAEKLDKRLEALRQELVTKQDIRDSLYRRYASGEVSRADFHEFKRIFTRDCEEVERAIEAQQQELDRMLESCTPDSPWIQHFKQFGQLETLNREVLVRLVERILVYEGGRIEIVFRYQEQFANAMIFASEETARQPLREAV

SEQ ID NO: 282 - protein, 435 aa, unidentified
  source 1..435: note = Bacteriophage uvig_160559 from the Index of /pub/databases/metagenomics/genome_sets/gut_phage_database (ebi.ac.uk)
MISDCRKGKIDRIYTKSISRFARNTKDCLKNIRELKSLGITVFFEKENIDTAKLTDEMMITIMGGLAQEESTSISQNLRWSCRKRMANGTYELSCPPYGYKKVNGKLVICPEQAKVVKEIYDSYLSGIGMISIMKNLNERNIPCCKNSERWHMIGVSYILTNEKYTGNTLLQKTYSTNTLPVRRFKNNGNADQYYVRNTHPAIIQQETFDKVQRLISEKNQKQPRGTPHNSVLHKHIFCGSCGSILIRKSCRKKYYWSCRKHDLAAVDCPTKQISEDKIHSAFIRLYNKLVYNFKPVLTPLQQALQDLKYKNTKSGTTIIEKYKEIAKLKEQTHVLARLKTKGFLDEAKYLEQTTELNSKIAKLQTKIKKLNVSDEEDETLEQLDMLIGYFEKRQKLMVEFEELAFESIVDKIVVKNQNELEFHLIGGLELAEEI

SEQ ID NO: 283 - protein, 623 aa, unidentified
  source 1..623: note = Bacteriophage uvig_135439 from the Index of /pub/databases/metagenomics/genome_sets/gut_phage_database (ebi.ac.uk)
MKETEKLGNAQSQKEKIRERYKGIDTDQLDVIPALPQDSFYEDKREKRVAVYARVSTDDPRQTSSYELQKNHYQDVVTRHPGWRLIEIYADEGISGTSLQHRDAFIRMINDCHSGKIDLIVTKSVSRFARNVLDCIGYVRQLAALNPPIGIFFETENIYTLNSNSEMSLSFISTLAQEESHTKSEIMNASIEMRFRRAIFLTPPLLGFDLDEDGNLVINEEEAKTVRLIFFMYLYGYTCQEIAETLTSLGRKTKLNNTVWSAGSVLQQLQNERHCGDVLARKTWTPSYLDHKSKKNKQDRNQYRQKNHHEAIISRDDFIAVQRLISNAKYGNRGFLPDLHVFTSGALRGFVSVNPRWAGFKAADYKRASESVYTPAIVLPTKQTYEVNSGDFDLRGFEVARAQFFSSANRVYVTFSNNGIRFSTECVRKLDSHFVEMMIHPGNGIIAFKPAAKDNRNSMEWSRQINGAKVPKPVSGAAFLPNLYNLFGWDSSCKYRIMGFKKHNNDNTLVLFSLADAEILIPNSTIEGDDEEPISLFEEDVKPLGTKTTTFGYPEEWVYSFGNNFYRQAQANELAAFNESDWSVEEEKTSYNPDPPLQVTAQEEIEENIKSMIDGMRQEANNE

SEQ ID NO: 284 - protein, 560 aa, unidentified
  source 1..560: note = Bacteriophage ivig_116 from the Index of /pub/databases/metagenomics/genome_sets/gut_phage_database (ebi.ac.uk)
MARRSRAIVETARPKYRVWRIAIYIRLSKEDMRCLDESESVTNQRQIIEDHIAGFNDGDEYIIVDEYVDDGISGTTDDEREDFQRMLSDIKRGRVNCVIVKDLARSFRNYSDQGYYLDDWFPRYNVRFISLYHQPLDSYKEPQNMRSIAVPIQGVLNENHCAETSDKVREVFDMKRRNGEHIGSFAAYGYVKDPNDKNALVIDEEAAAVVRDIYNMFLDGMSKNAIVRYLNEHGILSPAAYKRERLGLKYQNPSVDPAKPPLWCAMSVTTILKNRMYCGDMVQGRYRMKSYKVHVQEVVPEDEWYIVENTHEAIIDRETFEKVQRLLIRDTRTGPQQKKLYLFSGFLKCADCGKAMTRSKVGNVVYYYCRTYKDQSKTACTKHTIKHDRLEAAVLYAIQQQVYLAVDYTKTIERINRAPLVKSQSKKLMDAIEQKERELSKITRYKQAIYQDWKDGEISHSDYRHMKEDYERQAEALEEVIGKLRAEQAELENGIDTENPFLAAFRQYQNIDKLTRDILIELVDHIKIHEGGYISIVFRFADELRRIQEFIEVNTHNEAV

SEQ ID NO: 285 - protein, 573 aa, unidentified
  source 1..573: note = Bacteriophage uvig_354027 from the Index of /pub/databases/metagenomics/genome_sets/gut_phage_database (ebi.ac.uk)
MPTMNTKTFCVIYARQSFGLEQDSTSISVQQEACRKWAVAHGMQIVGEYSDANCSSELYPLCDEGIEASRIDRGFQRWLKEQRTQGRKQYKQGLGEAFRRIAQGGVTHLLVYTRNRLGRTADGSYLEKFLTNYLLEHKVSLVTVQDGTVMDFSDDFMSLVMSIKDTLSYRELREKAKASLASIDKRINSFTKWSNANGVIMKDGQVTFYPEYAEVIRYIYNALVEGATYGTILHKLNTDYRHLVRGKQWYITNVRSILRNPVYCGYMRNREGVLGKAVNIPEPVVSYSIWQRAQEVMEYKRVNGQKYNGKNHHFLPLSGYLMCPCGRRMTLFVDRGKIAYHCLNGGEHKTAIYVNEDALLTIQNVLMIGLTTSHKRLQSLKTASNMVDDLRAEILRLKASQAAKMRLVETEEDVAVYKPVIDSIKATIRGKQEELTRLEGELSADSSEAQRRLEDDFHSIMEGELLPEDTYMRLMQDCISTITVHADHIDIVTKTGVTIPVPRLEGRHHSKRLMRCSLICDTADGTLEGLVHYQLHLYDKEVAIVGGESIYQDDTMSVSVHWPEQYLMRRIPA

SEQ ID NO: 286 - protein, 559 aa, unidentified
  source 1..559: note = Bacteriophage uvig_305800 from the Index of /pub/databases/metagenomics/genome_sets/gut_phage_database (ebi.ac.uk)
MASNKKYAVLYGRLSQEDTQKTNKTDDSNSIQNQKLLLEKYAAEKGFTNTLFLYDDGYSGTNFNRPGWQQVMELMENGQVETLIVKDMSRLGREYLQVGQYTELIFPSYGVRFIAVNDGVDSLYESTNDFTPFRNLMNEFYAKDCSKKGRSVVRLKAETGARVSSRPRYGYMKDPADPKRHMVPDPETAPVVRYIFDLCVSGKGPAQIAKQLKKDKIPTPGYSYYQKHGVELTGVDITQPYNWSTNTVAGILEDETYLGHTINLKSTTLSFKNKKRIERPESEQLRFENTHEALITQQTWEIVQDIRKHKRRRANMAEQNIFSGLVYCLDCGGTMVLHRAHTMDAVKNNFMCSTYKKKGKDVCSGHYIREQELSAILLDDIRRVTHFARQNELRFAEHIRKKQGKEAQQEIAMLQKKIDTMQKRQVELTKLFKRLYEDSVLGRIPEEQYRILSQEYTAEQKEIQEQLPAMEARLQDLKDSSSNIARFIENAKRYSEIPELTAEILRTFIKRVEVGERAEKYSRTAPQEVRIYYRDIGLVDELPQSMADSVAEAIQNEVA

SEQ ID NO: 287 - protein, 609 aa, unidentified
  source 1..609: note = Bacteriophage uvig_45 from the Index of /pub/databases/metagenomics/genome_sets/gut_phage_database (ebi.ac.uk)
MIRAVIYCRCSTEEESQKNALEKQVAEAESSVRQYGWVLVDRYVESRSGTTAKGRNEYKRLFNDLLTDKFDVIVIKSQDRLMRNTKDWYLFVDRLCTEQKKLYMYIENKFYSTDDALITGIKAILAEEYSRELSKKINNAHRNRQRDGGNVMLPGNAYGFKRMPDKSVALVEKEAEIKREMYRLCAAGYGTRTISTIMRNRGIVNRDGKPFTSSYILRMLRNPINKGTAVMGKYHFDFDSKRTIKNPKEKIYIHEDKVPRTVSDELWNAANEQIDKRSVKTKDGEDDIGKNPGKYQLSGKIVCGMCGQPYWRKVHRKHSNHELIYTWACSSYLELGRSDNLRARPNLRKVFLENEKGCDNINIAENEFYAVLEEICSNQYQKNKKKIIEKIMKLLSKSLNNQDGTKEIEKLEREQEDIERKMKFLVDKLIDGVLTDQMYKTKQEELEKKRDQNKKKILELTERTSNTQNIKDRLQEIETRLNDDDLFKKATIDDMLEEVDKIVVYPRYMEIYFSLSSVTGCMDLKIFDGDKKCFRVDYGNRLDYKGRQCDAREVVVDLIRENPRITGKMIAKEIGCSLSGANYKLKVLKKEGRIRFNGAGGKGCWEILE

SEQ ID NO: 288 - protein, 538 aa, unidentified
  source 1..538: note = Bacteriophage uvig_151078 from the Index of /pub/databases/metagenomics/genome_sets/gut_phage_database (ebi.ac.uk)
MLASNVKVIQPRKLFNIEESARQLLRVAGYARVSTGRPEQKTSFESQQKHYKELVAKHSDWIDVGLYADEGITATSMRKRKQFLKMIQDAKEGKIDRIIVKSVSRFARNTVDCLATVEELTALGVDVFFELQNLSSLQDSKTTRMQLTMYASMAQEESETLSESVAYGIREGIKNGRYRAPKAYGYRLDENKRLVIDPEQAEVIMFIYNTFLQGYTVGQICAMLNAREIPAPRGGVWYDSTVDGILKNEKYIGDLRLEKTVSTDLKTRRRVPNINGQQFYVTNNHEGILAERMFKRVQAEIEYRQNLRGYSGSGKSAYTTKYPFSNKLFCGRCGSKYRRHSYDLKRKDENGNPKIEKVYTWVCINHKLNKKTACPQTQVKESSLEKAFIAALNTIIEDQDGFVKTVIANISEVLNTRLSEAALEGNRGRYEAKQKELQNVLANSLKSPTAENARLYERLVQELESLKLKIETEEGERSKTLMSKTRAVELEQFINSSKLFHEFDEMVFRKLVERVIVNEDSVTFKFTDFLEREVPLIE

SEQ ID NO: 289 - protein, 634 aa, unidentified
  source 1..634: note = Bacteriophage uvig_369437 from the Index of /pub/databases/metagenomics/genome_sets/gut_phage_database (ebi.ac.uk)
MNQNEAKLSKEEQKAKIRERYRGHVSSDTVVIPGKPQADIYDDSEMKRVAVYARVSTDNVQQTSSYELQKNYYEDQVQRHPNWVLVGIYPDEGISGTSLKHRDHFNQMIADCRAGKIDLIITKSVSRFARNIVDCISLVRELASLNPPVGVFFESENIFTLKDNTEMSLSFVATMAQEESHIKSTIMNASIEMRFGREIYLTPVLLGYDHDEDGNLVINEEEANTVRLIFFMYLYGYTCQEIADTLMQLGRKTKKGNVAWSASTVLQQLRNERHCGALLARKTFTPHYLDHKSKKNMGERTQYYKKHHHEGIISYDDFIAVQHLIDNARYGNKGILPELQVIPEGALKGFVLINPRWAGFQAADYEVASESVYEDEVFVPQSLRDVEAQSGDFDLRGYEIARVQFFDTQNRISVSLSNDYLLFSTACIRKFDNAQYVEMLIHPHEHLLAVRKCEKDARNAIKWAKLDDNGNYGPRHISGAAFISTIFELFDWRLDCKYRVRGVRRQKDNEAVLVFDMRETEMFVPNAAPDPDDGSAAPAEDGLRPLVPSKNSIVAFPSAWADNFGSNFYRHAQARELAAIDQNGEWQIGEEAQPYSTQPELNVTTPEEAAFHIERIIRDMHRGGEMNGTIQPVE

SEQ ID NO: 290 - protein, 369 aa, unidentified
  source 1..369: note = Bacteriophage uvig_319734 from the Index of /pub/databases/metagenomics/genome_sets/gut_phage_database (ebi.ac.uk)
MDGKIDMIITKSIPRFARNTLDTLRYVRLLREKNVAIYFEVEKINTLVDGEFLMTILSSVAQQEVENTSAYVKKGLKMKMKRGELVGFSRCFGYDRDKETGELKIVESEAETVRHIFDRYLQGAGGTVIARELNEEGILTYNHCQWTCSIILNIIKNEKYMGDMLQGKTYTVDPISKRRLPNNGEEDKFYVEGHHEPIVSRKVFDKAQELRISRNVKRAKTSTESNRVRIRRQYAFSCMLQCYFCGSNLSKRTWHSSSKYSKVIWQCVKSAKKGKRFCPESKAIPEAVIEKAFVESYKILCENNQDILEDLLDKIEVILKDEKIEKEVKQIEGRIKRTKTKRNKLADGYLDGIIPQERLRNYFLQSLSF

SEQ ID NO: 291 - protein, 509 aa, unidentified
  source 1..509: note = Bacteriophage uvig_183862 from the Index of /pub/databases/metagenomics/genome_sets/gut_phage_database (ebi.ac.uk)
MPKVTVIPPSINRATRQDISAPTRRKVAAYARVSTDFEEQLTSYEAQISYYTNYIQRNPDWEFVKIYTDEGISATSTKHREGFNSMIADALDGKIDLIITKSVSRFARNTVDSLTTIRKLKEHHVECFFEKENIWTFDSKGELLITIMSSLAQEESRSISENVTWGQRKRFADGKVSLPYAHFLGYRKGENGLPEIVPEEAETVRYIYQRFIDGLTPYKIANELTAQGVPTPCGKEKWSASTVKSILTNEKYKGDALLQKKFTVDFLTKKQQINEGQVPQYYVENSHPAIITPEEFDFVQSEFQKRCMKPYSSTSIYATKIICGDCGSYFGAKVWHSNSKYRRVIYQCNSKFKGSHFCTTPHLYEPEIQEKFLQAFAQYFSQKDVVIKNCQFALNCLKKQESKKKELQDELVAVNEKLKEYIQHGGEDFDALNAKYEELSAQLDAEEAAESDRKRRIAKMQKILQTLKKTDSVLETFDESVWNAVLENLTVFHDGSLVFLFRDGTEIKV

SEQ ID NO: 292 - protein, 457 aa, unidentified
  source 1..457: note = Bacteriophage uvig_250794 from the Index of /pub/databases/metagenomics/genome_sets/gut_phage_database (ebi.ac.uk)
MAKKVTVIPAKQVRANSTKAISAVRKTRVAAYCRVSTDAEEQLNSFDNQVEYYTRYINENPAYEMVGIYADEGISGTNTKKRKEFQRMIADCEARKIDLVIVKSISRFARNTQDCLTYSRKLKNLGIGIFFEKEHINTLDATGELLFTILSSLAQDESRNISENCKWGIRSKFQEGKPHINTYKFMGFDKNEEGRLVINEEEAKVVRRIFQEFLEGYNPADIARRLNEDGVPGVSGKPKWITPTILGMLQQEKYMGDSILQKWVTTDFLMHSLRRNTGQVAQYYVENSHPAIIDKDIWNAVQEELERREIYCQNYHLSMYAYRADKNPLNGKIVCGHCGHTFARKSWTNRGIAYWTCKSDTCKGNIKEEVIHKAFITAWNHTVKNKDRFMERWQQALDGEDSLARLRAKQMIDLTNEGTINTLVPELMLMVLGKITVHDLEHFTVSFLDGTEKEILV

SEQ ID NO: 293 - protein, 527 aa, unidentified
  source 1..527: note = Bacteriophage uvig_195543 from the Index of /pub/databases/metagenomics/genome_sets/gut_phage_database (ebi.ac.uk)
MSRVTVIPAKLDRATFMPLDKPIKRRVAGYARVSTDSEEQQTSYEAQVSYYTEYIQKRDDWEFAGVYTDQGISATNTKHRDGFNRMIADALDGKIDLIVTKSVSRFARNTVDSLTTVRKLKEKGVEVYFEKENIYTLDSKGELFITIMSSLAQEESRSISENVTWGQRKRMADGKVTMPYGRFLGYRKGEDGLPEIVPEEAEVVKLIYKSFMEGLSYYKIAKMLMEREIPAPAGGEKWHRRTVESILTNEKYKGSALLQKKFTMDFLTKKQKVNEGEVPQYFVEHSHDAIIDPEEFELVQAEIERRKGLGKEYSGSSIFSAKLVCSCCGGFFGSKVWHSTSKYRRIIWQCNHKFSKSSGNKKCKTPHLYEDEIKKRFIEVCNRIASDKEDFLISCQQIVEILSNTAALDRKIEAQYIYLNGLAVSMQEFIKENAMQPQGEDFYDTKLAEYEKQRAEGETRLKGLQSQKATKLSRKELLDGLVNVLEENGILIDKFDERLWRLMVEKVVVGIEGELTFTLRNGMEIEV

SEQ ID NO: 294 - protein, 535 aa, unidentified
  source 1..535: note = Bacteriophage uvig_557325 from the Index of /pub/databases/metagenomics/genome_sets/gut_phage_database (ebi.ac.uk)
MEVQRIPKRTVSVIEPQTSILVDKEKYHQKRVAAYCRVSTDSEEQLTSYQNQMRVYTEMIAANKEWEFAGLYADEGISGTRADKRPEFQRMIRDCQNGKIDYIITKSVSRFARNTVECLEYVRSLKAQGIGIFFEEQNIDTLKNESELYLVIYAGFAQSESESISKHITWTYRKKFEEGKVSFQYKNFLGYRKGADNQPEIVPEEAAIVERIYEMFLAGQPVKMIAQTLQAEKIEIPGKNLSFSKNMIMNILRNEKYCGDCILQKTVTVDCISKTRKANQGEAPMYIVENNHPAIISREVFNRVQEELIRRQALRAKSDKTSITATGKYSKYALTEVLQCAECGSRYRRVTWTAHGRKKIVWRCISRLDYGTKHCKDSITVEEAALHGAVVRALRRFRAEDESTYLTLMKATIGEAIGINGGSEEIDLLTRRIDTLNKRMLDLVNETVAAGKDVESSEDEFKGISDQIEQLNRRIAAIQESIHKDGSRQARLEEIQSIIAERNANETQYDDSIVRQMIECIKVHNDGKLTIIFRV

SEQ ID NO: 295 - protein, 550 aa, unidentified
  source 1..550: note = Bacteriophage uvig_13945 from the Index of /pub/databases/metagenomics/genome_sets/gut_phage_database (ebi.ac.uk)
MTQSRPEPKVIVIPAKEESPQDQEKKKNLRVAAYCRVSTKKDEQLNSYENQKAYYTEKIMANPDWTMADIFADEGITGTSACKRKDFLRMIRQCRQGKIDMILAKSVSRFARNTVDTLNYTRELRGMGIPVIFEEQNINSIYPESEFLITIHGAFAQSESEGISSRVKWGKHQAMRTGKANIQYKTLLGYEKNPDGEMVVNAEQAETVRRIFEMYLSGQTLRSIKEALESGGFKNSAGTMEWTTSNLRTILSDEKYCGDVLLQKTFIQDCISKKVIKNTGQLPMYLIQNHHEAIIPRDRFDAVQVELARRKTLTSSTKRSAPTGMSRYSGKYALSGLLFCGECGTAYRRVVWTQHGEKRAVWRCSSRLDYGKKYCKESPTLDESPLQQAVLAAINASMSGCKVLADQLVDAMEQELAPIPGESMSLGDIDRAVAELGKQFDTLLAEAANGDADEYAERFRTISTTMEELKRRKAAILGIRQEQEQISRRIHAAASAMTAATVGITEWDDCVVYQLLEKVTVLTGNRIKVTFRNGVEIEQTVDQPKRRKFI

SEQ ID NO: 296 - protein, 523 aa, unidentified
  source 1..523: note = Bacteriophage uvig_114897 from the Index of /pub/databases/metagenomics/genome_sets/gut_phage_database (ebi.ac.uk)
MNENVTLIPARKRPGNRISKAVEKPKLKVAAYCRVSTDSDEQAGSYEVQVQHYTDYIGRNKEWEFAGIYADDGISGTNTKKREGFNGMIEDCMAGKIDMVITKSISRFARNTIDCLKYVRQLKEKNIAIIFEKENINTLEASGELLLTIMASLAQQESASLSQNVKLGLQFRYQDGKVQINHNHFLGYTKDENGNLIIEEEEAKVVRRIFREYLEGASFRDIAKGLERDKIKTGGKRYKWHLSTIQGILQNEKYMGDALLQKTITTDFIEKTRIKNDGSVPQYYVKDSQEAIIPRDIFTQVQEEMVRRANLFSGVENKKKRVYSSKYALSSICTCSKCGDIYRRIAWNNRGKHSIVWRCCTRVENGPSACDAPTVQETELQQATVQAINQLVKSSSTTLDVLMKNIEIALADDNAGELEKINALLSEKQKQLVKLAHAKKDYSSLADEIDLLRDKKQELLVAKAENEGFKKRIKELEEFLKEADQELTEYDESMVRRYIDKIVVYEDKFTVCFKAGVDLDIER

SEQ ID NO: 297 - protein, 542 aa, unidentified
  source 1..542: note = Bacteriophage uvig_505551 from the Index of /pub/databases/metagenomics/genome_sets/gut_phage_database (ebi.ac.uk)
MAKPVRVIPAKPKAELERELKKGRLRVAAYCRVSTDDEEQLTSYQNQIEYYTEKINANPDWEMVGVYADEGISGTSTKHRDEFNKLMALCRRGRVDLILTKSVSRFARNTVDCLKYVRLLKEKGIGILFEKENINTLELSGELMLTFYGDFAQAESESISTNVAIGQRMAMKAGKVVFQYKWLYGYKRGENNMPEIVPEEAVIVRRIYDNMLSGYSAKRIADSLNNDHVPPPNFSEKWSSIIIQRILKNEIYAGDSLRQKTYVADCISKTVKKNTGELPQYYIMDNHSAIVPRDIYNRVQEEFARRNSRISPSTKSPTVNKGRFSSKYALTELLRCGACGAAYRRVTWPAKEKGGEKRIVWRCISRLEHGKKICKTAPTIPEPALHAALMEAIQLLKLDTFEAETDVREILPEVIQYPYGETVQDIEILIERRQDELIQYLAQNPTANEPESTGHADFTMLLNSIEVLRNRREALLRRAQADETVEQRMTGIIERLHNEKPDITGYDDILVRKLVECITVVSDKIKVVFKNGTEIWARWDCE

SEQ ID NO: 298 - protein, 573 aa, unidentified
  source 1..573: note = Bacteriophage uvig_331196 from the Index of /pub/databases/metagenomics/genome_sets/gut_phage_database (ebi.ac.uk)
MARKKRQYLQPEQAQEPVSAMLPSVWETAIYARLSVENSKKNDDGDSIEGQIEICRDYVSEHPYLHLADTYVDNGWTGTNTDRPEFQRLLSDIREGKIKALVIKDFSRFSRDYIEAGNLLENIFPAMGVRFISVVDRYDSFETDGSASSLLIPLKNLINSFYSRDQSKKVSLAVHAKQLAGEHIPSMIPYGYRKSTTQEYRFEPDPETAPIVRRIYAQFLSGIGARPIMRQLNEEGIPSPGRLRYLRGQTKRACYSDCLWTQQVIKQILMNPTYMGDLVFGRMPTALYLGQPDYHYEPDESKWRILPDMHEALVSRGDFYQVREILEAGRRENEAKLEASRNYREKHPQIFKSGIVRCGHCGSNLGYSRHGEKKEGRYNCRNKQYGRCDVAVGISEKKLAPIVWNAIQIQFALFADFEEVAGRLKDSGIQTKRQTELQQEMLEVSEQLSGYQNKREQLYNDYVDGILSAGDYIELKTRFDTAYQEQSSRLNQLSVELVRLNRMLSNENKWLVNIRNIRKARKLTPEIAQAMIDHINVYKTGYAQHRLEIIFRFQEERDALETAYHELEGGEAR

SEQ ID NO: 299 - protein, 546 aa, unidentified
  source 1..546: note = Bacteriophage uvig_80069 from the Index of /pub/databases/metagenomics/genome_sets/gut_phage_database (ebi.ac.uk)
MSRASPKVITIPANPNLVKDKEIKRQLQVAAYCRVSTDEDEQLTSYEAQKTHYTDKIMTNPDWTMAGIFADEGITGTSAEKRPEFLKMIRKCRQKKIDVVLVKSISRFARNTVDCLKYIRALKELGIAVIFEKENINTLEADSEMLITMMGAFAQAESESISANVRWGKRQAMREGRAIIQYKYLYAYEKGDDGLPRIIPEQAEIYRWICNSFLSGQSLRMIRDTLEREGHPAPNGGSNWSIATIRNMLKSEKYCGDVLMQKSYIQDCISGKVVRNTGQLPMYLIQDHHDAIISRETFNAVQAEFSRRNAGRAPSKKLAPTGRSCYSAKYALTERLVCGDCGTLYRRCVWSKKGVKRAVWRCSSRIDYGTKYCKSSPTIYEKPLQRAILAAINSVMSQKVVLIDQIADAMRMELLPLPGEALSMTEIEKRLSELEQEFQAVFQLSRTEDGGYMKYASTFKRINDELAELKEKKKYLLKQQQDDSASNKRIKDAMDILNAGSAEVTEWDESLIRQLVDMVKVISEDRIIVRLKGGLEIKKALDGERD

SEQ ID NO: 300 - protein, 524 aa, unidentified
  source 1..524: note = Bacteriophage uvig_9192 from the Index of /pub/databases/metagenomics/genome_sets/gut_phage_database (ebi.ac.uk)
MPKVTKIPPRLNPATFAPLESVEKRKVAGYARVSTDSEEQKTSYTAQVDYYTKFIKERIDWEFVGVYTDEGISATNTRHREGFNRMIADALNGKIDLVVTKSVSRFARNTVDSLTTIRKLKEKGVEVFFQKENIYTLDSKGELLLTIMSSLSQEESRSISENVTWGQRKRMADGKVSLPYSHFLGYRKGKDGIPEIVPEEAEIVRYIYRSFMEGKTPNHIAECLTFKHVPTPAGKEIWSPSTIESILTNEKYRGSALLQKSFTVDFLSKKKKINEGELMQYYIPESHEAIIPPDEFELVQAEYTRRKRIGRAYNSKSIFSAKLVCECCGGYFGSKIWHSTSKYRRTVWQCNGKFKNGKKCMTPHLYESHIKEKFLTAMNQVLANKTEIIENCLLFKETFSNTAMIEEKIENIQKQMEQLTKQIRMLIQKQSITPIKSEDYYRQYDGLVISFGKLKFKQDTLIQKQDEMENKLKFIMDYIEFLKSQENLIIEFSETLWFRAVDQVTVCTDGKMIFAFKDGSKIKV

SEQ ID NO: 301 - protein, 539 aa, unidentified
  source 1..539: note = Bacteriophage uvig_507971 from the Index of /pub/databases/metagenomics/genome_sets/gut_phage_database (ebi.ac.uk)
METIINNQPKVVRVVRKVSSTQITAQTIREQLTDTRLPVAAYARVSTTNEEQEDSLERQRAHYTEYIGNRPEWRFVGVYDDPGVTGTRVDQRKGFQRLLNDCRAGKIKKILCKSISRFARNTVDALKYIRELKELGIGIYFETQNIDTMTAGGDILITILAAIAEQESRNMSENIKWAFQKKFKEGELMLVCSQFLGYDRDKDKNIVINEEQAKIVRRIYREFLSGYSCATIAKNLTEDGIQTVTGKKQWRASGIRNILTNEKYFGGAYLGKTCKKDVLSKERVASDEVYYVENSHPAIIPKDTWDLVQLELERRKDYRSCTETGNGRYSSKYPFSKKLICGECGMVFRRHAQYKKGEYVRTWVCITHKIKGNEYCSQHYILEDDIERCFQRVINEFVGDMSQIKEILKENVTSTLSEKDDNRGEQILLRMQALQAEMININRKKRAGEIAYELYIAKAQEIADEVEKLEREQKEIQSTENDRLAETKRLKDILEVINEMHPTDEFDGEMYRRLIDNVIVKGNQLTFNFKVGIVKTATI

SEQ ID NO: 302 - protein, 540 aa, unidentified
  source 1..540: note = Bacteriophage uvig_80003 from the Index of /pub/databases/metagenomics/genome_sets/gut_phage_database (ebi.ac.uk)
MENSASVKPKIRLIPAKQRQELVGRATPNGELAKLRIAPYARVSTDHEEQESSYEAQVKHFKQLIESHTDWELVDIYADPGLSGKNIKRPNFQRLMNDCECGKVDMIITKSVSRFARNTLDCVKTVRKLKEMGIKVYFEKENLDTMQESSEFVLTIMASLAEEESRSISNNIRWSVKKRFENGEVILNTAHFLGYTKDENGTLKIVPEQAITVRRIYGEFLDGYSLKEIADGLMRDGILSPSGKSRWHPTTIKSILQNEKYMGDSHLQKTYLPDFLSPRRIKNEGQADSYYVEDSHAAIISKEMFDLVQQEFKGRNELRSSNRTGHGKYSGKYAFSGMIVCGECGETYRRHQQYNAYKKYYIWVCKRHENKGKDYCSAKPISESALERAFIRALNGLIENREKILDKLQKAVVGQISDSCEDDIAQIDKEIQGLQNGIVDLLMDKNKGRLTDKQYERETQLLKFQIDELNLKKEEILNEQGKIQLAEYRAEVVTDLLKTEKILDEFDKTIFKSLVHKIKVIGDKEIEIEFECGIKVTEKL

SEQ ID NO: 303 - protein, 465 aa, unidentified
  source 1..465: note = Bacteriophage uvig_176185 from the Index of /pub/databases/metagenomics/genome_sets/gut_phage_database (ebi.ac.uk)
MKRAKAYMRMSTDKQEHSIESQWRLIKEFADRNGYTIVGKYEDEGISGRAAEKRPAFMQMIDDSDSGDFDTVLIYDSSRFARNLKDAIVYKSILKQNGVDLISITEPILDDDNALITDALLGAMNEMYSRKLSKNVRRGQEQKILRGEVFTKPPFGYIRPAPGATFEIVPDEAKIVEYIFDQYRDGKTAFRLAVELSGAGVMTRRGNPFDSRQVEYILTNVIYKGYMRVKSNGTEYCIKADHPAIIPEDVFDRTQELYADRKSKLGKKQMPREMHRHWLSGKIRCGVCGGAYSYNRSYGGRKDNFRCTNRMKGKCMQSPCIRVPILENLFLQALHDTIKNPELFDAFLIPSECPVTRDYDADIRRLTLSLKRAKDAYLSGIDSLEEYKTNKKHFESEIAKTKEEKEKSSLPPKPDFDRLRERLLSAYHLLTSDADLEAKQACMENLVSKIIINGPDKSITPCFYY

SEQ ID NO: 304 - protein, 534 aa, unidentified
  source 1..534: note = Bacteriophage uvig_280693 from the Index of /pub/databases/metagenomics/genome_sets/gut_phage_database (ebi.ac.uk)
MATAVRTIPATLNKFNSKPVSAIQKRRVAGYARVSTDFAEQATSYEAQMQYYKAYIQSKPDWIFVDMYSDEGISATTTKHRDGFKRMIDDAMNGKIDLIITKSVSRFARNTVDSLSNVRMLKEKGVEVYFEKENIWTLDAKGELLITIMSSLAQEESRSISENTTWGARKRFADGKASVAYTHFLGYDKDFKINEKEAEVVRYIYKRFISGISCYAIGNELESKGILSPYGLPKWWTSTIISILKNEKYKGDALLQKSYSVDFLQKVRKANNGEVPQYYVENHHEAIISPEIFELAQLELKRRSRKKRYCVKTVFTGKILCGICGNEYGSRVHHSNDECRREVFTCGKPWVRGVHKCPTKNLTVKMAKQLFTDALNKLVDVKKEVIDNLRLLLNETFDTTKLKEEHEKLESELNALAFKYNTLMNENARHIIPDQHNFISNQENLAEQYNSKQARYLELEKQIADKEERGLVLKNFIKELSGAEPGIEFREDLWCALLDHIVVLDKLKAKVVFKDGTEELLDIPNDRKPRVKSE

SEQ ID NO: 305 - protein, 577 aa, unidentified
  source 1..577: note = Bacteriophage uvig_81612 from the Index of /pub/databases/metagenomics/genome_sets/gut_phage_database (ebi.ac.uk)
MRVAVYARVSTEHEAQINALENQLEWYKIECSRHSDWEIVEVYVDQGITGTQAQKRPEFLRMMEDAQKGKFDLIITREVSRFARNTVDTLSYTRELKARGVDVFFINDGINTATNDGELRLTIMSSMAQDESRKISERVKAGQKISREKHVLYGSGNILGYRRENGTYVPDPDQAETVRLIFQMYSTGENGLVKIVNELYRLGRLDAGGHVSWDASKVSRVLHNATYKGCICYNKSHSDGYLTQKRVKNLDESSYIYVKGDFEPLVSEEMWDRCQQILASKSARVIDENGKKHKYMRNTPKSVWTAKLRCSCGAGFIQFKWRVNRDGAVVHGFQCYRRTRRPSISYLQEHGLDLGISCQIRAICEWKLDLMAAKVFEHLTFDKGKTVKEVYKILNRCMAEEKTVRISRKAMLENSIARQRERLDKYIDLCADGIITKQELAERRKGLDAQIAELQSQYENVEQEDERSGTLDMNLIAQKLDEWQKASRNDVDRELINSCVAQITPLTNEEYRWVLDFQLTEVQSRNSATCTLDGFMEMARFRISFEEAKAFKASRNQGIRKNEWHDLTVAVGIRTKA

SEQ ID NO: 306 - protein, 483 aa, unidentified
  source 1..483: note = Bacteriophage uvig_296980 from the Index of /pub/databases/metagenomics/genome_sets/gut_phage_database (ebi.ac.uk)
MTNLDIGAAYIRVSTDEQTELSPDAQLRVILEQAKKDGVTIPPEFIFIEKKGISGRRAENRPEFQRMIAIAKNQNESPFKRLYLWKFSRFARNQEESTFYKGILRKKCHVEIISVSEPIMEGMFGRLIETIIEWFDEYYSINLSGEVLRGMKEKALRNGYQLRPCLGYAAVGDGKPYQINESEYAVVEQIFHFYHSGLDMTGTARKLNALGYRTKSGNLFDRRAVYRILTNRFYIGEVSWNGIAFQGEHPIRESVSSIFDSVQERLQAEYRPRGRRESSANAHWLSGLLRCHICKATLGFNRTNNSKRRPDFFQCWKYGKGIHPESCSIAARRAEAAVLESLKQVISSGQVDYEYIRPQEPGVKTEETLIQESLDRLRMKEQRVREAYESGIDTLAEYRSNKLRLQAERRELTESMERLKKQAESPLQRPDQKEVVNRIKNVYDLLIDENTDYSTKANALRSVVKYIEYDRKNDRMDVHYYIS

SEQ ID NO: 307 - protein, 376 aa, unidentified
  source 1..376: note = Bacteriophage uvig_517692 from the Index of /pub/databases/metagenomics/genome_sets/gut_phage_database (ebi.ac.uk)
MIADCEEGKIDKVITKSISRFARNTQDCLYYSRKLKELRIPIIFEKEGINTMDASGELLFTILSSLAQEESRNISENCKWAIRHNFQKGKPTINTKMFMGYDKDENGKLIINKEQAKIVKRIYKLFEEGYNCSQISNILKREGVKGTKADTWPSAAIKAMLQNEKYCGDTLMQKTYTVDFLTKKKVKNHGEVDQYFMEDSHEAIIPKDEWQAVQMEFERRDAYKEEVGLHAFGNDSSPFSGRLICSHCGKPYRRCGWSRNGKKFWMCASKKAKEASACQADNIFEESIFEAFRVAWNGVIANKDKLTEKWDEQIESGTPLERLRAKQMKMMIEDGPIQTVIPEHVILVLERIIAYDKTHFEVRFLDGTMKRIAISE

SEQ ID NO: 308 - protein, 473 aa, unidentified
  source 1..473: note = Bacteriophage uvig_170697 from the Index of /pub/databases/metagenomics/genome_sets/gut_phage_database (ebi.ac.uk)
MKTAAAYIRVSTDEQTEHSPDSQLKEIRNYADRHGLILDPSHIYIDAGVSGRKAKKRPQFLKMIATAKGEPSPFSVVLVWKFSRFARNQEESIVYKSLLNRECGVEVVSITEETQDKMFGSLVERMIEWMDEFYSIRLGEEVRTKMTYVAETGKIQTAPSFGFSKNSEGEYVLNPDEAEWVLFMAESLLQKKSLRWIAKELNSHGVRTHRGNKFEPRTVRYILKNLTNTGASHWTPNREDHENEYHPYSDSTIVVDGVCDHIYTREYYDKIIAELDTRAENRKKYDKPDTVKKHWLSGFLKCSNCGSTMVYSLANKGFQCYKYGKSLCDVSHFISASKIEESVIQAIKNVTVNDKFIKSVTKPPKKADHKKDIRRLEGMLQRAKIAYMEEIDTLEEYAANKERIEKEILKFKKEDEKATAYRPAEDVRRQFAEIVDLLSSDSEDAIKRAALGEIVESIVFSRPNTAIKIYFRL

SEQ ID NO: 309 - protein, 437 aa, unidentified
  source 1..437: note = Bacteriophage uvig_55768 from the Index of /pub/databases/metagenomics/genome_sets/gut_phage_database (ebi.ac.uk)
MKKTIRVIEPTIPLLKKKKRVAAYARVSSGKDAMLMSLSAQVSYYSELIQRNSEWEYAGVYADEAMTGTKEDRTNFQKLLKACRNGEIDIILTKSISRFARNTVTLLEAVRELKKYGVDVYFERENIHSLSGDGELMLTILASFAQEESLSASENQKWRIKKNFEEGKPWTYGMLGYRYNGEFYEVIPEEAEVVRKIFAYYLEGLGYNAICKRLDAEGIVTRNNNKWSQNSVSKILKNYTYTGNLLLQKTFRENHITKKTRVNRGELPKYHAEDTHEAIIDIDTFMAVQNEMALRLKGFEHKSQVQRTYPFTHKMVCDCCDAYYRRKITKTRVVWICATFNQKGKALCQHSKQLPEETLIALCNDVLGLVEFNEQIFINKVSQIRILDNNRVQFLLSNGKTEERTWKDRSRSESWTDEMKETARQRTLQRYASKEVE

SEQ ID NO: 310 - protein, 545 aa, unidentified
  source 1..545: note = Bacteriophage uvig_178167 from the Index of /pub/databases/metagenomics/genome_sets/gut_phage_database (ebi.ac.uk)
MKKLYKVGIYCRLSVDDASNSAKVKNYIPADESVSIENQYELLSKFVMLNGWTEVKSYRDDGYSGGNFQRPGFLEMLEDARHGLINLILVKDLSRLGRDFVEVGRYTDVIFPSLGCRFVSVLDCLDTEGDNTDMLHFRSLMNDYHLKDLSNKVKSVLHAKMRSGQYIAAYAPYGYRKSEEDRHRLVIDEEAAAVVRRMFELRRAGMAYGKIAAVLNSEGILSPRWYWAKLYGNGSCKYANLWMYATVKNILTNEVYTGNLIQNQTGSRSYKDDTMIYKPESEWIRHEALHEAIISPEVWNEVQAINRERTRLSADNAPPKPFLFTGKLVCADCKAPLQGNRETQRRKNGTSKKYVSYFCSRYTASGYGACSRHTIYEMTLTELVLSEIRAHAEALELDEAAMLDRLQAQRTAADAERLESVRQEIGKLRRRVYELEQMTANLYEDKVCGSISAASFAVLLEKTEQERRQRTDRLDTLLAEIREYEQSAADIQSWAAVVRKHLHIRGLDRETVDELIDRIEVGEKTVIDGKNVRDIKIYYRFVGNI

SEQ ID NO: 311 - protein, 555 aa, unidentified
  source 1..555: note = Bacteriophage uvig_66023 from the Index of /pub/databases/metagenomics/genome_sets/gut_phage_database (ebi.ac.uk)
MMTLFEIRNALADGTSIYELPLKVTYYARVSTDKYEQLNSLENQVTYYENYIKENCKWTFVEGYIDEGISGTSTNKRDSFKRMIRDGQNGKFNLVITKEISRFARDTLDSISYTRKLLEYGVGVFFQYDHINTFNSDSELRLTIMASIAQEEVRKLSERVKFGFQRSIESGKVLGNDFIWGYKKDKCKLVVVEEEAEIIRKIFDMYVNEHLGMRSIGNKLAGEGILNKNGKPFQQGTIKYILTNPKYKGYYCGNKTRVIDYHTKQRVNINEEDWKLYEDNINVPPIVSEYIWNKAQEIVKSRSDRFSTHKEVYQNRYPFSGKIFCMNHNTTYRRKKQISSGKKKKVVITWRCSHFLKYNTTGCDGPILYDDELKEIVGKSILKYISNVSIVDDLIKEYKTIEDNKDYSKDIEKKKDEIERLERSKSKILDLIVKELINEDDFKKQSDEIVSKIHKLENEISELETKSKSILTNYKYLEEVRKKALEKLKYENADIDSLIYEFLEKIEVYKLNDNNYISLRVILNTGNQYGITFKHGEHPFGTNYTYDKSRSRKHI

SEQ ID NO: 312 - protein, 486 aa, unidentified
  source 1..486: note = Bacteriophage uvig_380785 from the Index of /pub/databases/metagenomics/genome_sets/gut_phage_database (ebi.ac.uk)
MASAVIYARYSSSGQREESIEDQVRVCTEEAHRNGDRIVRVYADRATSGTTTNHRAAFAEMVADSARGWFEKVYVYKTDRFARNRYDSAIYKTKLKRNGVRVVSATERIEDGPDGILLEAVLEGMAEYYSANLAENVKRGLHGNALKCKHNGVMVYGFDRGEDGYYHVNEEQARVVRTMFEMYDAGSGFPEIEDALKPWRTSYGKPFTMKTISKMLRNEKYAGVYKYGGQRVEGGMPSIVPPELFERVQRRLALRTRKRRGTVEYLLSGKLFDIDGNRYQSSSGHGKSGRKYTYYRCPATGHIVPQEKLEHAVAEEVQAFLSSDHVAGIIADLVMEEQEVALSDDLDAMDALRKRLADNEREQARMVDLAAKTGATDAVAAKLDELVAERQAVADELAELEKGTPVFDRDHVEFWVHEVVGKKDPLEVIALFVKRVVLDREGERFHVEFIIDGGDDGGNETNPRPDAPDGGSCKSQLAEEEGFEPS

SEQ ID NO: 313 - protein, 475 aa, unidentified
  source 1..475: note = Bacteriophage uvig_388771 from the Index of /pub/databases/metagenomics/genome_sets/gut_phage_database (ebi.ac.uk)
MKVGAAYIRVSSDDQTEYSPDSQVKEIKNYAARHDIFLPPENIFIDAGISGRKANKRPEFQRMVSAAKNKPKPFDVILVWKFSRFARNQEESILYKSLLKRECGIEVTSITEETGDNMFGSLIERIIEWMDEFYSIRLGEEVRAKMTFVAEQGKMQTTASFGYSKKPDEELKILPDEANWVRFMAEQFLNKKSLRSIANHLNANGIRTHRGNKFEARTVEYILKNMTNAGAVHWTPNQAAHDSRHPYSDNTIIVKDVLPAIYSFEQYEEIMKEFDRRTKSRTKYAKSDTVKKHWLSGYLKCSNCGATLIYSKAHNGFQCYKYGKSLCSVSHYVSASKIEVAVIEALSEVTVTDTFIKAITKPTAKDSIDYTKDIERLENMLVRAKKAYVEGIDSIEEYAVNKERISKEISQLKQKESERIVEYPPKTDVVNKFKTIIDLIKSDADNDAKRAAFGEIVEKVIYSKPEESVKIFFYL

SEQ ID NO: 314 - protein, 496 aa, unidentified
  source 1..496: note = Bacteriophage uvig_520747 from the Index of /pub/databases/metagenomics/genome_sets/gut_phage_database (ebi.ac.uk)
MNEIRAIQTEYRGYLFRSRLEVRWAVFFDACGVDWEYEPEGYDLGNGLYYLPDFLLHGVTINHGYFKKNCDIYVEVKGQMNDADAEKINRFYAAGYPEGNDWGVSHTAVLVVGNIPDGEDMCEILDNLQTEAYHDHHGWPNLYNFETVDEDYFGAYPGVDKHGKFNLFGDDSTYLWSMNSDVTERAYRLARQARFREFGFIKIDMIITKSISRFSRNTVDCLKYTRQLKELNIAVFFEKENINTLDAKGEVLMTIMAALAQQESESLSANVRLGIQFRNQQGKVQINHNWFLGYTKDEDGKLVIVPEEAAVVRRIYAEYLEGASFLQIKRSLEADGIQNGAKHDKWYESNIKQILTNEKYIGDALLQKTYTVSILDKKRATNKGNLPKYYVEGSHEAIIAKDIFLRVQAEIARRANITPDGKKRIYSSRYALSSIVFCGHCGDIYRRIKWNNRGCKSTVWRCVSRVLKKDSGIDCPARTLREEDLHAAVLTAINDA

SEQ ID NO: 315 - protein, 513 aa, unidentified
  source 1..513: note = Bacteriophage uvig_380944 from the Index of /pub/databases/metagenomics/genome_sets/gut_phage_database (ebi.ac.uk)
MAQAKLISPVSRQAYERTKVAAYCRVSSNSADQLNSYAAQIRAYTKLIKSNDSWELVEIFADEGLSGMKAENRVEFQRMIEMCEHKQIDLIITKSVSRFARNVKEALEYVRKLKLLGIGVQFEKEGIYTLALGDEMLLNTFSAIAQEESKAISQNQRLSIVKRMERGEYVDSNAPYGFRLQDKKLEAFDREADVVRYIFQQYLSGWSTSEIARDLTEKGIQTKLGKEQWRSTKISYILSNERYVGDCRYQKTYRDTTVPFKQSKNRGQEDMFYASETHDPIIDRESFEKVQALLQDRKERFSKSEQLNIYPLTSRIRCSECGSVFRRKVRNGAIKWVCARHSADTHACPSGYYSEERIYDGFITMVNKLRFGEERILDQVIAKLETAAALYKRNNISAGKMSQSIAELNAKLVMLEQLRSKGYLAIEVYQSQTRDIQKQISSLKSERRSAFESTIQTMLDEVLKMRSLLNEIEEPLEEFNDKLFHELVKGIEINKQDEMTVTFLGGLKFTELI

SEQ ID NO: 316 - protein, 612 aa, unidentified
  source 1..612: note = Bacteriophage uvig_148875 from the Index of /pub/databases/metagenomics/genome_sets/gut_phage_database (ebi.ac.uk)
MLRAVIYCRCSTEEESQKDALAKQIQEAEECVRKNNWLLTDSYIESRSGTTTKGRTEYNRLLGDLELNKFDIVVIKSQDRLMRNTKDWYLFVDRLVTNSKKLYIYIEQKFYTTDDALITGIKAILAEEYSRELSKKINNAHRNRQKSGSSVILNSNVYGFQKLPDKTIALVEEEAEVKRRMYELCASGYGTRTIETILKNEGIKKRNGKPFIANDILRIIKNPLNKGCVVMGKTHYDFDSKKMIRMPEDQQYVYENLVPHTVSDALWESANEEIAKRRRSSKTDKTSFGRNTGKYELSGKIYCGLCGSPYYRKTRRRYRDEKIIYEWKCRTYLETGRNVGRKDRPQLRKVQLETVEGCDNVHLDEEQLYELLEQNCVKSYQVDKERIVKKMVRFLKLVLQERDLQPEIEQKEQKKRKIKQQMQLLVDKLLDGILSDEVYQEKQRSLEKQLSDITGQLKKLEQKRSKENVLEDRISHIEKSMKNGNLIEKATVAEMLDEIEKILIFPTYMEIYFNLSRMLGLHEMQLPYETSEQGEVLRIEYGNRFNYKEKKEGGREEIIELLRDNPKITAKMIAQKMGIGLSAVHYRMNVLKREGRIRFCGGGGVGYWEILE

SEQ ID NO: 317 - protein, 575 aa, unidentified
  source 1..575: note = Bacteriophage uvig_143975 from the Index of /pub/databases/metagenomics/genome_sets/gut_phage_database (ebi.ac.uk)
MTVTQNYDNIIPSTPILSADPNVKKDVMTDQQKITILYCRLSNEDSQDGESNSIQNQRELLTRYAQDHGYTDLKVLVDDGYTGTNFQRPGVQEGFELVKQGLVGCWLCKDLSRFGRDYLTVGQYTDIIFPSYDVRFIAVNDGVDSQRGDGEGFAAIRNLFNEWYPRDTSKKVRISLHQRGTSGKHLGKPPYGDRCDPNDKDKWILDEEAAPVVKRIFDLCIGGKGPEQISRILERDQVLTTKALYASRKGKPLPKNPYGWKDQSIVGILERQEYTGCTCNFKTYSKSYKLKKRIPNNPEDMFIVPDTQEAIVSQAQWDRVQELRKNKRRPVKAERQGLFAGLVYCADCGSKLHFATCKGFEGKQDHYRCSKYKSGRGECSAHYIREDVLRELVLERIQAVNAYIRSDVEGFQEEWLHYRRADQERDIREDQKRMEQAKKRLANLDVVMSRLYEDYALGEISKEKYKKMTSDYEAEQERLKLEIETTEEWVEQRQAMGDDLDAFIALTKKYVDVTELTQTIVNEYIKKIIIHAPDKSSGKRRQKVEIIFNFVDEVEIPVLAEPMIAESTLGRKKTA

SEQ ID NO: 318 - protein, 518 aa, unidentified
  source 1..518: note = Bacteriophage uvig_59951 from the Index of /pub/databases/metagenomics/genome_sets/gut_phage_database (ebi.ac.uk)
MSIMSFNNIIIYLRKSRADDPTMTVEEVLAKHESILQDYCIAEFDQPMPESRIYREVVSGETIQDRPVIQRVLRLLESGNIDGVLVVEPQRLSRGDLEDCGHIINSFRYTNTMVITPTKTYNLQDEYDRKFFEMELTRGNDYLEYTKKILARGRLAAVMSGQYIGSVRPYGYTKIVYGSGKNRIRTLEKFKKENDILILMKRLYLDEDYTPEEIARAFDNMGIEPPRGKHWTASAVRRLLASPINNGKIVWNKRQTVVEWRNGKQVKSRAKSNKDDVIIVQGKHPATYDDETYTAIMAKLSIHSVKVTNQRGLRNPFAGILFCQCGRAMSLRSTHGGHSVILICNDHSYCRTRSVAFNPVLDKVKEALSEAITDFTVKISNKEQTDSELYALNISTLENKLEQLYKKDLVQKDAYEDGVYSKAEYIQRNTQLQEQISVIANSLEEMRAKAPEVINYKDCIIRFQDCLNALEDNNVSIEVKNALLKACISKIVYHSVNSNPEYSGRTKNPFNLEVFFKL

SEQ ID NO: 319 - protein, 650 aa, unidentified
  source 1..650: note = Bacteriophage uvig_368726 from the Index of /pub/databases/metagenomics/genome_sets/gut_phage_database (ebi.ac.uk)
MSVINTLQNILAYYIRISVGDRNKAGKTDESDSVINQRALLKRYVEEHPDLRELQSIEFVDDGESGMTYERSAFVRLMDEVKKGTVKTIIVKDYSRFGRGYIDAGDYLEQIFPFLGVRFISVNDHYDSNRYKYGSAGMIDVGFKQIMHQYYSVSLSQKILCAHKQLAQKGKFHASYAFYGYIKSPEKYRLEIDEESAENIRYIFNAALQGKRNTQIAAELNEMKAPTPLWVLRKHHKNIKNWNEKNCRYIWSADTVKRILQDERYTGTFIYGKTRVDKIGSRKMVSRPREEWTVIPDVFPVIISKEIFDKVKGKRKHIIKAETQKSCMFHNVVCGYCGMCLVYNDTENPYYKCMEYKNGVTVSCKGNRVYESDLKVLTLMALKEEAQNLLKQLHTAKQCAYKGGKANKIKELQLKLNAIPLKKETLFKQLLSGEITKEKNGVLYGKLEQEEKSLTEQIEALQSVTETAAFENDTVSFLQSLLKTKTLDIKTVKMFVKQIRVFMNDRIEISITLKPLNGKEEIVTKVYSVPEIKGKRVWIYYRTWYNEGKLQEQRNSLIKYAESKGWSIVGENGGYHSNSKKLFEQIKEAAENKAFDILLIEDMNCITRNWQESLEAIRHMNKNNVRIVATSGTPYYTFLDENLYNEVKGI

SEQ ID NO: 320 - protein, 686 aa, unidentified
  source 1..686: note = Bacteriophage uvig_355166 from the Index of /pub/databases/metagenomics/genome_sets/gut_phage_database (ebi.ac.uk)
MTEHIDIAGYCRISVDEELDRDNVSIENQKAIITDFVKHRFPDSTLTFYEDRDRSGYTFEQREGYQAMRHGLMDHKYDVLIVKDFSRFSRRNSRGLVELEDLRDAGVRIISIGDGIDFPNDDDWLKIQFQFLINEMPVTDTSKKVRNVIKRRQADGQWICAAPYGYRINKYKEFEIVPTEADIVRLIFNLYNNEGWGYKRISNHLTEQGIPTPRMSEQMRKEAEGEACKRIAKATWAIVTVQGILDNDFYIGTLRQGKYTRVKINGKEVKRNDGEHVVIENHHQAIIDYRTFATTRALREKRTRSHYRGIKKYDNFYSGYLVCGDCGAPMFSMSRNDLKPAYTCGTYHRRGLAGCTSHHIRVDKLDELLKKYVRKVKECSAEMLAKLNEDLRQEESNVVETEQSADHLAEILEDLREELKATKRQRIRDILKHPDQESLLEETYDELESDLQKRMEGLTHQIDLLSDKRNTIIQVNRAAKTAMDVFDDILNKEKLERNDLELLVDEIRVFEDRLELKLQPDVDSILQCSTMERTINFPDGTGDISSISIVQSAKQRPDKVFRANVICNGSPSRIRMVRRISLGMTTRPRSSIRRTIPVAFIYEIPPVKANFTSVVSAPREMNMHEVPLTIFCRQSTARGIAAIKRPPVVRPEVLHFFAFLQSAYFTARPAYPPAACAPASEWRRPP

SEQ ID NO: 321 - protein, 615 aa, unidentified
  source 1..615: note = Bacteriophage uvig_345767 from the Index of /pub/databases/metagenomics/genome_sets/gut_phage_database (ebi.ac.uk)
MQSSEEAIKFLDEYLIYLRKSRNDGEKVPVEVIVKRHEEALQELAERELGFKIPEKNIYREIVSGGESIEDRPEFIKVLQRLEVGNIKGVFVFDPHRLSRSGLYGAGDVLEAFEVTQTLICTPMKFYNLDDKMDKKYLEMIMIQAAEYLNYAKDVMDAGRMKSFAEGKAILSTPPYGYGKEKISDEKGYKLIPNPVEAPNVKKMFELCCEGLGTTAIANYLNERNVKPRKKAYWEPTTIRDMLKNETYIGILTWGKNPIKKILQNGKARKKRFYNQEGFKVAKGLYEPLVTKEQFELAQEMMKSRRNREYYNNGIKNPLAGLVFCGYCGNAMIRRPYNKSFRKNLVRVYEIDKQELLDYLRAYKQQSNLSLTEIAKRLNVTRDVVVGWFPAKLEKFYPSKTLADKWFDLKTLLDIKDDKFDKEVTTYKEPDIQKDSLICSSLKCNCVSSYLEIVENGLIDKLKNELYKRKHFLDNYEQELKKEKVSNEKELKEVEKKIEEIQGYIKNAAKKNAMDIITDEQFLDLKEEFETELNPLLKKKEKLADTKDEERIIQYRRSIPVLERCVSDYHLLSIEEKNRLLKSFIDRIEYKKEVGGRWNKEAINQFELAVETYDF

SEQ ID NO: 322 - protein, 509 aa, unidentified
  source 1..509: note = Bacteriophage uvig_585265 from the Index of /pub/databases/metagenomics/genome_sets/gut_phage_database (ebi.ac.uk)
MLKSDIMTDEKWLMYLRKSRSDNPDETVEEVLQKHEMQLQEFARNELGKEIPEDCIYREVVSGESIDDREEIKKILVRIESPDIAGVIAIEPSRLSRGDLSDCARIIDAFRFTHSLVKTPYMTYNLENKMERKFFQDELLRGNDYLEYTKEILFRGRVAAAKRGCYIGSRPPFGYDRVKKGKDFILTPNDDADIVRSIFEWYTKENMTPGAIGRRLDDMGIKPFMTETWGRDTIRAMLENQHYIGKIVFNEKRTTWVLENGHRVKKRIRQPEDLIISEGKHPAIIDAETFAAAQAKIAANPHLKNDHDLKNIFAGILRCKKCGYIMIYNHKKGTQARLTCKLSPICYKAAIASELTEAVISALELSELPKLKTKLKNGDGNAAQIQKRLIDKLNKQLQEYREQEENQYDLLERRKYTQELFDKRNAALRKKMEECEKNIYLARSAMPQNVDYQERIATLEKAIETLKNDDIPNKEKNALLRTIIERIDYSSVDLGKNKIDIQLDIYLKL

SEQ ID NO: 323 - protein, 535 aa, unidentified
  source 1..535: note = Bacteriophage ivig_2445 from the Index of /pub/databases/metagenomics/genome_sets/gut_phage_database (ebi.ac.uk)
MNSYDISFRPEEVIQYLRKSRSDDPNMTIEEVLEKHEHMLRDFAVNHFGAPVPDCNVYREVASSETIDGRPEMLRLLRAIESPDIRAVLVVDVQRLSRGDLEDAGRLMKLLRYTNTQVITPMKTYDLRDEWDRDIFERELKRGNEYLEYFKKIQARGRLQSVQEGNYLGSKPPYGYDRAVIRIGKKNCPTLAVNKEQADVVRLIYELYVNKDWGAQRIANHLDSLGIHPLHNAHWNPAVIKDILRNYHYIGKVVWNRRKTITVVDNQEVYKTRPWNENMLIFDGRHEAIISEELFHAALARQGRSHRCRPDTRVSNVFASILHCSCGYSMSLRHDGRGSLRLSCDDQRHCKSGSIGYEELIDYICKVLTAYIDDFKIKVKHDNANEVDIHRALVTDLEARLTALEAKEVKQWEVYSMEGMPRAIFDKLNKHVKEDKAEVERALKQARKDSPDPVDYRERIAKFGDALNALQNPAASAEIKNQYLKAIINDMIYTRPGAVRLTADNCSDYGINYRDMAKRGGWYSPPFRLEIKFRF

SEQ ID NO: 324 - protein, 506 aa, unidentified
  source 1..506: note = Bacteriophage uvig_136571 from the Index of /pub/databases/metagenomics/genome_sets/gut_phage_database (ebi.ac.uk)
MVLMYLRKSRADNPYETVEEVLSRHETILQEYAERKYGERIPESQIYREVVSGEKIETRPEMKSVLRRMEAPDVDAVLVVDPQRLSRGDLIDCGTLMQAFKYSYTKIETPMKVFDLWDKFDEKMIRDEFLRGREYLEYAKEVMARGRKLSTSEGWYVSSIIPFGYDVDYVMDGKRRRKTLKPNPIESVIVQNIFEWFVNDKLSMYAISDRLNAAGIKTRKDKEFATDAVRGILKNPVYIGKIAIGRRDTKENMVDGKVVKSRPRTEPKKIFDGRHPAIVSEEIFNAAQERIGTLPKVKRSTEFRNPFSGIARCSCGRALAYNIGRGEVRLICGGRKKCGARSVPLDDFTNKVIKALKETASDFSVQIDSGIDIDIQRHAEETKQAEATLRDLDIQQERLYSFLESGTYSEEIFRKRNAILEEKKEKAQNHYKYLLDNEPVKIDYEKKVGTLYQAIDNVASDKLTPKQKNDFLKTIISKIIYTPLPSIDDGTRFGQHQYRLDIFLKD

SEQ ID NO: 325 - protein, 513 aa, unidentified
  source 1..513: note = Bacteriophage uvig_469171 from the Index of /pub/databases/metagenomics/genome_sets/gut_phage_database (ebi.ac.uk)
MIERSGTWLMYLRKSRQDDPNETVEQVLAKHENILQEWCQREIGSQIPEKNIYREIVSGESIDARHEIKAVLARIEDPAVAGVVCMEPSRLSRGDLADCSRIIDSFRFSRSLVATPYMVYDLENKMERKFFKDELLRGNDFLEYTKEILFRGRVAAVKRGCYIGNTPPYGYNKVKIGKDHTLEINEAEAAAVRLVFKWYTQEQLTPLRIADRLNEMGVKPARIDKWKKDTIRVMLRNPHYAGYVAFNQKKETQVLENGRIVTKTLAQPEKDIIIAEGKHTGIISRDEWKAAQALVARNPRIDPSKELVNPLAGLLVCKKCGNRMIHHPYKHAADRIECRTRPRCYKSAKREDIVESLLVILEKEHLPQLLARIKNGDGDARKIQQRLLAKLEKQMEDYRAQEERQYDLLETNPNYPQEVFERRNKALREKMDECQAAIYKTKSALPQSVDYAERVAALRHAIRLLRDDTATLEAQNKALKMVIDHIDYSAQESDPTNRQRNGVDFDLAVFMRL

SEQ ID NO: 326 - protein, 515 aa, unidentified
  source 1..515: note = Bacteriophage uvig_155463 from the Index of /pub/databases/metagenomics/genome_sets/gut_phage_database (ebi.ac.uk)
MPQHHIMYQRKSRQDDPNATVEEVLAKHEAMLQEYAIRELGGPIPEENIYREVVSGESINDRIEIKKVLARIEDPQITGVLVVEPQRLSRGDLADCGQLINAFRYTNTQVCTPVMTYNLANKMERKFFQDELLRGRDFLEYTKEILFRGRVAAAKRGCYNGTYAPFGYRKIKIGKDHTLEIVEDDADVVRMIFDLYTREQLTPFAIAERLNDMNIKPPRAERWKKDTIRHIVRNEHYIGKVRFNKVKSVPMLDNGEVITKRITQEPEDVILAEGRHPAIIDMETWNKAQALVARNPRVKHTYDLKNPYSGMLVCGGCGRAMIIHPYKHAEDRYECRATREARRCYKSVKYSELNQTIIHALESVELPALRLKVKNGDGDAAKIQQRLLAKLEKQLADYHQQEDKQYELLETGRYTQELFDRRNAQLREKMEACQKQLHEARAAMPRGVDYAERVASLEAAIAKLKEPDASPQEKNRLLRAVVDKIVFKGSPPVDKSIKGWKKGENSYNISVQLRL

SEQ ID NO: 327 - protein, 463 aa, unidentified
  source 1..463: note = Bacteriophage uvig_597316 from the Index of /pub/databases/metagenomics/genome_sets/gut_phage_database (ebi.ac.uk)
MFAGVYTDEGISGLNTRHREGFNRMIADALAGNIDLIVTKSVSRFARNTVDSLTTIRDLKSHGVEVYFEKENIWTFDGKGELLILIMSSLAQEESRSISDNVTWGQRKHFADGKVNMPYGQFLGYRKGPDGLPEIDPEEAETVRFIYRLFMGGKTVNAIAKILTEAGVPTPRKKARWQDKTVESILTNEKYSGDAVLQKSFTVDFLSKKMKKNEGEVPQYIVTDSHPGIIDKAEWELVQAEMAKRKAKGRSQNSLSPFSMKICCGECGSWYGSKIWHSTNKYRRVVWRCNGKYERQTGCKTPHLSEAQIKALFMQVLSKLHEQRETLIADCEALKGMLSDTSEIDGERARIAAEQSETETLAAALIQQNAMTAMNQSEFNRRYEEYVKKHDALSERLDKLDGKLEKRKQEIVVLNGFISDLTAMKELPVEFSGELWNAFVEKLTIHPDGGAEFLFRNGAVITE

SEQ ID NO: 328 - protein, 427 aa, unidentified
  source 1..427: note = Bacteriophage uvig_181332 from the Index of /pub/databases/metagenomics/genome_sets/gut_phage_database (ebi.ac.uk)
MYARDISRKVRSAHRIRGNSGEPLGQPPYGYRKDPLNKKHWIIDPEAAQVVRDIFRMCLEGKGNDTIARILQENEILNCTAYWHEKGIGRGGKKTQPNPYRWKNSTIRKILTQQEYCGDVINFKTYSKSFKDKTRIDNPEENWVIFKDVHEPIVDRDIFEQVQKKIIKRTKRRAPKSENGEKSIFSDLLYCADCGHKLWYHVNTINKNICFFSCSNYVKDYRGSCPTRHYVRADAIEQVVKLELQRMAQFLRDDEPMFADLLERKSNREIAEEKKRLEGELQKARMRTETVSRLYKKAFEKNAEGLLSDEGFLQITHEYDVEQLALKVKIPQLREQIAEAERQAANKDKFIAAIRKFMQMDELTAPLLRELIDHIEVYETQGVGKSRTQRITIHYRFVGYIDIPAAPLTSHYISETRQGVAVEYIPA

SEQ ID NO: 329 - protein, 602 aa, unidentified
  source 1..602: note = Bacteriophage uvig_222038 from the Index of /pub/databases/metagenomics/genome_sets/gut_phage_database (ebi.ac.uk)
MKFTIFAANVTNKFERAMKRAALLLRCSTDAQDYERQKLDLLDTIKGMGYTTSDDLVFGQYITGKDDVRKKDRESVAECKQAVREGKVDAIFINEVSRLSRDSIAGRLFIREFNDEYKIPVYFRDLGMWTINPTTRIVDRSFETMLGFYFDMAQNELKSMKTRFASGKRKNAREGKTIGGAVPFGFYKDEDGKLQVDEEQAQVVRLVYNKYLEDGGSIPSVCRYLLSCGYDKKFNKKFGTGSVRNLLRERRYIGEQRYNLVNPDEAKKQEVYIYKVDAIIDTTIYNKVQIKLDKNRTTETKKVNKDKKIHLLAKLITCPICGDSYTSKTASANKSGERYRIWNYCCVSKYNFSECTSDITLNADNIESIIWQLTKREILALQELSLEERQSKIDEAEQKLASYKDELDVIAKSIDKLNVKKKKLVALFLDIEDDDTAIFNEQREAINKEIDSYNNRIQFLNTEITICEGNIARFKEADFTDEVLDKIEQDLLKKKELIKEYIKVIRPYRLTKARLILEVESKQTNYCILFEPRNSKRRCWYIQSSLAQWQNGLLKTSTAPLGNFFYIPMASLLLDEPDDLDAIASFEDMKEICSINNYVIEY

SEQ ID NO: 330 - protein, 487 aa, unidentified
  source 1..487: note = Bacteriophage uvig_211114 from the Index of /pub/databases/metagenomics/genome_sets/gut_phage_database (ebi.ac.uk)
MQAIEADDSINCVYAWEISRIARRKKILFSILEYLTKRKIQLKINEPSITLLNNDASINEASETIFTLFAQIAESEMRNKKARFQRGKAANAKQGRYNGGLVKFGYCIDSDGNYIINEDEASLIRTIFDMYVYQKLSHSQILKELKETGKIEQTKQKQFITKILNSIEYTGEANKYSFERKYPIIIDKYVFDKSREIAAQNKNEADKTKNLYLCKGLIFCKCGSRYTANSLSLQYICYNRFHKKCDFSNDININIADSIAWYCAKIQQMKLNSENVKQVVHKYKENIQLLNEKIDVLQQKITGLNGKRERNADMYFNGSINQEKFKSNERIINEEFNEHTSRINQLNAEIADYNRMIEASEESVNYRNIVKDVNQMNDNLKYQIIHNFIKKISVETIRSRVLKEVSITLKDDRIFTYLVDVRTKKLYKKCDDFELDMQKTLNPNVEVIYDDFVQEEGFKFIERIKLSEDKLNKKREMVRKIRKEKSK

SEQ ID NO: 331 - protein, 389 aa, unidentified
  source 1..389: note = Bacteriophage uvig_473863 from the Index of /pub/databases/metagenomics/genome_sets/gut_phage_database (ebi.ac.uk)
MANIYVVFQHIGYKRHPSIKNKLIIDEQVKDIVEKIFDMYANGQGSVEIVNFLNTNKYLSPTGYRKTGIIQDENKTNYDWNEVTLCNMLKNEVYIGNTVQNKKSVISYKVKKIRTVEKENQIRVDNTHEAIIDKDTFEKVQCIIEKRGTNTKLKYDYLLRGLLYCYHCKRKLQIVLKKNSRRNAQSHSYIICADYKKRGCYPLSINYEKFEKHIIYVAKKICSIYADKEVFYSIYEKYQNKTLDIREGYRKKVDQIDKAIFDINNNLDKMYMDKLQGIILEEDYIRVSQKFIFDRTNLIKQKEELEQKLIGTEEKINTKYKTKEEKELDELIENFLKLEKIDKMYLYRLINKIEIDKDKNAYIFFNFSKLNSINENLDEFIKVEELINK

SEQ ID NO: 332 - protein, 366 aa, unidentified
  source 1..366: note = Bacteriophage uvig_73839 from the Index of /pub/databases/metagenomics/genome_sets/gut_phage_database (ebi.ac.uk)
MKDPANKNHYIPNEETAPIVTKIFEKLRAGVLPTDVGQWLNDNNIAVPSESVGNTHTRTANEVKRQWNRTTIVRIARDETYLGYVISEKSRKVSYKSKKIIQVPKEEQIKIKGMHQPLVDEETFNIVQKMIDSRKHTRKYKYDFLLKGLLECAECGKKLSILTQKQKNGNEIQYLRCNTYAAMTRLKLCTPHSNNCEKLTNIVIDTVKERIKKYLDEEKFYELANNIKDKTAYKRNLLNNQINGFLNKISQMEKKIDLLYEDKINGTIGEDDFQRMYVNTLQKKEELKKSIEELEKEKEEATREIDLKKIVSNFTEMKEVNRELLVSLIDRITVTEDKKIKIYYQFSILNESSNSQKNNVVTMITA

SEQ ID NO: 333 - protein, 578 aa, unidentified
  source 1..578: note = Bacteriophage uvig_154548 from the Index of /pub/databases/metagenomics/genome_sets/gut_phage_database (ebi.ac.uk)
MAKCILLVRVSTESKKQEISLREQETELFELALSKGYCEEDIIAICKQESALKRRYATSDEKDAIEIKQQGLQEMEDAIKNDSSINCVFAWEISRISRREKVLFDELEFLTDRKIQLVILKPYIELLNSDGSLNPSSKMQFSMFAALADAEMRNKSDRFRRTKESRRKEGKYVGGWLPFGYMVEPTTKKIIINEEEAAIVKYMFNEYLKGGTSIYKLANELQERGIISYDNKHSAFTFAYTILRNYSYAGLQGTVRQKDRKPSTNVYPAIVTKEMIDKAIEMSEQAKTKPKTNVKNIYYCKSLLKCADCERVYVARLNKAVYQCTNDNGKCNNAEISINLADTILWNVAMTLKISQMLHQTEEDKTAYQLQIEVLKQKIEKINIDIENNNKAYSILNKRIIMQKISEEDGELIEKELDSTKKELEKKLNEYNNKVAEIEQILFNMNTSIAFKHINIDDIADIEDDNLRYEIIHEIIDYCMVEKVANSIIKLELYAKHINTAYTYYVTTRNRKIYNKDFRIEEAYTSDNTHLVDFKILQRYKRQGKANKEYQKQYYQKNREKLIKQNVEAKRRRKSKPE

SEQ ID NO: 334 - protein, 382 aa, unidentified
  source 1..382: note = Bacteriophage uvig_578394 from the Index of /pub/databases/metagenomics/genome_sets/gut_phage_database (ebi.ac.uk)
MLSILSGLAESESVSNAENNKWSIQRRFQNGTYKISYPPYGYDNVDGEMVVNEQQAEIVRYIFASILSGKSTHKIAAELNNRKVPTKKGGRWTATTIRGMVGNEKYTGDAIFQKTYTDVHFNRHNNRGEKDQYLIKNHHEAIISHEDFEVAQDIIEQRGKEKGLERQHKKYQNRYPFSGSIICGQCGGTFKRRIHSSGRHRIAWCCSIHIADIEKCSMKYVAESDFEYAFVTMMNKLIFGHEFVLKPLITSLRGLDSDETLGNIQALDRKLGENAEQRNVLVGLMTKGYLEPAVYNKSNNELLQEAERLRRQKESITRFLNNDFQNLSEVSALLQYATKASIMKDFDGDIFKRFVERVVVYSRTEIGFELKCGITLKERLVR

SEQ ID NO: 335 - protein, 509 aa, unidentified
  source 1..509: note = Bacteriophage uvig_175345 from the Index of /pub/databases/metagenomics/genome_sets/gut_phage_database (ebi.ac.uk)
MRRAISYIRFSSERQLKGDSVRRQSKLVTDWLDKNPEFYLDSSLSFKDLGKSAFSGKHLKGGLGDFLTAIEKGLVKAGDTLLIESLDRLSRQDIDIASELLRRILRAGVDVVTLSDGEHYTKESLKDPLSLIKSILIMQRAHEESLRKSERVQAAWNRKKELISEGIKISRRCPAWLKLNDDRRTFTIIPDKVEVVKRAFDLRLQGLSFWAITRTLNDEGHLSLNQYTPKQKGWSDTAVKKLLRNRAVIGCFTPAGREEVQGYYPAIISESLFYRVQQLNTGQYGRASVSSNPLSVNLFRGIIKCSECGATIVLGGYALKRFGMYRCPNRSANRCSAKAISRKQTDATILYMLALCDRFETENTDIIDSLKLQREDLQRKISKMAELAIELDDMTIITEKLRDMKNALSKLNHDIEEETKRIKAITTGSLKDIDRTTKEGMIETQLLIKGVLKEIVIDAAKRRCKVTFHNGRIIDLPITENPSEDVTEAIQSLSEVTERGLIDVDEVII

SEQ ID NO: 336 - protein, 376 aa, unidentified
  source 1..376: note = Bacteriophage uvig_574139 from the Index of /pub/databases/metagenomics/genome_sets/gut_phage_database (ebi.ac.uk)
MTINEEGAKVVRLIFHKFVYEGKGTHVIARELREEGISPMRVKEWSNTVILRVIRNEKYCGDLVQKKTYTPDFLSHEKKYNRGQEEFVIIKDHHEPIISRELFDEANRILDAKSLSQEGKAKHSNRYPFSGKIKCGCCGSSYVARNKTRKDGSRYKAWRCNEAAKHGSPHIDKAGNQVGCTGLSIRNEDATHIMYLVTKSLKYNRDKIINNLTAVIQSIIAMDTTGTDVLKLQEQIKKIEGKRANLIDLYMSNLINKDEFTATRASCDAEIEELQSIIESVDKQREMIEQQQQLLKEIEDAIKEIVSGVEYEDEFYKHILDKMVVQDKDNIDVYLNLLPMKWSYTVAKASKKAVASEWNISEASLPMSVSRPFNSA

SEQ ID NO: 337 - protein, 518 aa, unidentified
  source 1..518: note = Bacteriophage uvig_189213 from the Index of /pub/databases/metagenomics/genome_sets/gut_phage_database (ebi.ac.uk)
MQEAIKKDVKIIRPTKGLCGDKKLRVAAYCRVSTSSVDQENSFIAQVKYYNDFLNRSENMELVDIYADEGITGTSTNKRDDFNRMIKDSSLGKIDRIFVKSVSRFARNSLECIENIRLLKSYGTTVLFENDAIDTETMNSEMILYIKSAFAQSESLSGSKRVSTAIRMKMENGEFYNYTAPFGYKAENKTLIPIPEEAEIVIRIFREYIGGKGIGKIVADLNKDSVPGKPWVKERVRYILTNEKYCGDSLYQKSYTPPVLPLRNISNRGEVPKYYVEGTHAAIIDKETFHTVKQMFDRNMLIYGKRQKREIENFAGRLICGDCGRVYKKRIVGSQPTWICSKNGVAGQRCKTHPLSEGALKKSFVFMYNRLQQHRELIIKEAYQKLLELRKAFFNSSSAVLDIDTELAELAEQNAMYVRFHSQKIIDEVTFIEQTGEIKQRINELRSRRIKLMNNNEEERCIELLREAMQELEELPQAILLFNFNIFDKLVNKVAVMPDSLVFELRCGIKLREEIIWN

SEQ ID NO: 338 - protein, 501 aa, unidentified
  source 1..501: note = Bacteriophage uvig_296776 from the Index of /pub/databases/metagenomics/genome_sets/gut_phage_database (ebi.ac.uk)
MQKQNGLAYSYIRFSSKKQEQGDSVRRQTELAEKYSIANNLTLSEKNFQDLGISAFKEGNRPSLGDMLSAIEQGAIESGSTIIIESLDRLSRRGIDVTQQIIKSILQHNVFIASLTDGLLLNRESVNDLVSVIRIALAADLAHKESEKKSQRLRETKQQQRKAALEGKVINKILPFWLAREKDQFVFSDRLDAVKRIIELKRKGLGTNKIAKTLNDEGFRPLRSAGWNHTTVGKTLSSVALYGAYQTSETTKDRKVILLDIIDNYYPAVISKEDWMLLQSDAKQNKPGYKSDKNAFTGLLKHSCGGALVRKFHVVTGKTYQYHVCANARDGKCTVTQNFKNMEIALYKILKHLKMEKKTSVDTTIAQERAQLKEQIDNLNGMLLTMKKVPMSVLETIGNLEEKLQELDQQFKQQSDMVLAEQSVDFNLLSEIKDPIELNMMLKRVIKEITVFNLKKSWRIKVQYLNGHSQSFRWDGYSMSFVSDSKKLLEYMNAEKEQLDN

SEQ ID NO: 339 - protein, 650 aa, unidentified
  source 1..650: note = Bacteriophage uvig_173157 from the Index of /pub/databases/metagenomics/genome_sets/gut_phage_database (ebi.ac.uk)
MAKDENKESEIRGDEQEIVDQRLPVWRPQDADREYYRYETKKRIQHYTVPPQTIFRPAKPTPTIRDAEHKRVAVYARVSTKSKEQVSSIENQTKYYTEKIAKTPNWDLAEIYSDEGKSGTSKKWRPEFKRMLEDASKKKMDLIVCASVSRFARNISDLIEEVRKLRTTNPSNPVGVYFETEDLYTLDPNINERLQMQGLFAEWESGNKSRRMILSYDQRICTGQFPLSDLLGLRHTIEGGFIIEEEEAKTVKYIFLATLCGYTAEEIAEVLTDKQRPTLRGRTEWTASMVKAIMENERRWGDLEVRKRVVIDYKEKVTAKNDGLREGAYIPHYHEGIVSPEIARAAHMMRASRYKFGSVPDVYVIDSGALKGFVSISPTWSGIDNRAFQDISRQVYNEDEFCELQRRANIMNGRTHSNVVSMTLNDYRVAPGVMFMTRSDPQLTFSQRSMKLNAVCWEKLGQQKYVEFLYHPVLEVIAVRSCNATNPNAVLWDETKKSGLQLCTSAFSNAVYDKLDWMRKYKFRFRGVTRVRGGERIIFFFLDEPQILVGKDKKHLDAMDTSDSTVKYIPYKESECGEAAGLTAGIAYPENWQEQVGVSYEIKQQRGRVLDAVSSADIRNHGTKVVNPFIGVIPTHGELEDELEQIYEAM

SEQ ID NO: 340 - protein, 505 aa, unidentified
  source 1..505: note = Bacteriophage uvig_393561 from the Index of /pub/databases/metagenomics/genome_sets/gut_phage_database (ebi.ac.uk)
MELAFSYARFSTKSQSTGTSLERQLNASRLFCSERGLTLSPKGYHDLGVSGFKQVKRPELEQMLQAIQSGDIPSGSYILIEAIDRLSRKGISHTQDVLKQILQYKVKVAFVGEDAKTLAGQVLDENSLNDLSSVILVALAADLAHKESVRKSKLVKAAKSIIRKKGTEGHKVRGHTMFWIDWSDKKQDFVLNDRVKDVHKIIQLRREGQGPRKIAKTLNELNIPGPRGNPWNHMTVTVVLRSPVLYGAYQTHQIIDGQKVPDVLLENHYPAVITQEEFVTIQADSSKSNKGRPSKANPFSGVLRCECGQAMLFSKRTNLNKDGEPLEYEYHFCLGYAEGRCKNNKRIRDLVPLLVQLMDKLVINQAPKKNLNVELIKQKEQKIEQLNKMLIELDSPPLSVLKTIQTLEAELDILLNTHVEEPVQADVQTLSSITDAQEYNQHLKRLVKKIVVYQKNGPKNLRIKVYKTDGHYQNFLVKDGTVLFKSDTKALKELIDGFNKERRER

SEQ ID NO: 341 - protein, 526 aa, unidentified
  source 1..526: note = Bacteriophage uvig_296393 from the Index of /pub/databases/metagenomics/genome_sets/gut_phage_database (ebi.ac.uk)
MAEKRKLAFYIRLSDADEEVKEGTKDESNSITGQRKLLYAYIKKTEEFAGFEVLEYFDDGYSGTMFNNRAEFQRLIQDAELGRFECIIVKDFSRFGRDYLEVGNYLEFVFPAMGMRFISVNDNYDSDRNFGVTGGMDVAYKNLIYQLYSMDLSRKVKSARRTRNLSGEYTASFVCYGYKKDPDDKHKLIIDEEAAKVVVEIFSLIIAGYNASEVARILNERKIPTRVQNQWKNGINYVPVHNKGDYMWDNSEVIAIVQNEQYKGIMIQNKCETVGFGDNKKVRKRNKEDWSVVEGAIPRIVSDEMFDEVNKMLRVEARGIEKSTKKRKKNLFICPYCGRKLMNSSAVCTPKLLCPKRRMVRTGECQQIFMLKSEAQDKVLEITKEICRTLIQEEELKKASKDKRKVTSDEYLISELKAEYDRISNSTVSCYQSYREGKYTKEEYVQLRKTNQELLADLENQISDLQEKVANQEPDAEEKIEQLTQYSMLEQYDGDVLSNIIDKVLIYNDKDIEVVFKGENFIRNAV

SEQ ID NO: 342 - protein, 525 aa, unidentified
  source 1..525: note = Bacteriophage uvig_123245 from the Index of /pub/databases/metagenomics/genome_sets/gut_phage_database (ebi.ac.uk)
MTNHRKTAVYIRLSAEDDNVDGRAKKESDSVTSQRILLKSFVIDQLGVDEADILEYVDDGVSGTHFKRQGFQQLQDDMKSGEIGCVVVKDFSRFGRDYLEVGFYIEYIFPLLQIRFISINDSYDSAASSGMTGGMNVALQNLVYNMYSLDLSKKISSAMQTRTKNGTRLPVNARYGYKKGKDGRLEVDPEAAKVVKMIFQMAAEGTSFADITRELNRQAIATCDEQKLSRGDQVQFQRFDTIKKKHWSPTTVSAIVRDEIYIGTRIWGKTRCSMHTGHKAVLNDETEWVRLENHHTAIIDRELFEKANEMHPKKKRSVAESRTNFTLERRKKQPALLICANCGHSLLKETEHLLKCSDARTNGDPVCRSLVIRREPMEENILGLVRQYAASMLKKGKKVSSKRQCEYKEINTTELQKQSRQLTSEKMKLYDDYKDGRIDRDSYKQRAEKISVQLDEIKRKIEDAKNSKKLLEQNELSDKIKLKDFLGIQKFDTEKLREVIKVIRVHSQDEIEIEWNFDDIFSEQR

SEQ ID NO: 343 - protein, 449 aa, unidentified
  source 1..449: note = Bacteriophage uvig_58220 from the Index of /pub/databases/metagenomics/genome_sets/gut_phage_database (ebi.ac.uk)
MNTAFLLFALHLPERRMFNEWYARDISKKRRISNKIKGNAGEPMGPPPYGYIKDPDNPKHWIVDEEAALVVRRIYNLILEGYGTEQIASMFESEGILTPRAYWLKKGIRKPGKETQQPSTKWNPSTIVNILSLQEYCGDVLNFKTYSKSYKNKKRIPNDRENWAIFENVHEPVVDRAVWEQVQEKRGKIRRRKPKDGERNMFCGLLVCADCGHNLNYHFNQGNHDIKYFNCSNYNSGRGSCTSTHYIRVDFLEQVVLGEIRRLTKYAVRYEDEFQQAIMGSTQKAVELERKLKQKELAAAQARDGELDGLFERIYEDNISGKLSDERFTKMSQRYEEEQAELSEKIKALRKELDKLSGDAVSTDMFLTTVRKYTRAKKLTPRMLNELVNHIEVHQAEKINGEWVQKLTIYYNCVGALFIPDTPSMPVPDVTVNTRRGVYVSYEPAQNGQ

SEQ ID NO: 344 - protein, 532 aa, unidentified
  source 1..532: note = Bacteriophage uvig_448547 from the Index of /pub/databases/metagenomics/genome_sets/gut_phage_database (ebi.ac.uk)
MTENNNRVCCLYRVSTDKQVDFNSNHEADLPMQRKACHKFAEAKGRVIVHEEREEGVSGHKVRAATRDKLQIIKDYARKGKFDILLVFMFDRIGRIADETPFVVEWFVRNGIRVWSTQEGEQRFDNHTDKLLNYIRFWQADGESEKTSVRTRTSLRQLVEEGHFKGGNAPYGYDLVRSGRINKRKHELYELHINEQEAAVVRIVFDKYVYEGYGPQHIATYLNNSGYRARSGKCWHPSSIRGMVQNLTYTGVLRCGDARSELMPDLQIVPQEQFENAQRIRNERSVRSTAEAENRLPLNIHGKSLLAGNAYCGHCGAKLELTSSRKWRKMADGSLDDTLRIRYTCYGKLRKQTNCTGQTGYTVHILDEIIDKAVRQIFSKMRGIPKEQIVTKRYEKENTERKNHLQDLQTQRDKAEKDLLSLKAEILACIKGESVLPRETLAEMITEQEEKLKELEDLCESASEELERTAELMDKVSRLYDELISYADLYDSASFEAKKMIVNQLIRRVDVYRGYQINISFNFDLTPYIEGE

SEQ ID NO: 345 - protein, 528 aa, unidentified
  source 1..528: note = Bacteriophage uvig_400458 from the Index of /pub/databases/metagenomics/genome_sets/gut_phage_database (ebi.ac.uk)
MPDKVLAFYIRLSSEDRDLKTNALKNESNSVFNQRRLLQDYYDTHESLHGYEVIVFCDDGVTGTHFDRPKFDELIEMARNQEIHCIMVKDLSRFGRNFLEMGNYLELILPLYGVRFISINDAFDSDDYLGVTGGLELALRNLINNMYSRDLSTKVRSAYRTRNLRGEYWGGSGFYGYQVHPHNKKRLIVDEQVRDIIVMIFESCVAGMTTSEIAQMLNDMGLPSPLEHKRRNGGFYNGVVKEETGIWLKGAVRKILTDERYTGKMITNTRETEEVGKPKMRSLPRDQWIIVPGTHEAIISEEMFRAAQNALQERIRNVNKNTAGNRANNLFVCGCCGRKLRKNPAKEPHLVCPKNDSIKGAECAGIFVNQAQIEQAVLQMLREQSRSFLEQHCLMQACIDKKLSSIQTELDANTNMTRRLQSRKAELYEQYRAGRISREKFADIQKTDSEKLARLSSRAEEIERLLVEQYESRGNLAAGKRTADQIILLKDYDPEIIRNFVERVRVYPSGEIEIDMRTSSGFAFVTAS

SEQ ID NO: 346 - protein, 522 aa, unidentified
  source 1..522: note = Bacteriophage uvig_172639 from the Index of /pub/databases/metagenomics/genome_sets/gut_phage_database (ebi.ac.uk)
MYQLPSSIRPENTLIYLRKSRTDDPMLSVEDVLSKHEQLLDEWSMRTFGALVPAANRFREVVSGETISARPQVQKVLRSIESPAYSAILTVEPQRLSRGDLEDAGYLIKVLRYTNTLVITPVFTYDLADERDRDLFQRELQRGNEFLEYQKRIMNRGRLLAVENGCFIGQIAPYGYKKATVRIGKRLCHTLTPDPDEAPVVRLIFDLYLQGMGGGKIANYLESHGIPAPSGQDHWCTSYFRSMLTNEHYIGKVRWNRRKTQTTIRDGQLVQSRPWATEYLLCDGLHPSIVDPDVFQAAQQRRGKNNRARKDVTFANPFAGLIYCQCGYSMVRQNYKGAEPRLVCSDQRRCHTASCRMMDIIPPIARALDRAISDFEIRIAAGEEGTVDAHQAAVSVLEKRCEDLRATELRQWEMLSSGKMPQEIFDRLNEKVLSDRAQAEQALADAQENAPIVMDLPARLSTFRAALDMLLTPDAPAQELNDLLRSCIRRATYSRQKAPTRRGCARGHASPTPIHLDIDMLV

SEQ ID NO: 347 - protein, 548 aa, unidentified
  source 1..548: note = Bacteriophage uvig_189626 from the Index of /pub/databases/metagenomics/genome_sets/gut_phage_database (ebi.ac.uk)
MYKEYPKFYYYESLEYGRKSRMDDPLLSVEETLQRHSEIIDEYARKYLGGSIPEENRYMEVGSGESLKDRPEITRLLKAIENPAIKAIIVVDVQRLSRGDLEDAGKLIRLLRYTNTCVITPHKIYDLRDEYDRDAFERELKRGNEYLEYFKKIQARGRLASVKAGNYVGSVAPYGYDRVERYDEVLKKNYFTLVERKDQADVVRMIFNWYCNDDIGVTTICRRLEELGVKTKTGCSTWKPSIIFGILENVHYIGCVRWNWRKTIKVIENQEIKKLRPKAKVDEYLIFEGKHDGIISEELFYKARAIKGKRHRTKQNLSLKNPFSGIMFCTKCGSKIGYNTYNRNGVEFAPPKLVCNNQVHCKTGSVDYNEVLDYMCKVLRDCIEDFKVRIENDQDDSLKLHKDLIERLTKQLKDAEQKEQDQWEAQYDPDPNKRLPQHIFEKLNKKVLAEKEEINKALDKAKGSAPKHIDYKDELIKTTEALKALEDADLDAKITNQYLKSIIDRIEYDRPQIVRINKKNAEIFETDVRKGLQYHVAPYTIRVKLKCE

SEQ ID NO: 348 - protein, 518 aa, unidentified
  source 1..518: note = Bacteriophage uvig_170915 from the Index of /pub/databases/metagenomics/genome_sets/gut_phage_database (ebi.ac.uk)
MDSIMNSADRRTWACCAYLRKSREDEERERMGKGETLARHRRIIESLAMENGHEIREWYPEVVSGETIAARHEIKRLLVDLADGKWDAVYVVEASRLGRGGGSDQEKIINAFRYTDTALITEMKVYDPHNRGDMRQLKSELRSSEDELDAISTRLKRGKYQAAKEGVWQATGKEPFGWRSIRVNGMWTLEPSERHGVLMHIYDLLEAGENYCSIARILNEEGEPTPRGGEHWRHQTVKAIAENPVNCGMNRYGARVMVREFDKETFEGRKMKKNNANPQLTRGLWFGNGTLSIERFERLVGKSVASARLHKDRELKNPLAGLLRCAECGYAMQMHMMSSGKSKAYFFQHAKKDAGRLRSCKGCRGARADQVMAMVAEALRKAADDVEIELAKPTNDSFEAQRKALEASLKKEKLARKRASDAYEAGVYDLAESKQRRQKIDNRIEALETKLAKAKPKRYDRQTVVTLRECIDMLEDDEVPVKAKNDFLKQVVERIEYSNDTAPYVLPNKPHLEIFLKG

SEQ ID NO: 349 - protein, 392 aa, unidentified
  source 1..392: note = Bacteriophage uvig_195109 from the Index of /pub/databases/metagenomics/genome_sets/gut_phage_database (ebi.ac.uk)
MAQAESESLSGNVKWGHRKNFKDGKVYYHCKNFLGYRWGADGQPEIDPEQAAVVRRIFSRFLLGHSVRQITTDLMADGIKTATGKTVWHDSVIQKMLCNEKYIGDALLQKTYIADLFTREKRINNGELPKYYVHDCHPAIIDRETFQKVQEELARRSSLKKTSSKAKTQLGKYCGKYVLSELLVCGECGSPYRRVIWTQKGVKRVVWRCQNRLEHGRKICKHSPTLDEGDIHDAVISAMNELFQTQAARNAVKASISAVLAGEEQTLSLPAVELQIRNLQERQLELFQLIVSAGADCTDYDEELRQVNMAKTKLMAKKAELEKEQRGAAAFEERLAELDAELEQSCGALTDFDELTVRQLVSNIKVLDKDSLLICFKDGTEITQAMQRRQTA

SEQ ID NO: 350 - protein, 514 aa, unidentified
  source 1..514: note = Bacteriophage uvig_597743 from the Index of /pub/databases/metagenomics/genome_sets/gut_phage_database (ebi.ac.uk)
MRNEYNPIIIKYVAEYLRKSRGETTEDLIKHKTILEELCKSRGWVYVVYEEVETGESLFARPVMQQLLRDVEDNIYDAVVCVDLDRLGRGDLVDWGQIKRVFQKTNTYMVTPSSLYNLNDDNEEFAVDLQTLFARREYKKITHRLSMGKKVGAKLGAWTNGTPPMPYEYQEWIDPETNTRYYNEKGLVVNLQKLSIYRFMVDSFIKDKKSTNEIAWELNRRSIPSPRGGRWCNMTVRRLLVDETHLGKIISNKTKGDGHKNKSPNKQPFQKIPKEQWTVVENRHEAIKTQDEHEKILIGIQRNLKSPYRRSDHYYPLKGLIKCGLCGYGLPLEYKRGKDLIVKKCWHKDYLGNKCPNSSGKAQYIIDAIDEQLKEYEEQIKKEIESCEDQSTNLIQLQIKTIMDKLNKKDIALKRARIAYDEGVDTLDEYRFAKERILKEVDELENQLSVENLKLQKAQSITNHEKLHYIEEFRRSRWEDELDDKELNDLYKTIISSIIWTKQGDNIDIKVNFL

SEQ ID NO: 351 - protein, 534 aa, unidentified
  source 1..534: note = Bacteriophage uvig_595313 from the Index of /pub/databases/metagenomics/genome_sets/gut_phage_database (ebi.ac.uk)
MENLFTTNNLFAQPSGPTAKEAVIFARVSSREQSRGQSTTAQVMNCQKYCDLNSIKVIKIFNITESSTRGERRRFKEMLEFVKSRKTKTLIIADCVDRIQRSFKESVELKELAEKSVLEIHFLRENLTITDHSTSEEQLRWNMSVMAAQSYVDCLRDNVNRSMQINWSNGIWQSFAPLGYLNVEDEKGNNTIIQDTVRAPLVRKMFEEFATGQYSVKTIAKWAHDNGLTMRKTPNKPERDIPNSTIHTMLQNPFYYGYMIVKGIRIQHIYTPIIDEILFERVQDILHGRCRLPAKSVYGEKQFLFRGLVKCAHCGHTMTPEKHRKPNGKEYSYLRCSHLHNGCSQKPIREDVLLSQLEHELTVECKLSEKALNCIRNFVQNSLEKENQCKIGAEKYILKRITELKARKQRLTTAWADGDIDKESYEEAKKSTEKEIQEQENIYNMYLETGTNILETVDNVEKIFKDPLFFLKSSQIEVRSAFLRLIFTNCYVDGQKARFSLKKSLSLFVKNRDLSIWQPHSDSNRDSRLERAVS

SEQ ID NO: 352 - protein, 468 aa, unidentified
  source 1..468: note = Bacteriophage uvig_244256 from the Index of /pub/databases/metagenomics/genome_sets/gut_phage_database (ebi.ac.uk)
MASNFFAPQPELFGRRVVKYIRCSSEGQVLHGETLETQNMLLDDFIRVNRLVLVDTFVDEALTARKRYTKRKEFVRLLDGVQAHNFDLILFTKLDRWFRNIGDYHQIQAILEENGVQWKAILESYDTTTSNGRLHINIRMSVAQDECDRCSERIKDVFAYKLRNKTFVAGKVPRGLMLDEEKHIVHDPEWKQWALDLFDSIEATGSVYSARALMAEKYGFSLTEQGFVRASKNRLYKGQYRDDPEFCEPLIDPERFDRIQDLIARNKRFGKTKYSYSFSGLLICSSCRHKLVGATYSTKNLDGTVRQYTCYRCNVHTSQPSLNLCDRSHAIREERVEEYLLEHIRPALSEYLSSYNVSAQESKRNTHQADAAKIRRKIEKLYDLFMDDLIEKEEYREKYEDLQKQLKECQIAPVPAPAPNLGQLQDLLSQDWEAVYATFSKPEKNAFWKSFVHSVVVYDDEHMDISFL

SEQ ID NO: 353 - protein, 453 aa, unidentified
  source 1..453: note = Bacteriophage uvig_555240 from the Index of /pub/databases/metagenomics/genome_sets/gut_phage_database (ebi.ac.uk)
MRKITKLETKNIELPKLKRVAAYARVSVERGRTLHSYSAQVSYYNELIQKNPEWEFAGVYSDLGISGTGIEKRNDFKRLLQDCEEGKIDIILTKSISRFARNTVDLLNVVRHLKELGIEVRFEKEGISSLTGDGELMLSILASFAQEEVISTSNNIKWAIKKKFESGKPQCRYKIYGYRWDGDNLVIEPEEAKIVKLIFQMYLNKVSAERMEIELKEMGVIATNGGYFNIGTIRDMLLNITYTGNLLLQKSYTPNPLVRRKVKNNGELPKYYVENNHEAIIPMEMFIQVQEERKRRKAEGQRANFGKNITCFSCRVKCPICGKNYMRNSRSKNSDGIKAHIWACGTRLTGGSKACPGKTINEIALKRVSAKVLGLDEFDSNAFDEQIKKVIVIGDDLLEFHFNDGKIISEKWEYNARKEYWTEEKRRERGEKLKKSWRMKNDKKSNNDTSITK

SEQ ID NO: 354 - protein, 439 aa, unidentified
  source 1..439: note = Bacteriophage uvig_336926 from the Index of /pub/databases/metagenomics/genome_sets/gut_phage_database (ebi.ac.uk)
MVADALAGKIDLIVTKSISRFARNTVDSLVTVRKLKEHGTEVYFEKENIFTFDSKGELLITIMSSLAQEESRSISENVTWGQRKRFADGKVSLPYKQFLGYRRGEDDLPEIVPEEAEIVRKIYGLFIQGKTTHGIAKQLTEENIPTSAGKEKWQASTVESILTNEKYKGDALLQKGFTVDFLTKKTKKNEGEVPQYYVENSHPAIIRPHEWQLVQREFSRRKTLRRKYSGNSIFSTRLVCGDCGNYYGPKTWHPKKPYQKIVWQCTHKYKGENSCETVTLEETEIQQKFIQAINGLFSIKGPVLENCRIMQEALTDCTGIETELATLTQELELLGQMIKDTIKTNALEAQNQEEYTARYNALAERYETTHRQIVALQEKRQARENEAEAIGGFMFALREMGTEAQEFDPKLWLSTIDRGTVNRDGSITLRFVSGAEITV

SEQ ID NO: 355 - protein, 543 aa, unidentified
  source 1..543: note = Bacteriophage uvig_239031 from the Index of /pub/databases/metagenomics/genome_sets/gut_phage_database (ebi.ac.uk)
MMIAKYIRLSSADEDARYGDKPESNSVTHQRMLLNRYLETHPEFEEYQVLEFQDDGRSGTNFERPGIKAMLEMVRRREIDCVIVKDFSRFGRNYVEVGNYLEQVFPFLGVRFISVNDGYDSKDYPYGVAGDINNGLRNLINELYSRDLSQKVKDSYRQYTKRGQCVSAYPIYGYVKSPADRRLLIPDPEAADIVRRIFERCNAGEGPTQIASGLNRDGVPTPSQRKRDLGSKRQLWNSARLQNEWSDKAITRILRDERYTGKLIGIKTTRTELGNQKSSRKQSEEDWIVVPGTFEAIVSQETFDEAQRQLETLRRHSSKRETNTPVVHLFSRKLKCGHCGLALGRHVVDLGVYYHCERRAWNSGAACLGARLFEDDLIRTVLASIRFQARLAGKAEKRLDKLENAERRERESLWEQRRRIQMKLDHLTTQKAEAFLLFNQGDLTQKTYDAKCAKLDKTILEQRTKLLDMSGTQTGTQDGAVLHCREDIARLKELSHLRTLNRQTVEKLIQSIRVYDGKRIEIVWNFSDSYMKLLTGEEQNHEG

SEQ ID NO: 356 - protein, 569 aa, unidentified
  source 1..569: note = Bacteriophage uvig_146316 from the Index of /pub/databases/metagenomics/genome_sets/gut_phage_database (ebi.ac.uk)
MKQSSKKHELGTAALYCRLSRDDNMDSESNSIQNQRKILQKAAKDKGYTDTVFFVDDGITGTTMKRPGFQKMLTAIEAGYISAVFVKDLSRLGRNYIEVGKLTEEFFPLHDVRLVAVSDGVDSDEGEDDFTPFKNIMNEYYAKDISKKRRIVNKMKGNAGVPLSPPPYGYIKNPDDPRFWVVEPEAAEVVRRIYRMALEGYGLAETAAQLAADGVVNPTYYWRSRGTSRSGSKSTVEPTKWGHTTVKKILTLQEYCGDVINFKSYSKSYKMKKRIENPEENRAIFLNVHEAIIDRQTWEKVQALQKGTRRKKPTVTQEPSVFSGLLKCPECGGNLNFHFNQNNHDIKFFSCQNHNSGYRKCSKTHYIRLDFLEQVVLYEVKRLACFASEYENDFIKAMIGRSAKVAENTALRKQRELDALTARDRELDMLFERLYEDNVAGKIDDARFAKMSKRYEQEQGENAKKIKALRLELKKDESKRMDIDDFLETVRRYTDAATITKRMVAELIDHIEVYHAEKQDGITNQRVVIHYNCIGAFDVPDRRKIPEADIIMETRKGVALSYAPEQVAV

SEQ ID NO: 357 - protein, 358 aa, unidentified
  source 1..358: note = Bacteriophage uvig_390637 from the Index of /pub/databases/metagenomics/genome_sets/gut_phage_database (ebi.ac.uk)
MIADALAGKVDLIITKSVSRFARNTVDSLSTIRKLKEHNIECYFEKENIWTFDSKGELLLTIMSSLAQEESRSISENATWGHRKRFADGKVSFAYSRFLGYEKGPDGTIVVVPEQAKTVRLIYKLFLDGMTIHTIAGELTKRGIKTPGGKDKWNQSTVRSILTNEKYKGDALLQKSYTVDFLTKKTKTNEGEVPQYYVENNHEAIIDSQIFELVQAEIAKRNKGKEHYSGVSIFSTKVQCAECGGWYGSKVWHSNDKYRRIIYQCNNKFRNKTGCSTPHLTEYEIKEYFIKALNRLITEKDEIIANTEMIQKMLCDNSELEAKRDVLQEEIAVTVELTQNAVAENARVAQDQDDYNKR

SEQ ID NO: 358 - protein, 561 aa, unidentified
  source 1..561: note = Bacteriophage uvig_383825 from the Index of /pub/databases/metagenomics/genome_sets/gut_phage_database (ebi.ac.uk)
MFHQSNTAAALQFPYNAMSVEAITALYCRLSRDDELQGDSNSIINQKKILQKYALEHGYTNFRFYIDDGISGTTFNRPGFQEMIADVEAGIVKRVIIKDMSRFGRDYLQVGMYTEIMFPEHDVHFIAVNDGVDSTQGDNEFTPFRNIINEWYAKDTSKKIRAVMKVKGNAGEHLTTSAPYGYMKDPEDSKHWIPDREAADVVYEIGLYVMDGFGPSQIARKLRERKILTPAAYYESKGIPCNVKKQGDPYGWDNTTIAGIMDRWREYLGHTVNFKTTKKSYKSKKKIKNPESEWVIFENTHEPIWTEAIAEAVKQARQSRRRPTKMGEMGMFSGMMYCADCGSILYQCRATGFRKDQEYYICSGYRKGKQVCNTPHSIRTVILEELILQNLREIVSFARSHENRFAQMVMDMDVKERNKGLAQKRRLLSESKKRITELDMIFKRLYEDNISGKLTDERFHKLSTDYEAEQAGLQAQAAMLREEIEEAESKSANVDRFLSVVRQYTDIPELTPRILHEFVEKIVIHAATDPHSKINRRQEVDIYYKGIGILEMSKVFDSRQK

SEQ ID NO: 359 - protein, 472 aa, unidentified
  source 1..472: note = Bacteriophage ivig_4414 from the Index of /pub/databases/metagenomics/genome_sets/gut_phage_database (ebi.ac.uk)
MEKVAIYIRVSKKEQTRDKGSDSSLNLQLKKCLDYCKEKGYEVLKVYQDIESGRIDDRKEFNELFEAISKKIYTKIVFWEISRIARKISTGMKFFEELELYKITFDSISQPYLKDFMTLSIFLAWGTEDLKQMSLRIKSNLEEKTKAGYFVHGRPATGYIRGKNKMIIPDPEKAPYILSIFETYAKNFNLTETARIFNKTRMDIVDIIDNKIYIGYVPFRKYIQELNQKKRIQVSKKDIKWYKGLHEPIVPLELFEFCQSIREKNIKSRAAYGDYKPHLLFSSMIYCECGDKMYQQKRNRTYKDNTNYVYYSYSCKNRKHKKSFSARIMDKTIKEMILNSKELEDLNNYNSNDIEKSEKKLLKLENNLKLLENERERIINLFQKSYISEDELENKFKDLNTRIQIAKEKKIEFENTLNIPRNNDIKVLEKLKFIIENYDEEDVIETRKILKMIIKEIRVISFYPLKISILFY

SEQ ID NO: 360 - protein, 633 aa, unidentified
  source 1..633: note = Bacteriophage uvig_80069 from the Index of /pub/databases/metagenomics/genome_sets/gut_phage_database (ebi.ac.uk)
MIDLDKRRLKEQQKARQRQRMQGRLDPDNYEYIPAKKPIDFYDNDVHQRVGIYARVSTDDVRQTTSYELQKKYYEDFVVRHPNWTLVRIYADEGISGTSLRKRDEFNQMISDCRAGKLDIIITKSVSRFARNVMICIGMVRELAELKPPVGVFFESECIFSLNDESQMALSFQATMAEEESHIRSRSMETSLRMRLDNGIPLTPKLLGYTHDMDGNLIVNEQEAPTVKLAFFMYLYGYSTQQIADVFIALGRRSYLGNIKWTSNSIVQILRNERHCGDVLTRKTFTPNFHDHLSKKNRGERPQSRYYNHHEPIVSRDDFIAVQRLLDNAKYRGKSVLPELRVIDSGMLKGYVSVNPRWAGFKSDDYIMASQSAYAEDEAEETYAKSEDKVIEIEVEPGDFDLRGFEVARSELFNPLNRATVVLSDQKIKFNTTCVRKFGNKNRVEILINPLERKLAVRPTDKANRNSVIFSKKEDGTYLPREIPASAFIGTLFELFGWKLDCKYRIIGSLYETDTEMAYVFDAVNTEAFFKSYVLPVQQLSPEGTALIEPLTTSGKRIRAIPKEWVNEFGELFYLQERSLAALESQSEEDWKLYMEGRMFESGKQLKVTSFDELQRYIKQELSVLTRPEVNHE

SEQ ID NO: 361 - protein, 507 aa, unidentified
  source 1..507: note = Bacteriophage uvig_395426 from the Index of /pub/databases/metagenomics/genome_sets/gut_phage_database (ebi.ac.uk)
MKRVISYIRFSSERQAKGDSLRRQSKMVTDWLKAHPEYYLDQDLSFRDLGVSGFTGKHLKGGLGDFLTAIEKGLVKAGDTLLIESLDRLSRQNVDRASELLRNILRSGVDVVTLSDGEHYTRESLKDPLALIKSILIMQRSHEESLRKSERIQAAWNRKKELISEGIKISKRCPAWLRLNDDRKTFSVIPEKVETVKRCFQLRLEGKSIWEIVRTLNAEGHRSMNQYKPGKFGQTSVQDLLKNRSVIGYFTPKGCEEISGYYPAIIDETTFYKVQQLSHSRYGKRSVSDKPLSVNLFKGVIRCSECGHALIITGFSDTRSGIYRCPLRNENRCSAKGLSRKQTDGTLLTLLSRLDRFDSDTTNIIDMLRLHREHISSNIEKLVQLSLEIEDLNAITSKLKQLKGELSQVDADIEKETQRLKSIDVGCLSDCDLTTKAGRIEAQLIIKSAVKEVVLNTAKRRCKVTFHNGKTITLSITENPSEDVTEAIQSLSEVTERGLIDVDEVII

SEQ ID NO: 362 - protein, 514 aa, unidentified
  source 1..514: note = Bacteriophage uvig_434714 from the Index of /pub/databases/metagenomics/genome_sets/gut_phage_database (ebi.ac.uk)
MYDSMPAEWLCCAYLRKSREDEEREKQGRYKTLERHKAILESLSSDNGHKIAQWYPEIVSGETIEGRPEVKKLLADLASGKWDAVYVVEASRLGRGGGSDQEKIVNAFRYTNTWLVTEEKVYDPSSKADMRQLKNDLRSSEDELDSITTRLTRGKYRSAQEGRWQATGRTPYGWRAVRIAGLWQLRPDENHCHMLRIYDLLESGLTPWDVANIYNAEGIPTPRGGDHWTAAIVRAIALNPANCGYVVFGKHKTMRIFDPVTFEAKKVRVKNDKPVMVKGLHYGTGGISEERFERITGHLVGSAHLRKGLELKNPLARLLKCGKCGYAMNHHRMSSGKSYGYFYQHPAKRNMTRACDGCRGARDDLVMDTLVASLRSLCNDIELRIKADNRASEHEAHIEALRKELEKVRAARSRAMEAYEAGAYTIAELKARKDEAEKRMESIERAIKDAKPPKYTPELVVSINKCIDMLLDDTVSVQVKNDFLKSVIGRIDYYNDTPPFVHDNKVHLEIFLRQ

SEQ ID NO: 363 - protein, 506 aa, unidentified
  source 1..506: note = Bacteriophage uvig_425922 from the Index of /pub/databases/metagenomics/genome_sets/gut_phage_database (ebi.ac.uk)
MRSVITYLRYSSAIQGAEGADSTRRQNDLFKQWLKKNSDAQVVASFSDEGLSGYKGKHLTGQFGDMLARIESGEFSKGTILLVESIDRIGRLEHLETEALMNRIIAHGIEIHTLQDGLIYTRDALSDDLGISIIQRVKSYLAHQESKQKSFRVSQKWGQRAKLALAGKQRLTKMVPGWIDPETFEVNEHAETVRLIFKLLLDGESLHNIARHLQANNISSFSRRKDANGFSVHSVRTILRSETTIGTLPASQRNDRPAIPNYYEAAIDAATFNKAQEILDKNRKGRTPASDNPLTINIFKGLFRCQCGASVHPTGTKNKYAGVYRCNNNPDGRCDVPPLKRKPFDRWMIDNFLGMIDVGNDGESERKIAALQHEVEIVTARIKKATALLLEMDDITELKTQVKGLNQKRTELQTTIDNMRRKASLTDKELPQLKDIDLTTKAGRVECQLILSKHLKGLTLGKDSVTVTLQNDTKITIPTNPLPLNDGSPIFEIADKELLDIDAYQL

SEQ ID NO: 364 - protein, 581 aa, unidentified
  source 1..581: note = Bacteriophage uvig_114951 from the Index of /pub/databases/metagenomics/genome_sets/gut_phage_database (ebi.ac.uk)
MDYNFTQFTVYDFLLYLRKSRADSEYETIEETLAKHETELQNFAIRLLGVKIPECNIFREVVSGETVQDRPDIQKVLFAIESGSVRGVFVIDPQRLSRGDWEDGGKILSSFKYSDTLILTPAKIYDLNNKFDYDFFKMELSRGNDYLEYTKEILRRGRVASVKNGNFIGSVAPYGFNKIIIDKTPTLTINRKEAEAVNIAAKKCVYDDMGWTAIGKDLELMGYKPRSAEHWNPYTLRDICINPVNIGKVRWNTRKVVKMYDDGKLVKKRPVNRGDDAMLVDGNFDGIMEPELYHKLIKKAGVMTKEKSNTSLINPFAGLLYCKCGHAMIYRSYHKNGVERSAARLICTHRSHCNTKSVLFDVAYESIIDCLEDTVKDFAFKLQHDNSMDTYALQTKMLAEQREELKRLDAKQEELYDFLEDGIYTKDVFLQRSDRLKSKREEVEKQIKYLQDNTVEPVDYTEKIATFKDVINALRDDNISAKHKNSLLKTIIKRIDYDRTEVTEQDGKVYICTYRKRGDLSAAPSETTALLSANATRSDAWHYFQSHIGKEYKILKIVRDYQHRTVYDASKPVFKVHLNDF

SEQ ID NO: 365 - protein, 531 aa, unidentified
  source 1..531: note = Bacteriophage uvig_442872 from the Index of /pub/databases/metagenomics/genome_sets/gut_phage_database (ebi.ac.uk)
MLYEINREDFENVIIYLRKSRADDPCMTVEEVLASHERQLQEYSMTFFGAKIPEERIFREVVSGETIADRPVMKEVMTLLETGIIKGVLVIEPQRLSRGDLEDCGKIINTFRYTNTLVITPSKTYNISDEYDRKFFEMELTRGNDYLEYTKRILSRGKLASVKQGNFIGSVAPYGYKKVTKGTGKDTYHTLEIIPEQAEAVRLMFKLYLEGNGFTNISICLDRLGYKPLKSQHWSPAAISDILENPVYTGKIRWNYFKTVKKMQNGQIIKSRPINRDTSDVIIVPGKHEAIIDQKIFDAALERRGSTPKVKKGNELKNPFAGLLFCGTAGCGRSMSFKQYKDYRSKTDKRSEYMLCTNQRICHTKSVQYSAFVAKVKESLQASIKDFEVKLKAEQENADDLRQNIIKNLEAEVSRLKIKDARQKDAYEDGLYSKEEYAKRNAKLQEQLYNTMNTLQQEKSATAPSVDYEEKIMRFKDCLAIIDDTTVSAGKKNELLKSCIERINYYNNCESKPGLGRYVDNPFHLEVILRL

SEQ ID NO: 366 - protein, 491 aa, unidentified
  source 1..491: note = Bacteriophage uvig_510225 from the Index of /pub/databases/metagenomics/genome_sets/gut_phage_database (ebi.ac.uk)
MYLRKSRQDNPEETVEEVLFRHEIQLQEYAMKNFHYRIAEEDIYREVVSGETIEDRPEMKKVLKLIESSTVKGVLVIEPQRLSRGDMLDCGTIVHVFRYTNTLVVTPPKTYDLTEKYDRKFFEMELSRGSDYLEYTKEILNRGRVLSRKQGNYIGSVAPYGYTKIKNGKEHSLVINEEEAQYVRMAYDLFINGHGSHYIAEQLEAMGAKPRKAKHFTPANIRKMLRNPVYIGQIVLNRSQSVKVYEDGCLKTKRVYNPDYETVPGKHEPIISEEIFELANSEACRKARVPSSKEIRFIFAGLAKCSVCGGSLGLKIHTGREHPYRVGCLKKKYCTNTSILYEDFIDLVVNALKAQIQDFEVQIETNVYKEAFETQSLLESLTKRLEKTDEKMGQLCQYLEEGMYTPDMFVKRRDTLIQEKDELQKAVKEARKKMSGMKDIKEKTSSLHEALNLLRDDSISPRLKNTFLKKIIKAIYFSRLNDKIVLKVVLR

SEQ ID NO: 367 - protein, 508 aa, unidentified
  source 1..508: note = Bacteriophage uvig_281842 from the Index of /pub/databases/metagenomics/genome_sets/gut_phage_database (ebi.ac.uk)
MNEYLMYLRKSRQDNPDETVEEVLAKHERILQNFATNQLGHTIPEECIYRDVVSGEMISDRPQVKALFRAIESSQIKGVLVVEPQRLSRGDLVECGTIVRYFKYSNTLIYTPAKIFNLKDDFDCRIFQDELMRGREYFEYSVRIMQRGTKQSILEGNYISPEPPYGYQKVKEGKRQYLVVDPIESEYVKMIYNLYLSGYGIKRITNRLNELNIRPRRISYWTQSSILRILGNQVYTGCIVWNRRKRERILINGEIKKKDVYQEKPIIVEDTHEAIIDKETFQKVQELKGKAPRISQGTTFRNTFRGLLRCAVCNHAMKCQVKADGSIRYFCPQSSRCGCYGTTEKTITEEVIKGLKQHLNDFEVDVQTSSLISVKQHETILSELESTLASLEERQQKLYEYLEHGSYTEKVFIERNRILNEERITLNAQIEAEKQKLNEPTDTKQIKATLHEAISLLEDETVSAYQKNQFLKSFISVIHYKKMVRLQNNKKGTVLSDNDLVSLEIVLK

SEQ ID NO: 368 - protein, 511 aa, unidentified
  source 1..511: note = Bacteriophage ivig_126 from the Index of /pub/databases/metagenomics/genome_sets/gut_phage_database (ebi.ac.uk)
MDKYLMYLRKSRSDDPNETVEQVLAKHERILQNYASAMLDQKIPEECIYREVVSGETIEDRPEIKRLFELMQSNTIKGVLVVDCQRLSRGDLIDCGTILQNFKYTNTLIVTPKKTFDLSNEYDYKSVKSELMAGSDYLDYMKTIMQRGTLQSVLEGNYLPTRTPFGYKKVKEGKRRQYLVPDPETAPYVKFIYEKILEGYSAHAIGLMLDDLGVKPFMAKYWHERTIKRILSNEVYIGCTVWNRHKVEKRIVDGKLKKVRVRQEKPLIVHDTHEPIISKEMFDSVKKLMVSKSVKVNMSKELKSPYAGLLRCKLCGRMMRYQGEKGRNVPRYDCSGIRHCRNMSTNATVVDNAIIEALKSNLEDFKIKLNKTDEEQIQTKKNMISDLKKSLDKIDQKKERIYEFLEDGTYTKEKFIERINKLEIEKKGIETSINKIGSTMPNRNEWKEKYATLNEAIDMLQNPNISAKSKNTFLKKFIKVIYYEKHERDSSAPRHGAVTHSKNVNIEIILK

SEQ ID NO: 369 - protein, 523 aa, unidentified
  source 1..523: note = Bacteriophage uvig_581976 from the Index of /pub/databases/metagenomics/genome_sets/gut_phage_database (ebi.ac.uk)
MSVRNIIIYLRKSRSDDPGMSVEDVLAKHERQLQEYAISEYGEQIPEDHIFREVVSGETIADRPVMKQVMQLLEAGNITAVLVIEPQRLSRGDLEDCGRIINTFRYTHTLVATPPKTYDLTNEYDRKFFEMELMRGNDYLEYTKKILNRGRVASVRQGNFIGSVAPYGYKRVRLGSGKDISYTLEIIPEEAEFLKLMYHLYLDEGYGFTRIAKHLDSIGAKPRKAEHWSPAAIKDMLENPVYIGKIRWNWRKTEKVMTNGQIIKTRPKTKDEAQWIYVDGKHKAIIDESLFRAVIDRRGKNPCVRKSKELINPFAGLLFCGTCGKAMSYKHFKQYRGKSENICTSMVCNNQSHCKTKSVLYDAFLDRVISTLEDTITDFKIKLQNDDCDSAKLHANVVKNLELELQKLQQKDFRQKDAYEDGIYTKEEYAARNAKLQEQIATTMDSLSKAKESVLPSVDYNEKIMRFTDCLNALKSPDVSATEKNMLLKSCINKIVYYNSMPSKAGAGRWIDNVFSLDIFLNL

SEQ ID NO: 370 - protein, 520 aa, unidentified
  source 1..520: note = Bacteriophage uvig_49690 from the Index of /pub/databases/metagenomics/genome_sets/gut_phage_database (ebi.ac.uk)
MYSTGSTLLSDVWIIYLRKSRQDDPKETVEEVLAKHENMLQEYAERELGARISEENIYREIVSGESIDDRVEIKKVLARIEDPAVKGVLVVEPQRLSRGDLEDCGRLINSLRFTHTQVATPYMVYDLENKMERKFFQDELLRGRDFLEYTKEILFRGRVAAVKRGCYIGNYAPYGYKKIKIGKDFTLEIIEDQAEVVRLIFDLYTKEQLTPLRIADRLNEMGVKAPRGDKWVKDTIRVIVRNEHYIGKVVFNKHKQTPVLENGEVVIKRLAQPEDEVLIAEGKQPAIISLETWEAAQTLVARNPRVKNEHPLSNPYSGVLVCGKCGKVMYKHPYKHAEHRYECRTRPRCFKSVRASEIGDAILLALEEAELPALKLKVKNNDGNAAKIQRRLLDKLMQQMEGFREQEDKQYELLETGRYTQDLFDRRNATLRAKMDECQAAIYKAKSVMPKNVDYSERVVAMEAAIEMLKDPEATPTEKNKALKAIVERIEYKGIESLGTDRKGKKKGENSFELKVFLRI

SEQ ID NO: 371 - protein, 511 aa, unidentified
  source 1..511: note = Bacteriophage uvig_572170 from the Index of /pub/databases/metagenomics/genome_sets/gut_phage_database (ebi.ac.uk)
MHDTMLDLTCCAYLRKSREDEEREKMGRGETLARHRRIIESLASENGHEILHWYTEVKSGETIAARTEIKNLLSDLADGKWDVVYAVEASRLGRGGGSDQEKIINAFRYTQTHLITEMKTYDPESRGDMRQLKSELRSSEDELDAISTRLVRGKYQAAKEGVWQSTGRTPYGWKAVRIKGLWQLEPDENHESMLRIYDLLESGENYSSIARILTEDGIPTPRGGDHWRHQTVKSIAENVANCGLVMYGKRHVVREFDRDTFGVVKTKRNNPEPIVSRGLHYGKGGISEERFERLTKKSVNNARLHKDKVLINPLSGLLRCGKCGYAMSMHRMSSGKSAALFYQHPRSKNMLGDCDGCRAARADQVITMLIDALEKIAEDVTIEASKPQSEVDQSRIKSIQAAIKKEETARRKAMEAFEANIYTIEELRERKSKADAAIESLKKRLKDHEPKRVSADAPVKIRRCIDLLRDEGVSVQDKNDLLKSIIERIDYYNDTPPYVLPNRIRLDVHLR

SEQ ID NO: 372 - protein, 519 aa, unidentified
  source 1..519: note = Bacteriophage ivig_2192 from the Index of /pub/databases/metagenomics/genome_sets/gut_phage_database (ebi.ac.uk)
MYELGEYLIYLRKSRSDSELEKMGVDVLERHEQILLNLAKQMKLSIGGIYREVVSGDSISARPEMQKLLSEVESGRWKGVLVMEIERLARGDTVDQGIVQRAFQYSGTLIVTPAKVYNPDNEFDEEYFEFGLFMSRREYKTIKRRMQTGRYAAVREGKWPYNTAPYGFNRKKLSKEKGWTLELNKDEAPVVRLIFSLYTGPNRVGITKIKHELNQRGIKPRKSDKWTESTIRDILRNVVYDQQVKIGERKVVMVIQDGSPAKTRPRADDYIIVPGRQPRLIAHEIFLEAQSYLGRGKPKAPSSYGVKNPLAGLMVCSECKKKMMRRPASPDGKYVPYDLLMCTTEHCPTIGSPLDLVEEMVVQALSDWVKDYKLSGKATYVSNIPEKEAILRTAKETHEQLLQQKEKLYDFLEQGIYSTETFLERSSSLQQRISESSQSIQLLEKDLEEEKERELNVEMFLPACEGLLDYYWNLSAQERNQALRQVIDSIEYKKLVKNKKGDVRNANFELTIKPKIPRK

SEQ ID NO: 373 - protein, 492 aa, unidentified
  source 1..492: note = Bacteriophage uvig_394091 from the Index of /pub/databases/metagenomics/genome_sets/gut_phage_database (ebi.ac.uk)
MDGLAIERQREDCENLARFRHWEVVETYVDQSISASDKTKKRPAYLQMVADYEAGLLDAIVCYDLDRLTRQPRELEDWIDRAESRGLLLVTANGDADLSTDGGRMYARIKAAVARAEVERKGARQSRAHVQRARQGRPPKGVRPLGYSTSGQIIPHEAEGVRAIYAAFLRGDSLQGIARALSGTQMDGEGLGVPHLPLHSRTVVLERNARREVEGKVPRPVPEDRPWSASTVLGILRNPRYAGYSVYTSKDVRRQETGESRRKALRDNLVKDENGELVLGQWNAIVETDQWWTVQNFLDDPARVTNRSGSTVRKHLGAGLYRCEVCGEPVRTRARYYSCKAGHLNRTRSAIDDFVRALVVERLKRKDLRRRKKQADPEIKDAFSERIAEQRARIARAERDYDAEVIEGEDLARIRKAARAEITRLEAERLTSGTGTVLAPILGTSDPAQAFLEAPMALQRTMIDTLMTVTLRRAQQGKKGFAPESVEIVWKQ

SEQ ID NO: 374 - protein, 549 aa, unidentified
  source 1..549: note = Bacteriophage uvig_598290 from the Index of /pub/databases/metagenomics/genome_sets/gut_phage_database (ebi.ac.uk)
MFYQPEKELKPEEILLYLRKSRTDDPTLDVEEILARHEIILDEYAERIWGKKIPEVQKMREVVSGETIDSRPELLKILKMIESPDIKGVLLVEVQRLGRPDLEDIGRLSKLFRYTNTLVITPTKTFDLGNEYDREAFERELMRGNEYLEYTKKIMNRGRLLSVQQGNFIGTKPPYGYDKSIVTDGKKKCHTLVINEAEADTVRMVFDMYVNKDMGRVNIAHYLNDMRVPTRTGALWSQDTLKNILENEHYIGKVRWNWRKTVTIVEDGEIKKVRPKNEVGEYLVFEGKHPPIISEELFIAAREKQGRNHRTKVDAKIRNPLAGLLFCGCGRVMSLRTYTARNAAPRLLCDNQTYCKTSSCRYEDVICLVRETLEQCMNDFEIRIENDDKNLRHMQENIIKRLELKSEELDKKEISQWEKYSEEKMPKEIFRKLNEKILKEKDDVQQALRKARETMPEPVEYEEKTLYLKNALEALEDPEISAENKNRLLKACIERIDYKREKAERKQSQQIRCYDKEKKRTYCKSPLNVGGNWTDPPIELCIRLAVKRS

SEQ ID NO: 375 - protein, 475 aa, unidentified
  source 1..475: note = Bacteriophage uvig_517008 from the Index of /pub/databases/metagenomics/genome_sets/gut_phage_database (ebi.ac.uk)
MRCVSYTRTTSCKNTKNIPSDIIQQQNEHIQNYIQSHGWKLVAKYSDRKKDANENTAFEEMTADGINRKFDMVVVDSVDRCGKYISCAEDVLVKTFFPAGLHFAIVQSDFCSIGKSREEIDEYFRKEKIAVQVKSMREYTIREQIEGYYTVHDEKYGYILSEDRKELIVEEEAAKIVREIFQMTLEEMSIKKIVAILNERGEESPMVHNARVGHKHWPHYENKWSEGALRRILECTAYDGYWKKTINGKVCTLSITPILDPGVFDKAREIIKNRTTTDNIIGGKPGPYVRKIYDEATGKPLYLRNFRSGDVAFVFNPQMGELPKKRKIYIEEAKVTEAVKNAISLEMDMAEKMKAYLQTEKMQQLLQKEIQQYSEKAWMIFQEMEQVEKDRIPLYEKFRDYEIGQTEYQEKKEEIQAQLQMYENDFEGLMDRLADMKKAYSEENEWIKTFQREELPEKLESQHVKKWVDRRLRRI

SEQ ID NO: 376 - protein, 378 aa, unidentified
  source 1..378: note = Bacteriophage uvig_223324 from the Index of /pub/databases/metagenomics/genome_sets/gut_phage_database (ebi.ac.uk)
MLYLSGLIDIIIFIKLDRWFRNVGDYYRTQSILDAHNVKWKSVLEDYDTTTRTGRLNLNIKLTIAEDEAANTSERVKFVLDAKVRNGEPNTGTQPFGYKIEKIDGIKRIIKNPDTQAECEDMFRRFFETKSGYETTRYINQKYGRNHADNTITRRLKNLSYTGEYRGIYDYRPAYITHEQHAEILRILGKSTRKAKGRKVYLFAGMVECPECERTLASCTSNKLTLAYRCRYHGVSNCDYKHIVKEKDIEEYLLSNIKNELENYKTNIKSKLRKKAPENPAVYENQLERLNNVYIMGNISNEEYNRKAAELKAKIADLKAGNNQADTIPQDTMKLLSDSSFPALYNRLNRKERRALWASIIDKIKIEGTKPSSIKFLE

SEQ ID NO: 377 - protein, 560 aa, unidentified
  source 1..560: note = Bacteriophage uvig_347727 from the Index of /pub/databases/metagenomics/genome_sets/gut_phage_database (ebi.ac.uk)
MKNTVKVCAYCRVSTNKSEQKLSFENQKKYFESILTKDKGYELINIYADEGLSGTKFRKREQFNKMLFDAGLNMVTNSLKINEDRNKYISTDYVLSDREPLFNLIFVKDSSRFARNTEVNRILNRLKDKGVYVYFEDLCKTTENEADRIIIDFLFGMSYQESVDKSNKTKFGMKRSSENGKVRCGHELFGYTFNKDENTLRVISEEAEVIKLIFKLRLEGNGTRRIAKYLNDNGYRTRNNKQYCISRINTILKNATYTGKQVYNKTEMQNLGDGSSKKRKHIDDWIIKDTDKIDQIIDEDTFYKVQQLIADNTTSNKGVYNGASELCNYLYCGKCGAKYYKFNSRCRVYYRCKNKININAEVKCDNKNVKLDYIYSILNSYCDDYKNTCISYFNMVKNSVNKQIVNIKEDTDNEAVLAIKEQIRAKEAILEELLDNMLNNSSETVKKVFMKKQKLIDDELKELEGQLKQYTATDEEKQDKINYINNTLNQLDYHIKHIPDDLDLDKFIKTCLDRIIVYEDKIEISTIFDMLAKAICELLGISILDVIQEDISNNEGLRLL

SEQ ID NO: 378 - protein, 555 aa, unidentified
  source 1..555: note = Bacteriophage uvig_47521 from the Index of /pub/databases/metagenomics/genome_sets/gut_phage_database (ebi.ac.uk)
MDKRILCIIRASTEKQETESQKKELISYCEAKGFTVDEMAFIEVAGASARKLNKKYIQMLEDIKATLLSSPTIKAVALWDLNRLGRVESKLHEMKEFFVAHKIQVYCKSPEFVLLNEDGTASDAGGIVFSVFASIVKHDTDEMFAKMNRGRMRNKENGIYYGGQIKFGYTLDETKHFIIKEEEAKTIRLIFELYATGKYSFYSLIDELKARGITKNGKKITFEMIQNALSDEAYYNGKLPIISKDLFDKCTAIKANSVAVKRTKETCNVNFAVGLLKCECGNNFIASGDYYTCFSKVNRKRKKVVVECDAPVIKSDLLDDLLWIVTRPLQQKFLMQTDSQSVAENNDKINVLTVKVSTAQKELSSFKDRIEKLEDAYYVEGEMDEAQFKKRLGILKSKKVQTESLITNYRNEINDIKKVIEQLEQPINDRYLQSLLLSNLDTEDIEDRKKIKEMMFMHIEKVTAKKVMLGNHKGVEITIIAKSGLSFVFFYDIWLSSFRKGECNTFYEDKPLYEVNGFIKSMNTKVQNMIYEKIGLPLLSYKELGEAAAEYAKTH

SEQ ID NO: 379 - protein, 516 aa, unidentified
  source 1..516: note = Bacteriophage uvig_539751 from the Index of /pub/databases/metagenomics/genome_sets/gut_phage_database (ebi.ac.uk)
MTMDRSAHSRLAVTYRRISSLNQVDNNSMCAQEQAIKDYAKKNHLKIVEAFHDLAKSGTSVQNRTGYQQMMEYLEKHPEVTCVLLHHLDRLHRNVRNQLNDIYTLKCKGIAVVTTDGLNSMDEDCMSEILDEAASAEKYSRRLSKETMKGLRVNAEQMLHNGGLPPYGYTVGSDKKLYIDEAKAPAVRKMFEMYAAGMSYKQIAQWLDDNGFTTVKGGNFKSTSIKTILENEKYCGTYFWNKRASKDFRGMRNSHQQKEDYYQVHGAIEPIVSEELFDKVQERLHDNKNRICNYNGKNYYPFNGKVFCGKCGKKLSGHVQYSRTNKNNDLVKQYRFSCSCPAVKTVNEKYLDDMVINGLRACIFSPENYEELVDKLNAYGKIQERVIDLQIEVLRSDKENAEKRCSNLMDIAENGDGTKSIVDKIKKLDKRMAKIDRRISEYEAAKKVFKAEDIDRIRDRFTEYVMENRNEDVLGFLEDTVDRIEVDDTVRVHLKKNICVDRETKKGFRQERSIKK

SEQ ID NO: 380 - protein, 448 aa, unidentified
  source 1..448: note = Bacteriophage uvig_124673 from the Index of /pub/databases/metagenomics/genome_sets/gut_phage_database (ebi.ac.uk)
MERIIQKVTPPARKKAPKLKRVAAYARVSSGREAPLHSLSAQISQYSGMIQKTPGWQYAGVYADEALTGTKDSRGEFQRLLADCRAGKIDMIITKSVSRFARNTVTTLRTIRELRLMGVDVFFEEQNIHTMGEDGELLLTLLAAYAEEEARSVSENQKWRIKSNYEQGLPWSITMYGYRQVNGRLEVVPEEAEIIRLAADLYLEGYGRCKLEDAFAAVNIKGRHGANMGGNSIVDLICNEKIVGDMLLQKTFVVDPITKEVRKNNGEKPQYFVEGSHEGILDRETYEKVLAERARRAAAYKPRSGNYERNRFPFSGKIHCGKCGKSFTRKVLNGNTPYEKRGWLCRTFNQKGKAHCDAKQIPEEILKRVSAEAMGLPEFDEAAFAAKVEEIQVPENGVLVFVFYDGHTVTKTWDNPSRRHSWNPENRQRARELALRQAAERRLAKCQQ

SEQ ID NO: 381 - protein, 396 aa, unidentified
  source 1..396: note = Bacteriophage uvig_430255 from the Index of /pub/databases/metagenomics/genome_sets/gut_phage_database (ebi.ac.uk)
MAKKLDPQEIEQSRRKKTRADNREERKERIHDGIRKNRESGGVIIIPPPPAVQAQGQTPRKMRVAAYVRVSTQEEQQVGSFEMQIVYFKSKIESNPDWELVKIYQDYGVSGTSTNKRQGFKDMIDDAKAGKIDLILTKGINRFGRNTVDILNNLRTLNALTPPVPVRFESEGLSSIGDGSNNLLIAVLSALAELESQQKSEAIKNGIRWRMAEGIYQFSVINTLGYYWDHFGRLLIEPTEAKIVEYIYESCLEGATPAEIATALTEQGIKSPKGKDFWRAATIRGILRNEKYCGDALMQKTCTIDFREHKSVKNTMLNKYFKEEHHTAIIKKSDWQKVQQILDEKPLPGKSARLHAMPKRFTVTRSKDKYFRGYIILDPRWTASERRELLKELKNL

SEQ ID NO: 382 - protein, 554 aa, unidentified
  source 1..554: note = Bacteriophage uvig_581111 from the Index of /pub/databases/metagenomics/genome_sets/gut_phage_database (ebi.ac.uk)
MSDTPKLNAAFYGRYSAGPNQSESSIEGQRRECYARAKSQNTIIRKDYIDRHISGQTDQRPQFQQLMKDVKKGLYNIVYVYTIDRFSRNKFDIAKYKNEMRKAGCRLISAKEYVPAGPEGIILESVLEGMAEYYSKELSRKVSRGIYESALKHQHIGGTVPFGFVLENKKYKPDPIKAPIVREIFERYVSGEPAVDICSNLNNRGIATSVGQKFNKSSLNRILSNTKYIGTYTYKRAYIDEITQEKKKELIEFKNVIEPIVSEELFIKAGQRMEQNKHTSKRKKDKPAVEFLLSGKLFCGKCKAPMTGDSGTGKSGNTYYYYTCANKKSKRGKDACRSKSYPKEKLEEFIVKFTRDDILSPEILDWLSENIIQLQGNQKDDMQIRLMLQQKKDVENKIANIMTAIENGIFTETTKDRLENLEEAKRNLEYNIQVEKFKNNAPAESKDSIIYYLEQFRKDDIKDNDCQRLIINTLIDTIIIDEENDRGIVAYRYNDDNNGTREFSIKNTFDVFECVSYGGLSGTKLTLLSKEIIEVCKEKNNIIFFEVLQNWLAA

SEQ ID NO: 383 - protein, 381 aa, unidentified
  source 1..381: note = Bacteriophage uvig_154343 from the Index of /pub/databases/metagenomics/genome_sets/gut_phage_database (ebi.ac.uk)
MTENVLKGKYNGGTIPIGFKVDEEKFFQIDPLKAPFVVEAFQRYNDGATMKELMNWLNDSGVTTNRNQKFTYNSVQKLLTNKRYIGENHFKDIVMPDSIPAIVDKDLFEEVQQKIKKNSRAPARHKAEDDYLLTTKLFCGMCGAMMFGECGTGRNKVVHHYYKCATAKRFKTCKKKTVRKEWLEDLVIAETMKLIQDDAVIDAIVAEVMELQDQENTTLPLLEKQMREVENGIENMLNAIQAGVLTNSTKSRLEKLEAQQKELEVRIAEEKIAQPRLSENQVRFWLTRFRKLDPNVKSHRETLINTFVNAVYLYDEKVLITFNYKDGTKTITFDEIAAKDAPEGNGSDLGCFAPPICRIVLYDAAFFIPKKLWQTVPDSEP

SEQ ID NO: 384 - protein, 571 aa, unidentified
  source 1..571: note = Bacteriophage uvig_597740 from the Index of /pub/databases/metagenomics/genome_sets/gut_phage_database (ebi.ac.uk)
MPHPAVALDKKPVCSYYSRKRVFCEVVLMHGAYILARYSTDRQNEDSIEVQVSACRKWCDERSLPVLDVFADEATSGMKDTRPEYARMMRQLDRGGADTVVIYDQSRMFRKMSAWFDFRDRLARQGVRVVSVTQPMIGGDLRDPANFVAEGSMALFNQMWVLQTRQKVVEKMRFMARQGLHTGGTPPLGFRVEGKRLVIDEAEAETVRLIFGRYAAGWTYREIIRQLNAEGRHTKTGGEFGTNSLHDMLKNPKYVGDLVYGKVEKRPDGSRNSHAVADSQIVIEGALPAIVDLETWDKVQAKMKENKREAVGRPASAREYPLKGKVFCRECKSAMVVTASNRGGKKYFYYACAAKHRKGLCDNMPIAVDTLERVVSDAVRERFCDPQNVEALIKVLREERGRLSESAVARLKALQARDSDIGRQLEAAVQAVLGGLNSPTLSARITQLEVERAQIEHDMQQLRAQVSGADLPEARMRELLAIAMNDAAAVLSIVARVEVGREEIAIWTILDADPSGKLDFSEDGVAFSPPPNIYSNSGCPSTGTTNYYNIVTPAGLLLFYIARPRQRDRRS

SEQ ID NO: 385 - protein, 549 aa, unidentified
  source 1..549: note = Bacteriophage ivig_2971 from the Index of /pub/databases/metagenomics/genome_sets/gut_phage_database (ebi.ac.uk)
MPDDCAVIYARYSSHAQRDVSIEDQVADCRIYAERLGLTVLEVYADHATTGRSDDRCQFQRMIQDAKKGRWKTVLTWKTDRFARNRYDSAVYKARLKRYGVHVQYAKESIPDGPEGILMEGMLESYAEYFSANLAQNVRRGLNSNAQKCKLNGPAPLGYRRGSDGGYEIVESEAAVVRRIYQSITQGTGYAELVRELNAAGIKTKRGSSWTKNSFHKILRNEAYIGVYQYGEHRTEDAIPPIITKEEFAAVQNKLETYKKHNAHTGEIREYLLTGKLFCGNCGEGMVGICGTSKSGVRHYYYMCKGHQAHRCDLKNVKAAQLEDQVVSYTMQYVLQDDVIAELVDKLLEYQAQQQDSGMLEALRAELADVQGRLDNLMEAIEAGIITKTTKARLSELESEQERLTHSITVETCRNTGLSREQLIFLFDMFRAGDMRDLDFRRRLIDTFVNAVFVYDDGRLKIVYNFREGNETVTKEFVDSVESGAVDSVRMVVNSVYHGHPKGCPFSFSLKASSPISNGRSGCFNINIVSKQEVIGGITAEALLLTAPD

SEQ ID NO: 386 - protein, 533 aa, unidentified
  source 1..533: note = Bacteriophage uvig_458373 from the Index of /pub/databases/metagenomics/genome_sets/gut_phage_database (ebi.ac.uk)
MLVFGIYARKSLHSDQSDSVENQVLLAEEYIAKHYPDVEKRLIYYIDEDRSGGDMFRPDWERLITDMRNRILDIIVCYKLDRVGRDVADLALFYREIVQYDLIVVPVRDNLEIKEDMTPIEKGMMYMNAVFSQIERENTIVRVSDNMIKLAEKGYWCGGRPPIGFQLQKVMADNSRMHTILVENPSTLPFYHKLVHDFLTEGLSLGGMETKYKKEKFTTPLGAALTGSQIWILLTNPNYVAADGIMYDYYAAMGCKMAKPRELFDGQHGIIAYCRGRGAGKGSHKRKRILNPPEKWIISVGHHLPILDSQTFLAIQNRFGQNVIDKTRKHKIGILKGVLRCSCGRLMRTKYKYDKQYDIEYRHYYCPTRDRLGPEYCTARMVRLDDLDDEVIRQLTAMSLDYELIDQYISPVIPLPNMRTRVTVEKELKSVQNKISNLTQALSNTDAIAAAKYIISSIEALDSQITKLKKELYDISSVESKTRKREVDKMERYRMVCHIIERLDDADYDEINGLIRELFSECVWDGKKLHIKI

SEQ ID NO: 387 - protein, 446 aa, unidentified
  source 1..446: note = Bacteriophage uvig_200526 from the Index of /pub/databases/metagenomics/genome_sets/gut_phage_database (ebi.ac.uk)
MKIVTEIGAIAPIKKLKKVCAYARVSKDKDAMLQSLSSQVSHYNKLISSNPEWQFAGVYADEGISGTKEDRPEFIRMVEDAKAGKIDMIITKSISRFGRNTETVIKTVRMLKAINVDVYFESQKMHTLSEEGEFMLTVLASYYQEEARSVSENMKWRIKKDFEQGIAWGGNDNFGYKLNGRTLEIVPEQAQIVKRIFDMYINGLGVLAIAKALNEEGIKPTMGGKWIKSNVLRVITNINYIGDRVLQTTFRPDFLSKKKKINKGELKQYYVEDDHEPIIDKETFMKAQLIKEERAKRFKLDVSKRNITYPFTQKIRCSCCGSTYQHKTTKYNQYWICSTFNMKGKKFCNDSKQIPEEKLYEAINSYLGIDEFDEDLFNKKIDYIIAKPNNVLEIHLFDGKIDEIKWTDPTRKNSWTPEMKEKARIKSKEIEKNLKRGADGKWVKSE

SEQ ID NO: 388 - protein, 525 aa, unidentified
  source 1..525: note = Bacteriophage uvig_307306 from the Index of /pub/databases/metagenomics/genome_sets/gut_phage_database (ebi.ac.uk)
MNVVIYARFSSHSQTEQSIEGQLKACYEYAERNSYTVIGEYIDRALTGTNDNRPEFLRMIEDSRKKTFQGILVYQLDRFARNRYDSAVYKKKLKKNGVRVLSARENISEDASGILIESVLEGLAEYYSAELSQKVRRGLDINASKCLCTGGGVALGFKVDKDRHFQVDEDTAPVVREIFEMYANGKTVTEIITMMNARNIVTSRGSAFNKNSLRKMLQNKRYIGTYTYKGTEIPNGIPRIIDDDLFMQVQEMMKKNRKAPARARAKEEYLLTTKLFCGHCKEMMTGYSGTSHTSAVHHYYICNNRKKKLCKKKNVQKDFIEKLVISECRKLLTPENIERISHEVVAASQRDQDMTNVRHLSKQLADIERKRKNLMSAIMECDSDLIRKTLYEQIPLLEKEKSDTELQLTLEKAKQVKLTVSEVRFFLNALRKGDPDSIKYQKALISVLVNAVYLYDDKITLIFNSGDHAVTLDAALLEKIEQQADSVPVEDRFVYEQLASTIGRISEPYIAWGTVFVQTKRHSLP

SEQ ID NO: 389 - protein, 527 aa, unidentified
  source 1..527: note = Bacteriophage uvig_396131 from the Index of /pub/databases/metagenomics/genome_sets/gut_phage_database (ebi.ac.uk)
MAVKLIRCAFYARFSCDKQRDASIEDQLYACNVYAEKHGYKVVAQYCDYAMTGRSDDRPQFLQMIEDAKQGAFDVIVVWKMNRFARNIEEQYYYEHVLRITSGVTFESTKENIVGNSIEATSNKALNALVAQIQSQNTSEDTMRGMTGKADKCQYLGYHRFGYSHEGDVITLDPVEAPMAKRIHTDYLAGIPILDICAWLKSMGVKTMKGNDPGYTFVTGILKNLAYAGVYIWGTKKDDEGEVILDEQGQPVPLVYKEGGMPAIVDMETKLACIKRLGLKKHSRTKANFMLSGKLYCSSCGNPLHGETATGKSGTEYFRYACQKKRKTCFGTLPKGEAEADVVRNVRALLRDVKLLEWLIDCHIEHKKAHKSEVSIKATKKELRELGRQRKNLLDAVADGLEYRHVKDRMAALDAQEEGLKNRIEKLERDSGEVDREDMLRFFSALSEGEMEDEDILRVFVNKIWLYEGSAVAVMNFDSRESSQYEIEYALNQHEHPVQRCSCNVDMVPPRGLEPPTHGLGNRRSIR

SEQ ID NO: 390 - protein, 359 aa, unidentified
  source 1..359: note = Bacteriophage uvig_568903 from the Index of /pub/databases/metagenomics/genome_sets/gut_phage_database (ebi.ac.uk)
MVITKDLSRLGRDYIKTGFYIESYFPERNIRYIALLDNLDTFEENSSASDITPFKAVLNDMYAKDISKKIRSVCRQKRENGQYISAYPPYGYIKDTSNELAHLIVDDYASQIVKRIFDMYINGMTTCKICDALNAENIEPPAVYLKMNLVHRSEDYYKWRPSSVQKILKNEVYLGKLLQGKTKKLSYKSKKKIDLPREVWIVEENAHKPLIDEETFEKVQQILQRKYNTRNRNREYLLKGITYCHNCGNKLNFVTKTEKYKDKKYERRYVVCGTANKGKCIKQYNNYDKLEKEILDYIRKVCILNTNSETYKKVILKKKNDNTEVVNDYLSHIKVLEEKIASLNKKVEQIYDDRLNRCN

SEQ ID NO: 391 - protein, 559 aa, unidentified
  source 1..559: note = Bacteriophage uvig_199869 from the Index of /pub/databases/metagenomics/genome_sets/gut_phage_database (ebi.ac.uk)
MARKSRKNRNVESNIQTVVKKENLLDTAAYIRLSVENGGNETDETLVVQQMLVERFIEEHPDLRLEEVYIDNGFTGTNFERPGFMRLMEDVRSGKVQCIVVKDLSRFGRDYLETGYYLETILPKLNVRFIAITDDYDSSRKEDRENISVPIKNMVNAMYAKDMSKKILAAKEAQKRNGNITLSKVAFGYVRSEDKTRQVVDETVAPVVRMIFQWTLLGVSKREIADRLNLLGIATPGQKEKRKIARVPLEETKWNGGTVRKILENPTYTGDIVTGKLKQSLYKGVKQYRTVPEEWDVQKDMHTPLVARDDYEELQESREEIHKVTKKRQSRCMKDREKYQDSFPGMVRCGECGNVMYFRRYTHNYTTNEKMGSDYYCGNEQCSRNLIEGNLLKILVMDQIQILIKSMCDRKLLLQKMKSATKENNIFYKAAAKVRTLERKIAQTEERNTRLYEDYVAGIVDKDDFDMMKERYIGELQNLREELQVQEQNQRILEKKANRYMDMVNHMEKYLDKREYNEALVQELVEYIEVYADGSIHVCFKCKDEFQQIAEEMEGVQIG

SEQ ID NO: 392 - protein, 435 aa, unidentified
  source 1..435: note = Bacteriophage uvig_181597 from the Index of /pub/databases/metagenomics/genome_sets/gut_phage_database (ebi.ac.uk)
MTIAWAYCRFSSDHQREESIDAQIRAIRDYCGRNRITLEKIYRDEARSATTDDRPSFQQMFSDIKEYPCDLVIVHKLDRFSRDRYDSAFYKRKLKERGIRLVSVLENIDGSPESIILESVLEGMSEYYSRNLAREVQKGKKETAYKCLHNGGVPPIGYQVDGSGKYHVDPIESKWIIKAYEMKASGRSYMEIAAYLNGIGARTRRGQGFTKNSFHDLFKNEKYKGVYVYNRAAPKTSGKRNNHLNKSAEDIIRIEGGIPRIVSDELWNEVNMQMKDRTMNARHKAKRTYLLSGIIYCGECGSPMSGNARRAGRNKTEYITYDCNRRHRERTCRAKGINKKYIEDLVISHLENEFFTQENVLQLSQRIFDLQEQRKMEVTPELAALKAELAAKQKEMNNIIDSIKKGGYKDWMGDLGDEIDARIKYLEGKIQYSES

SEQ ID NO: 393 - protein, 504 aa, unidentified
  source 1..504: note = Bacteriophage uvig_38906 from the Index of /pub/databases/metagenomics/genome_sets/gut_phage_database (ebi.ac.uk)
MAYAMYLRKSRKDDDTGIEDTLARHEKMLQDLADRMGILVCEQDVYREVVSGESIEARPQMQRLLKHVELGEYDGVLCVELERLSRGNGEDQSRTLKAFQFSDTKIITLNKTYDLAGEDEFDEEFFEFGLFMSRREYKMIKRRLLRGRMQSQQDGYFIGATPPFGYDKMKNPDGKGWILVPNEQTPIVQMIFERYASGESAASIMHELNRMGIQPSKVYDTAWTSHRVQDIIKNRVYLGEINVKIKRTEKRIEDGKIIESRVRNLNHGTVKGKHEPIVSVETFNKCQELLAMRSTRQAVSKQLSNPLASFLHCSKCGKVMRRTTYTWKGVTTERLQCSTFKCETRNSSLPMVENMILDALKDELSRQLTVLAEYGGVEADDTDEKALEIVESEIEKKDKMLDRVDELYELGDYSRAKYLDRSQKLQSQKAYLLRQKSMLEDKIAQRESKQKKAVPILTKVLDEYHSLDTADKNRLLKMIIERVDYTKTESGSHIEPQLEYTLRI

SEQ ID NO: 394 - protein, 544 aa, unidentified
  source 1..544: note = Bacteriophage uvig_16065 from the Index of /pub/databases/metagenomics/genome_sets/gut_phage_database (ebi.ac.uk)
MPDKVYRTAIYCRLSREDGDKVESNSIASQRAICEDYIARHDDLELVCEPFVDDGYSGVSFNRPQFKKLEEAIRKGALDCIVVKDLSRFSRNYIDGGRYIEKIFPQLGIRFIAINDAYDSLTGDPQSDSFVIPFKNLINDSYCKDISMKIRSSLEVKQKSGEFVGSFAPYGYMKSPENKNQLIVDEAVSEYVQMIFSMYKDGFSIGRIAKRLNQMGVLSPMEYKHSAGVKFDTVFKTSDTAKWTYKAVQRILTNEVYIGVLAQGKRGTPNYKVRVVKSKDESEWVKVENAHEALVSYEDFMAVKVMMQRDMRCSPDQDEAHLFSGFLFCGDCQQPMIRKTVPSKAKKYIYYVCSTNKHSRTCSPHSIAAKEVEEKVFRAIHDQIELVINLEHALAMIERLPSQSRKAFNYEAQIAKIEEEIERYQKLKLGLYENFIGGVIDKSEYFEFRSSYTKIIEDKQEALLRVKKEMKQTVTTGTTERNWVTLFKQYENVEELNRRVLMSLVDRILIHENHAIEIVFKYRDEYQQTIEYVLGYADELDIAV

SEQ ID NO: 395 - protein, 489 aa, unidentified
  source 1..489: note = Bacteriophage uvig_453325 from the Index of /pub/databases/metagenomics/genome_sets/gut_phage_database (ebi.ac.uk)
MLKNIPAVVYARYSSSNQREESIEDQLRECYKFADREGYNVIGQYCDHAISGRTDDRPEFLRMICDAEKQLFKAVIVYRLDRFARNRFDSVLYKSRLAQYKVNVVSATECIPEGSDGVLIEALHEALAQKYSDDLSQIIRRGLYGNAEHCKSNGPLPFGYKANPTTRLVEIDEETAPIVKQIFTMIAEGSNYNQALAYCTRMGYPKTKNALYHILRNERYKGIYIYANKRTEGGIPCIVSEELFAAANATRQKHINKPNAGSYKYLLTGKLYCKDCENLYSGGYGTSRWGKKSYYYVCSGKKRKHICAAANINAPKIESMVVDALYMFILNEDIISAIIDAALECQERNSPHKNNIMVINRRIAEIEKKLNNLLKAIEAGVLTETTMSRMQELEEKKKSLRRSLMKEKLKAPKISRSQLEFFFEKLRGEDPHARKFQKCLIDTFVNRIYPDGNTVKMVVNLGAPDDETLTYSKLSPCFAGFDKRNFWWR

SEQ ID NO: 396 - protein, 436 aa, unidentified
  source 1..436: note = Bacteriophage uvig_294132 from the Index of /pub/databases/metagenomics/genome_sets/gut_phage_database (ebi.ac.uk)
MSKLKAIAYYRVSTEMQEEKESLSTQIQGGEIFCRDNDIELIKVFSDVMSGGNRRRPGFLAAKKFMEENKGNIDMFIAYDVSRIARDAFTFLELFNYLNMIGVKLKLINNPTLDSDSAMGKLILTILAAIFDFFRFDNSSRVRDNMVIRVKEGKRMNSAPYGYKIVDKKMVIVEEEAEIIRYVFNAYLEGKGFRTIAKEINRDHSTISNWLNNKVYAGYNIFGKTKMNKSTFKLVRNKDKSSIIEALGDWEPIISLEIFEKVKAIRDKNKELRIKPNHNSKFLLSGLLFHSECDDKFRGNTVLNNYYYRCFSCSKHFKSAEIENMVIDELINGDALKALNKKIKNENKKYNEKSILEKTKNNLEAKKKRLKDFLIDGTLEKEEYNTRLLEVEQKLLEVKEKEKNIEVEAIRKIDTDIIKVFKKIIENINIEDREDT

SEQ ID NO: 397 - protein, 527 aa, unidentified
  source 1..527: note = Bacteriophage uvig_550213 from the Index of /pub/databases/metagenomics/genome_sets/gut_phage_database (ebi.ac.uk)
MNTAVRTVTVIPPSINPMTHLTDTPLYKLRVAAYARVSTDSDEQFTSYEAQIDYYTQYIQRNQEWTFVKVYTDEGISGTNTKHRAGFNEMIEDALAGKIDLIVTKSVSRFARNTVDSLVTIRKLKEKGVQVYFEKENIYTFDGKGELLLTIMSSLAQEESRSISENVTWGQRKRFADGKVNLPYKQFLGYRKGADGFPEVVPEEAVIVRRIYTRFMEGLTPGAIAKELTADGIPTPSGKQRWQTSTVESILQNEKYKGAALLQKCFTVDFLTKKRKVNEGEVPQYYVEHSHEPIITPEEFDKVQTELARRKRISRQYSGKSIFSSRIVCGDCGSYFGSKVWNSTSKYRRVIWQCNGKFKGEHKCETPHLDEETIKARFVAATNAIIDSKDNILEDCRLMQTTLTDCTGIDAEIESLLEEIDVVAELTKRCIAENSQTAQNQNEYAARYNGFLERYEKAKAQLEQLRATKVAREAQAEAIGAFMFEVQELDALTNFDEKLWLTVIDTVTVHADGRMTFKFQGGTEIEA

SEQ ID NO: 398 - protein, 528 aa, unidentified
  source 1..528: note = Bacteriophage uvig_442559 from the Index of /pub/databases/metagenomics/genome_sets/gut_phage_database (ebi.ac.uk)
MEQYCMYLRKSRADREAEQRGEMETLSRHEAALLALAARNHHPITKIYREVVSGETIAARPCMQELLSEVEAGIWTGVYVMEVERLARGDTIDQGVVSRAFRLSSTLIITPIKTYHPDNEFDEEYFEFGLFMSRREYATIKRRLQRGRDASVREGKYIGNRSPYGYYREKIPHDKGFRLVPDPDQADVVRNIYKWYCNGIPADGVSPTTFGMAKIRDRLNALGVPAATGGPWTISSISGILQNPVYTGKIRHNYRPAEKSLSGGVITVRRPRNGSGDLYDGLHEAIISQESFDMVQDFMKNRKLPSIPYKKKMANPLSGIVRCSVCGKVMIRRPYQSGRQCTLMCQTAHCATVASDLDDVEREILNGLAEWLKDYKLQWNIPDSADSSPAVSMLQTQLVQKRKEEERLRSQLDNTYDLLEQGIYTKDVFLTRNKMVVEKLEEVHISIDSLEKEIALEQKRLQAKIDVIPKVENILDVYWTLPDVKSKNDLLKSVLDKVVYTKSGRNGPHKKVHYAFTLDLYPKLPKSP

SEQ ID NO: 399 - protein, 524 aa, unidentified
  source 1..524: note = Bacteriophage uvig_148886 from the Index of /pub/databases/metagenomics/genome_sets/gut_phage_database (ebi.ac.uk)
MAKVTIIPSKINPITHQHLDVKVKRRVAAYARVSTDDEMQLTSYEAQVDYYTKLIKANDEWEFVKVYADEGITGTSLKNRKEFNAMIKDALDDKIDLIITKSVSRFARNTVDALTTIRKLKEKRKEIYFEKENIYTLDSKGEVLVTIMSSLAQDESRNISENVTWGQRKRFSDGKYNLARKNFLGYKKDQDGNIIIDEKEAVVVRKIYRYFLDGMTPGGIAQSLMDEGVPTPGGKTKWIYSTIISILQNEKYKGDALLQKRFTVNFLEHKMKKNEGEVNQYYVKKGHPAIIEPVIWDRVQLEIKRRENSKRIYSAKDAFSSKLVCADCGSYFGKKIWHSNDPYRKVIWRCNHKYDGDKKCDTPTLEEDTIKNAFLLAYTNLCVDKDIIIETTKELVDSLCDFEELDQKIIKESEDLDIIADKVHKMVMENANTAQDQEEYQKRYDYLSGKYNEGKVKLNALQEERARRATQKEILELKINELEDAYVLEEWNESIFKMSVDEILVSKYELTFKFYIGEEIKIKL

SEQ ID NO: 400 - protein, 542 aa, unidentified
  source 1..542: note = Bacteriophage ivig_4396 from the Index of /pub/databases/metagenomics/genome_sets/gut_phage_database (ebi.ac.uk)
MAERVYCLYRVSTNKQVDHDENNQADIPMQRKACHDFAAKMGWVIVGEEQETGVSGYKVSADDRDKLQLIKKYAEQGKFDILLVFMFDRLGRKSDETPFVVEWFTKKGVRVWSVQEGEQRFESHTDRLTNYIRFWQADGESQKTSMRTKTALGQMVEEGRFRGGNAPYGYRLEKSGILNKRKHEVYMLVIDEDEARVVRMMFDLCISSGYGRWRLANFLNDHGIKNRKGQNWHDASVGGILHNPLYKGILRSGETYAGPFEALQIIAPDQFDLAQKLMLERTNERKERRTVPLNTTGQSLLSGNIFCGHCGGRLVLTTNGTTTRLADGTPVHKKRIRYVCYNKTRRRQECTGQTGYTMHILDGIVTEVLHQVFDKMQGASNDMIVGSAVQKQMAMIRSELQRARAENTKANKEYESLKAEVLKAIQGKSALPQDVLTEMLEDTRQKVLSTSERITTLTEELNDGNSKIEEMKAEFNRIVSWSKIFDESPMEVKKMICGYIIKKVSVFRDYRVKIEFNINVEQFLNGIDSINECATYELPMAQ

SEQ ID NO: 401 - protein, 523 aa, unidentified
  source 1..523: note = Bacteriophage uvig_284398 from the Index of /pub/databases/metagenomics/genome_sets/gut_phage_database (ebi.ac.uk)
MPNTKSFTVNEVLVYLRKSRSDSPDMSVEEVLRKHEEMIQQYASTHFHSPIPEKNIFREVVSGETIDSRPQMKNLLKMIESEQFKAVLVVEPQRLSRGDLEDCGRLINILRYTNTTVLTLTHSFNLQEEYERKFFEMEITRGNDYLEYTKRILKRGREASVAKGNYIGSVDPYGYKKTVIKKDGITCHTLEIIPEEADTVKLIHELYAYTPEGIGFTNIAHKLDAMHIKPKKAAHWTPAIISSILCNPLYLGMVRWNNRKVVKYINEGQLAKARPQNTEAKYYKGLHEPIITQKLYDACMARRGTNPSLRRNKELCNPFAGLLYCGTCGHAMSLKIYKNHNSVSQMMLCNHQAYCHTKSVLYSAFLRRFISSMEDTLNDFELAQKSDDGRTQAISKTIVINLENKLKKLNEKDARQKDAYEDGIYSKEEFLKRNVRTQQDIASTIIALEDARAKKADIIDYEEKIRRFKDCLHALNDPELSAAEKNRFLKSCVDKILYYNNMESKAGIGRYIENVFSLEIQYK

SEQ ID NO: 402 - protein, 508 aa, unidentified
  source 1..508: note = Bacteriophage uvig_517692 from the Index of /pub/databases/metagenomics/genome_sets/gut_phage_database (ebi.ac.uk)
MSVQVIKSKNTRKGRIRVAAYCRVSTETEIQEGSIENQIEHYEELIKSNPDYEFVNVYYDFGISGYKEKRPGFQEMMKDARSGKIDLIITKSITRFARNTNTLLKATRELKSLGIGVFFELQNMNTLNEGGELLLTVYAAFAQGESETYRELAQMTFKRKFSEGRPEYQLRKTLGFDMTENNEIQIVPKEAEGVKQIFQWVKENYSTQTIVKMAAAKGITLKSGKPFTAQWVYKTVRNVAYKGDYIMQRTYTDSERKVHVNQTLVPSFYIENDHDAIVSKRLWNAANKVIDDRAKERTTHLEMKPLTEENYPYIHKLHCAKCGGVLHGQKTKSGAQYSFSCGRRNRQGKGFCSGVSVPQKVIESWGEIDGNIYISFDPDKPLHKQHSYVKESTWKKNHTKKKLPPLPAYNVENYPYYRRVYCAECGHLLTRSRRYDGLVEFICNGMASRGKSYCKGVRVPVEVLNRLPEWDGFYWIKEDKENGEKHYSYTCKEEKPQRKEYSAGGRED

SEQ ID NO: 403 - protein, 524 aa, unidentified
  source 1..524: note = Bacteriophage ivig_1929 from the Index of /pub/databases/metagenomics/genome_sets/gut_phage_database (ebi.ac.uk)
MQCDFIFAYLRLSRDDKEKMEESNSIKNQRLLIQHFVENQPEFAGAKLFFFVDDGYSGTTFDRPEFKRMMGLITRRKRICIIVKDLSRLGRDTIETQNYIEKIFPFLGVRFISINDFYDSSQKPSERKDTEIKFKNLINGIYPQICSDNIKKVMRKQAEMGQYHGSIPTYGYCFHDGVHTKLHLDTEAASIVRGIFDQRLAGMSYADIARNLNEKELETPTVYLQRKGWAPEAKKSVKFWDGNLVKLILFNPVYAGLTVRGKTETRVPSKREYRYISREDWICVKGGHEAIVTEQELQKVQDMAEKRRKYYGRTPSSENIFSGLIRCGHCGRKMRIRVTYKEKPIYCGSTTTAPNASCYPKKYKQKDLEELVLVMIKQQAALAEDTIKQLKRANQTLNIPKLRYRKKQYEKKLAICKQEKMELYEQYAEEQISLKDYLARKQTCMEKTAAYQQKIQEIEAKILKGEEEKQKEKSEGLQLFVKYKGLEELSYEVLHELIEVINFYDPEHIEIVWKYRDEFLEAVG

SEQ ID NO: 404 - protein, 532 aa, unidentified
  source 1..532: note = Bacteriophage uvig_35057 from the Index of /pub/databases/metagenomics/genome_sets/gut_phage_database (ebi.ac.uk)
MAKRKITVIPSTINPLTQTPVGSVQKRKVAAYARVSTDSDEQYTSYETQKTYYENYIKSKPEWEFVRVYADEGISGTNTKKREGFKSMITDALDGKIDLIVTKSISRFARNTLDTISYIRKLKSAGVEVYFEKENLWSLDSKSEFVLTIMASIAQEESRSISMNVTLGKRWQMQEGKVSFAYSRMLGFKKTENGYAIDKEQAKIVKEIYTDFLIWGMTSTGIANKLTKRGVKTPSGKSEWSKNNIESILTNEKYKGDALLQKTYVVDYLEHKVAMNKGEITQYYVKDSHEAIIDKAEWDMVQDEIKRRKELGATYSASSIFISKLVCGDCGGIYGKKLWHSNDDYRSERYLCNNKYKDKNKRCTTPALTEKTIIDAFIKAYNSVMVDKNSLIEDAEAIKLLLSDTSKIDNEMDKLNTELQVINGLVDHLVRDNSSRLQSQEEYQKKYDELVTRYQNAKTRYEELSIEKSRKEFQSLRLDMFISKIKESPSLISEWNMEIWSILVDKAIVNSNCSITFRFRNGVEKTIKVKKC

SEQ ID NO: 405 - protein, 444 aa, unidentified
  source 1..444: note = Bacteriophage uvig_35057 from the Index of /pub/databases/metagenomics/genome_sets/gut_phage_database (ebi.ac.uk)
MAETIKINSLPTLPTLLKVAAYARVSNGKDAMLHSLSEQVSYYNRYIQEHDGWQFAGIYADEAISGTKENRDEFQRMLMDAYEGKIDLIITKSISRFARNTMTLLETIKKLKKHNVNVFFEEQNLYSMSGECEMILTMLASFAQEEARSVSENMKWKIRKDFEEGLLWGGNNAYGYRIENRRYVIVPEEASLVKNIFNLYLEGMGITAIALKLNKMNIPAYFGGKWNFSSVQNILKNETYTGDLILQKTFRTDYISKKRKMNRGEKDKFLISNDHEAIISKSDFNKVQEMIKSKSKRYNVPDNCYSHRYPFSGMIECSECHKTYIHRKKHGIDKWGCQSAEQYGRAYCKTSDAISNSTLEEVTAKVLNLDKFDEKVFKSEIFKIISKPNHLLTFIFKDGSERDITWSNPSRSKSWTPEMKEVARQRSLKLYKKRGEDGRWLKEK

SEQ ID NO: 406 - protein, 604 aa, unidentified
  source 1..604: note = Bacteriophage uvig_174247 from the Index of /pub/databases/metagenomics/genome_sets/gut_phage_database (ebi.ac.uk)
MKRKVAIYARVSTEHEAQINALENQIQYYNNILAQHPEWELVGRYVDEGITGTSVKKRKNFLRMMEDAKNGMFSLILTREVSRFARNTVDTLQETRKLKSYGVEVYFTEDNIRTSDDTDGELRLTLMATLAQNESKKTSVRVKAGQKISFENGVLYGNGNILGYDRVGRELVVNPEQAETVKMIFNMYHDGMGCKQIAYELEKRGRITSTGLTHWQPGTISRLLRNSFYCGKIVYRKQYVPDYLEQKKINNYDEVDKIEIMGKHEPIISEELFNDCQRRLDAKTVNRLRGKHAINPPKSAYARILKCQCGSNFERRKWHKYKDGRIRYGFECYKQKNHGSYRTRLKKGLDTTGCCTTKMFPEWKLKIVAHWLFNDLWKERDKIINRAIEMLNATIKDENVVDYTDEVKELNKKRKKYEEKLSNLVELRVEGDISKEVYEEKKGAFKKQIEYIDSELLKRDVKNSAIVSNVKTQIQLLTDLLEKKYDVISGDIPEDIVETFIDQIVVHDDYFEWRLRTSTEPVLCKVEGNAKDNTIIFLENDSHKVATQYRQRLRIRQNNLIHAIDSIELGNFVITKDYLAKYKETDENMKKVNKWNDIKIKVTI

SEQ ID NO: 407 - protein, 515 aa, unidentified
  source 1..515: note = Bacteriophage uvig_163358 from the Index of /pub/databases/metagenomics/genome_sets/gut_phage_database (ebi.ac.uk)
MKAVILARVSSKEQEDGYSLDAQISRLSDYANKKGLEVIKTFTLTESSTQGDRKKFQEVLKFCSSQKETIALIADAVDRVQRSFKESTYLDELRKKEKIELHFYREGMVVGKNASSSDLLRWDFLVIGAKSYVLALAENVKRSINFKIEHGEWCGKAPIGYLNRRNAHGKSEICLDPVRAPIIKKLFQEYSLGKTSFKELANLADKWDLKSNSPKARKLTSKTLYDTLTNPFYCGKMRIKGQLYPHIYEPLISEDLWNKCQEVRLGYKKQPVKYASKEFLYRGLITCYNTGKIVTTDQKRGHINYLICYDKTGKRIYCHEETITKQVQQILDSIIIPEPILTGLNQILRDSKKNEALLHEQAVTSLRKDLDITKKRIENLVDMYLDKKIDDEIYSSKINQLKNEKTSLENKIAAHSVSDDKFNETIINLFDIVNHAGKKFANSSNIEVKRRILKLIIRTMKLDRGNLGYELAWPFSELPKSDDCYLWRTLVDNLRTNHRDKILLIGQQLPYLLTF

SEQ ID NO: 408 - protein, 528 aa, unidentified
  source 1..528: note = Bacteriophage ivig_2547 from the Index of /pub/databases/metagenomics/genome_sets/gut_phage_database (ebi.ac.uk)
MAKVRIIPAQVKQGNRNRQIEESEAKLKVAAYCRVSTLYEDQASSYETQVAHYKEFITKNPKWELAGIYADDGISGTDTKKRNQFNQMIDDAKQGKIDLIVTKSISRFARNTIDCLQYIRELKELHVAVFFEKENINTMDAKGEVLITIMASLAQQESESISRNIKIGLQYRYQRGQVIVNTARFLGYDKDDDGNLVINPEQAKVVKRIFYECLTGKSAIEIARELTKEGIKNGIGRTQWHSSGIIKILRNEKYIGDALLQKTYTVDFLTKKRVKNDGQVPQYYVENNHPAIISRAVFYQVQKLLDMRREGFTTEGGHHHGYTNAYCFSSIVYCGRCKDIYTRCVWYRPRIGEVEKVNVWRCYSRLHWNHKGKRCMGRTITEADLEEASLKAMNELIQQHQLADKQIAANILKVTKGTTGPSLDELDQQLEDQQLLLLNMSTHNKNVEQLTEQVQALRKQREQLIQQEIDHDIKRSNLKNIQSFFQTYQGGLTKFDEKLVRLLIEKITIFKSKIDFTFKDGEVITVKM

SEQ ID NO: 409 - protein, 432 aa, unidentified
  source 1..432: note = Bacteriophage uvig_13765 from the Index of /pub/databases/metagenomics/genome_sets/gut_phage_database (ebi.ac.uk)
METKITKIDALPKLEKKLRVAAYARVSSEKDAMLQSLSNQVSYYNNLIRSTEGWSFVGVYADEALSGTKDTRDEFQRLIKDAVEGEIDLILVKSISRFARNTVTMLETVRKLKAIGVDVYFEEQNLHSLSGEGEMVLTFLASFAQEEARSVSENQKWKVRKTFESGVQWSATKSYGYRVINKKYVVVPEEAKIVKYIFDLYINGLGFQAISNKLQSENIKPFYAKAWNKTSVKNIISNINYTGDLLLQKGYSENFLTKKYVANKGAKDQFLVEDDHEAIISKEIFNKAMDLKRGRAKYFKASRETQIRYELSGKIKCGICGKSFNHRTTKYSQKWICITYNEKGKSVCPSKCVPDAELKRITDKVGLDNIDWVEVFPNNELKIYLRDGTNVIEKWNDYSRKNSWTDEMKAKAREQAIKKSLVNYLKGGNING

SEQ ID NO: 410 - protein, 520 aa, unidentified
  source 1..520: note = Bacteriophage uvig_151707 from the Index of /pub/databases/metagenomics/genome_sets/gut_phage_database (ebi.ac.uk)
MSTFDMNESEGSTKIDKYAIYLRKSRADEEAEKYGDEETLSRHKAILTEFAARKGYYIDKIYQEVVSGETIKDRPEIQKLINDCYVGKYKGILVVEITRLSRGNQGDAQTIMDCLKYSNMNNGILVVTPTKVYDVAHSTEDEEFMEFELFMSRKEYKMIKKRMDRGRKQMVVEGNYMGSRRPYGYTIKKTHRSRYLVPHPDEAKIVKQIFHWAANEKMTAGKIMRKLTAMGVPTYTGSSEWNIATIKDILRNPTYIGKVRWNHRMTVKTMRDGELIANRPRTNHTDHYMLYNGKHDALIDEETFKKAGGEFYSDKTKHRHKLINPFATLITCAKCGKVMGYKADYTKPNVAPRIQHAYSQICKVKSALYEDVQNAIIHGLKMYIEDFTMKLDNLSDTNEDSVHAQLEILRKENKKIETKLDDLFDAWEDKIISDNDFVKRKAKHKARQESILEEMIKLEDSIPEKDEYREKIITLTEALEVIKDETIDANAKNKYLKTVIDSIVFSRENNTEFILDITLR

SEQ ID NO: 411 - protein, 461 aa, unidentified
  source 1..461: note = Bacteriophage uvig_380829 from the Index of /pub/databases/metagenomics/genome_sets/gut_phage_database (ebi.ac.uk)
MERIVRKLDKKILAFAQRKRVAAYARVSSGKDAMLHSLSAQVSYYSKKIQNNPQWEYIGVYADEAVTGTKGSRPEFQRMLMDCKTGKIDLILTKSVSRFARNTVTMLEIVRELKSIGIDVYFEKENVHSMSGDGELMLTILSSFAQEESLSVSENCKWRIRDKFKQGIPTNNAILGYKIVDGTFEIIPDEAKVVKMIFEDYLSGMGRNAIMKKLIRLNIPTKMDKRFNLNGSYDLNAGADLGHNELLSREAQNQAPCWQECMIYTILRNEKYTGDLLLQKSYIMDHITKKKLINKGQLPQFYIGNNHEAIIDKETFKKVQIEIEKREKNKGNPKETYPFTGKIICGQCGKHYRRKISNAGTKYAKPVWICSTFNSYGKSACASKQIPEDVLQQLIPSNFEEIRVTERNKVVIVLQDGSKIEKTWQYKSRSESWTGEMRKKASERRQKREYSKNCDGDSCNA

SEQ ID NO: 412 - protein, 573 aa, unidentified
  source 1..573: note = Bacteriophage uvig_83213 from the Index of /pub/databases/metagenomics/genome_sets/gut_phage_database (ebi.ac.uk)
MKKAVIYSRVSTLEQDYTSQTAELKKEAERMGYEVTHIYEEKESGFVDDRPELAKVLALTNADTDAVFVWEISRLSRRTVMVLSTIEDIEKKGILIYAKNENYRSWNEKGVKDSTSKLVLTLYASIAEAEALKFKERVKRGKRYRVLVEKKSYCNTSVFGYMKDENGRLVINEEEAEIVRDIFNKALEGYSGRRLKLYLKSKWGLDWSANTLNYLLHNTAYMGQKKVGGKTYYKAEKKKLEEGTKIRFFNPETDVVETPAIINSELFNKVQTAITNRKTRSSAKEARNAKPKLLKGLVLCGRCGKVYTNTGRMYTCTSGTNEYSERCGSTSVATASLDSAVWNVTKEIFSEAMAKELAAQKSEPIAAEIARLKEEIEGYNEAISNLKKQVGNLLRIASKADDVADDIIEKINILKKEQQMAKAEIADREAKIALLQKRLDAPAEMTEITDEDEKFEYLHKVIEAVFVYGEHKHKILAIQYLNGITAYCIRLWKDWYWFLDKGELVITDAVALQKNSPVDLKLKDSILIEVTDSNNAYYSGEDTDKEIFGQYTTEGFYAAMMQNKQLKPVAVKK

SEQ ID NO: 413 - protein, 426 aa, unidentified
  source 1..426: note = Bacteriophage uvig_206323 from the Index of /pub/databases/metagenomics/genome_sets/gut_phage_database (ebi.ac.uk)
MWTLSLLQKTLILTPLCGRAMINIVMTFAQLERETIVERVTDNYYFRANNGYWAGGYAPYGYKIKHIIGSDGKKHSILEIDKGKSKIVKRIYNMYINQKISMRKIAQQLNNENIPTLKNGLWGINAVSAILSRPIYTPATAKIYEYFTNLGSNITNDIEYFDGSMTANLYGNAKKNTKVKALRNYDEMYLSLINCSPIISNEDWFKAQKIKGTTKHLPPRTNTSKISFLCGLVKCGKCGRNLVTQGCKNRYGTQYHYLICTNKRNFGASACNNKMIDVSKLEKIVLSDIKQYFNSDSIINKVNKYIKDNESKDIELLTKKEKLENDIVKLNLQIDKLINSIAESNEFTLKYINKKIEEIEIEKQNKLKEISSLNLPNNNNDELLDYIKNINEKLNSNDFNELKILCKALIEKIVVTDKNIDIHYKI

SEQ ID NO: 414 - protein, 477 aa, unidentified
  source 1..477: note = Bacteriophage uvig_404291 from the Index of /pub/databases/metagenomics/genome_sets/gut_phage_database (ebi.ac.uk)
MAGVKNITVIPAKKRVGNTVTAEDKPKLKVVAYCRVGTDSEEQATSHDAQVTHYTEFIRKNPEWEFAGIYADDGISGTNTKKREEFNRMIEDTMAGKIDMIITKSISRFARNTLDCLKCIRQLKEKNVPVFFEKENINTMDSKGEVLLTIMASLAQQESESLSKNVKMGIQFRYQNGEVQVNHNWFLGYTKDENGHLIIDEDQTIIVRRIFREYLQGASLKTIADGLMADGIPTATGNKKWRGDGIRKILTNEKYMGDALLQKTYTVDVLTKKRVSNNGIVPQYYVENNHEAIIPRQLFMQVQEELFRRAHLKTEGGKTKRVYSSKYALSSIVYCGKFGDLFRRVAWKARGASYNKWRCASRIEKGPKEGCDADAISETEILNAVVRAINKTLGGREQFLVQLQHNIEDVLNGDSTATLEYIDKRMAELQEKLVMCVNKNAEYDVIANEIDALREKKAAVVTRDGEQEMLRKRIDEM

SEQ ID NO: 415 - protein, 516 aa, unidentified
  source 1..516: note = Bacteriophage ivig_756 from the Index of /pub/databases/metagenomics/genome_sets/gut_phage_database (ebi.ac.uk)
MSYCIYLRKSRKDLEAEQHGEGETLARHERALLSLAKKNNLIISNIYREVVSGETIAARPVMQQLLHEVEQNLWHGVLVMEVERLARGDTIDQGVVQRAFQYSNTLIITPSKTYDPANEFDEEYFEFGLFMSRREYKTIKRRMQNGRYAAISEGKWPYNSAPYGFRRTKLEKEKGWTLAFDENEAPVVRLIFSMFTGPERVGIRSITRTLNSYGTKPRNSKLWSESTVRGILSNVVYDQCVKIGERKVVRTIENGVLTTARPRTNDYTIVSGRHPRLIDHDVFAEAQSYLGCGSPKPAGSNIIKNPLAGIIICSECKKKMIRRPPSGTASRVPYDLMLCSTYDCPTIGSPLDLVEREVYNALSDWVEGYRLSGQMPSKSLIPEKEVLLESAQQTLDQLLRQKGTMYDLLEQGVYSTEVFLERSDSLQNRISEAESNVAQLKLELDKERQREANIEQFLPACEDLLSCYWDLSIPERNRLLKLLIESIEYKKLTKNKRGHLNEPNFELTIKPRIPRK

SEQ ID NO: 416 - protein, 462 aa, unidentified
  source 1..462: note = Bacteriophage ivig_2327 from the Index of /pub/databases/metagenomics/genome_sets/gut_phage_database (ebi.ac.uk)
MGDDMKEKIPRCAIYDRVSTDLQVKEGLSLEAQRQALTDYAISHGYKIVGYYADEGITARKKMQNRKDLVRLLNDVKSDKIDLILVTKLDRWFRNVKDYHNTQAILEAHGCNWKTIFEEYDTSTSNGRFAINIMLSVNENECDRDSDRIKSVFEYKKSRKEHLNGRPGYGYIADENKKLIKDPATQHIVEDTFKHYFSTYSKNATIEYILDKYSGDPNAPTMYQVNRILTCETYAGRKYGIDNYCEPYITLKKHEQIISVCDAKIIPHQNEPFLFSSMIKCPICGRNMSGFTKKHTLKNGEISKYKRYRCEAKFTEFHNGACITESVIESYLLNNIMGELNKELLQIKTREKENKKKPASNPVKIQEEINRLNVMYQKGRIDDEYYDKQYSKLKQKLSDAQHPQKVTSLEAYKPIIQTLNDGWMEMYHTLDIKHKKAFWKGLIEAIYIDKESRKLCGFKFLL

SEQ ID NO: 417 - protein, 506 aa, unidentified
  source 1..506: note = Bacteriophage uvig_554333 from the Index of /pub/databases/metagenomics/genome_sets/gut_phage_database (ebi.ac.uk)
MKAVIYARYSAGSGQTELSIEGQLRECKKYIEKKGYALGEVYADRHVSGLSTKGREEFKRLMDDAKAHKFDVVVCYDTSRFARDKFDAVVYKTELRKRLGIAIEWATMNVEGPEGVLLEAIMEGWNQYFSEELSRKTKRGMAEAASKGLSLGSRPPLGYTLKDRRFVVNEAGAEAVREVFKAYTGGASFADCARMLNGQGFRTATGKLFNGSAVRYMLTNKKYLGIHGGASGVVPAIVDPEVFQAARDRIGERPPKSVKHDFALVGKLTCGCCGSRMTGTSTLSKGRRYYYYKCSNKCAGQPVRQDKLDSFVAACAQEVLSKPETVKEVAARLFAYQKKENPLESKIEALGKSLKSLDMKIDNLTTALAERPASKALLTRLDDLEEQREQVQRAIEAEPEQEPCRILSEQAIADGLTGLLAPLSDPDRIHSQERWILDSLVEAVELTPDEVLITYATDSIVKRDQEGQVSKKVLIGTPDSTFFETMELYTAPGAVILSCSRSAASF

SEQ ID NO: 418 - protein, 473 aa, unidentified
  source 1..473: note = Bacteriophage uvig_257872 from the Index of /pub/databases/metagenomics/genome_sets/gut_phage_database (ebi.ac.uk)
MRIGAAYIRVSTDDQLDISPESQLDEIQRYAKSHDILIPEEYIFMERTGRSGKRADNRPEFQRMIATAKEKPQPFEVILVWKFSRFARNQDESTFYKGMLRKKLKIDIESVSEPIMEGMYGRLIEMIIEWQDEFYSYNLGVEVKRGMAKKAELKGYQLVPPLGYAAVGNGKPYVIREDEYKIVEMIFHMYAVDRLDMTAIARQLNASGYLTRRGNPFEKRSIDRIIQNRFYLGTVEWNGFSFEGMHETKPSVTKLFEQCQERRKAEFRPMRHRNVSTCKHWLSGLMRCSVCGATLSYTGSGAVPYFTCWKYSKGLHPESCSISVKKMERIVLRSLDGILESGHFEYTPAASASGSPANLSNEIQSQLDRLRHQEERARIAYENEVYTLDEYKESKARLRSEIQRLSDELQRLLEQPAESAPPQKELLDRVRNVRDLLASPSVGFETKGNALRSILKCIVFDRKTEHFDFQYYA

SEQ ID NO: 419 - protein, 491 aa, unidentified
  source 1..491: note = Bacteriophage uvig_210496 from the Index of /pub/databases/metagenomics/genome_sets/gut_phage_database (ebi.ac.uk)
MYLRKSRAEEGQSTEEVLAKHRAALEELADRLGLPVDGVYEEVASGEKLYARPEMLKLLERIRAGEVEAVLCMDIDRLGRGGMADQGTILDAFRESGTLIITPEKTYDLTNDVDIEMTEFKAFFARAEWRAIRKRMRRGLMQTIEAGGYTANAPYGYRRCRIGKLPSLEVIPEEARFVRYIYERYLAGIGAQTIAQELNAMGSCPRRGAEWNRNTVRHVLRNPTFAGKVAWNRVKHYRPGAHGKDKHHVVYTPEGEWLMVDGVHEAIIPWDTWLEAQERRKQRYIPPSNTGQRANPFAGIIRCSKCGNNMQRMGTNKGEPYLLCTTKGCTAGAKFEYVEERMVELLYDELARLRLLIDSGAAPNVDALEAALAAAQREQERVQARIPRLYEFLEDGTYDRSTFRSRLEAAEKELAELANKRADLERHIDERRRSDPRKAAAALENLVQLYPTMSPADKNSALKALGVEVTYTKEKKTKPRDFTLELQLRDF

SEQ ID NO: 420 - protein, 487 aa, unidentified
  source 1..487: note = Bacteriophage uvig_151237 from the Index of /pub/databases/metagenomics/genome_sets/gut_phage_database (ebi.ac.uk)
MNDIKRGALYIRVSTDDQTEYSPDSQIKLCYKYAKEHNIEILKEHIYQEDGISGTNVEKRTSFKRMIAIAKKKPKPFDVILIYSFSRFARNREDAIMYKSLLRKKLGIDVVSITQPLSEGKESILMEALYEAMDEYYSVDLAEQSIRGKIEKASRGEHQGGTPYGYIYNKNTKTLYPDKEKAEIVKLIFKEWIKPEQSIRGLCRMLNDMNILTTRGCKWSDRSMYLILQNPAYIGYSRFTVGGMKRNYKHPNTITAKGKWEPIIDMETWNLAKQKMDDHDKKWFKYKKHYTKNEFWLRGIVKCSDCGKSLVRCNVKGKPVPFFQCTGFTKGRCQDSHYIRQDQLVPAILEQIKKDYTYKLNIKITEGKDTPQYDQISIIKKNIEKLKTKRERIKEAYINEIDTLEEYKENKKKLDNEEKQLKEQLKELNYKEKQEVRKEKTYELCKTAYEILSDEETSFDLKDDVAHRLFDHITYNKKENTLEIVYK

SEQ ID NO: 421 - protein, 553 aa, unidentified
  source 1..553: note = Bacteriophage uvig_206100 from the Index of /pub/databases/metagenomics/genome_sets/gut_phage_database (ebi.ac.uk)
MKKIETNQPTVERGVIYARYSSSGQREESIEGQLRECRIYAEKHGITIVGEYCDAAMTGTNDKRPQFQRLIRDSAKGQFTVAILWKIDRFARNKYDSAIYKHKLKQNGVRIVYAKESIPDGPEGIIFESLMEGFAEYYSANLSQNVKRGLYDSALKLQTLGQTAYGLRKGTDGKWEHNPAQAPIVKRIFEEYVAGRSIISIYKQLNAEGYRTLNGGMFNKNSLRTILKNEKYCGVYQYADIRVEDGIPAIISKELFAMAQQMIKKNHEKPAAKKEDGGFLLSGKLFCGHCGELMTGDCGTSKLGRIYRYYTCINRRQKKCDKERARKEWIEDVIVHKLAEIANCDDVIDEFADRYMEWQDKQKPMSSELEDRLKKVEAALQNNMSLVDSGFISESVKNHIMQLETERTQLEQGILKERLNSPKLTRQQVVYFLKSFRKGDINDISWRIYLVDTFLQAAYLYDNGNLILSLNFSGDNNKITLNIAEAAVVGGEQMCSDFAHSCPPKESLDVIYAFEAFFFCIRYKDELFCGSRKHDNRFIDLGKCRGSYVVFKR

SEQ ID NO: 422 - protein, 522 aa, unidentified
  source 1..522: note = Bacteriophage uvig_134660 from the Index of /pub/databases/metagenomics/genome_sets/gut_phage_database (ebi.ac.uk)
MNNTYTLENVIIYLRKSQSDDPAMSVEEVLKKHEDVLQEFCENEFGKRIPEKQIYREVASGETIEDRPVIQAILKLMETDSLKGVIVVEPQRFSRGDLQDCGRIVNALRYTNTLAITPQKTYNLNDEYDRKFFEMELTKGSDYLEYYKKIQRRGREASVKKGNYIGSVTPYGYNKATYMDGNRTCHTLAINQIEAEAIRMMADLYLNKGYGFTKIARALDEMGYKPRKSEKWSPAAIKDIMENPIIIGKIRWNRRKTIKKLCDGEITKSRPKAQDYILVDGKHEAILDEETYYKILDKRGKNPRLRKSKELTNPYAGLLFCGTCGRAMSHKKYKQRKSNTISESMLCNNQANCHTKSVMYSSFEKSVIESLEKAIADFEVKLQNNNGDITSLRASRIKTLESELKTLLEKDERQKDNLDDGIYSKEEFLKRNAKVQEQIETTKKALSQVKDSILPEIDYKEKIVRFQDCLNALTDPNVSAPRKNMLLKSCIDKIVYHNDSESKAGIGRYVDNPFKLDIFLRL

SEQ ID NO: 423 - protein, 526 aa, unidentified
  source 1..526: note = Bacteriophage uvig_234005 from the Index of /pub/databases/metagenomics/genome_sets/gut_phage_database (ebi.ac.uk)
MNFGIYGRKSYFVDTSESTQMQFDVCKEHIRLHFPEEEISSITLYEDDGYVRSDMDRPGMNQLKEDIAAGLIDCVIIYKIDRICCDMMDFCVFYSFLKEHEIKFITVKDGIDTTTPLGEAMMYLAVIFSGLEVRTDSLRITDNMNHLAESGFWCGGRPPIGYSITTVDLGPKSHKTLEFNQEEIDYKNNLVRIFLDNNFSLQNMETYCKNNGLTTLNGKFLSTTQLYSMFTSPHCVEDTAAMYDYFEAKGCQMTSPREEWDGSHGIIIYGRTMEKKVNGKKKHQLAPPENWRVSIGYHLPYMKAETYFQLQAQFGHNIFSKKPKYDLPLLKGSLRCKCGRMMSMSRKKKVDGSVSTWYYCPKRMRSGVDACDMGHIKSDLLDEKVLDVFREIKHDPAAIRKYVKGIDKKPKDNSVTLRTKMQQCQDKIEKLTAALAANSESAAAKYIVNEIEKLDCEYNNLKRKAASQSAEERRAAVKYKNAMEKRDEIIRLLDDFDNFSADERNAIARDVLKECKWDGETLFIML

SEQ ID NO: 424 - protein, 524 aa, unidentified
  source 1..524: note = Bacteriophage uvig_146622 from the Index of /pub/databases/metagenomics/genome_sets/gut_phage_database (ebi.ac.uk)
MLKYNSETNLDSDIDSDIDKYAIYLRKSRADLEAEKIGDGETLARHKKILTDLAARKGLYVSKIYEEIISGETIEARPEIQKLIQDCYDGKYRGILVVEVTRLSRGNQGDAQTIMDCLKYSNYNKGLLIVTPTKTYDIVHSQEDEEYMEFELFMSRREYKMIKKRLERGRMQAIVEGNYMASHRPYGYNIVKTKTGRTLIPNKDEAPIVKLIFDLAADNVPLLTIARHLKDMGVPTYNGDYYWSRVSVKRILENPVYIGKVRWNNRTTIKTMVDGKIETRLTTLNKNHYMEYDGKHKKYALTDEETFAKVNSRLTETRTKYDYKLVNPLAGLLRCKKCGRVMNLRTYDSRKYNVSPRYNHDGSPYCKLSSVMYTDVIDTLIRALELYIEDFKIEINNDFQHDDTNIQMQIQTLKREETKLKQKITKLFDSWENGILNDNEFIERKVINNESLENIQRQIRDLEKSIPEKIDYKEKIILLSNAVESLRDDTVSAKIKNDYLKEIISTIEYSRERPGEFILDIELL

SEQ ID NO: 425 - protein, 523 aa, unidentified
  source 1..523: note = Bacteriophage uvig_356610 from the Index of /pub/databases/metagenomics/genome_sets/gut_phage_database (ebi.ac.uk)
MAKSVTTIPATLSRFTAAPINSTKKRRVAAYARVSTDNEEQLTSYEAQIDYYTNYINGRDDWEFVGVYPDEGITGTNTKKREQFRQMVADALDGKIDLIITKSVSRFARNTVDSLTTIRKLKEHNVEVYFEKENIWTFDSKGELLLTIMSSLAQEESRSISENCTWGQRKRFADGKVTVPFKRFLGYDMGPDHNLVVNPEQAKLVKRIYGMFLQGQSPFQIARTLTEEGIPSPGGKDHWNPSNIKSILTNEKYKGDALLQKSFTVDFLTKKKKTNEGEIPQYYVKDNHEAIIDPETFEMVQTLMTTRTKGRNRKSSVSIFSSKVKCGDCGSWYGPKVWHSNDAYRKVIWQCNHKFDGQKCATPTLTEDEIKELFLRAANQVIDQKEQFIAIYEQVLSRSLDTTALESELSDLEAEINIAAELIEECIKENAHVALDQDEYQKRYDALVARFDKAKARHTEVTDLIAERMARKHQIESYLKELRSREPLTEFRETDWLAMVDYITVHSKKDIRVTFKDGTEIKA

SEQ ID NO: 426 - protein, 584 aa, unidentified
  source 1..584: note = Bacteriophage uvig_243310 from the Index of /pub/databases/metagenomics/genome_sets/gut_phage_database (ebi.ac.uk)
MSNIYQLRELLRTQTIYDLPLRVAYYARVSTDHDEQKTSIKNQDDYFKELIKSKPNWKFMGGYIDEGISGIAVKKREDFLRMIDDAKNGKIDLILTKEISRFARNTLDSIKYTRELLACGVCVWFMNDGINTIDEDSELRLTIMAAMAQDEIRKMSSRIKFGQAQSIKNGVVMGNSRLYGYDKKDGKLTINEAEAEMVRFIFESYASGNWTTPQIERYLYEKGYRNYNGGKINRGVIKNIIKNPKYKGYYAGGKVKVIDMFTKKQMFLPKDQWVYYKDDGSTVPQIIDEKTWEDANYYMKSRGDNIRSHRTVFKYGNVFTGKVICGIDGASYWLREHKIRGKESDPRWVCSHKIKNGANSCLSVPVRESDLKQMVASAISQAAGNSKDVIDSYMNYYLKAIDDSKEKEEEIAVLRKNIESTKLKMEKILDYNLNGSISDDEFLKRNAAYKKEIENAEEKILKLSKKPEEPDSIARKIEQIREYLANTEIVSADDITKQIVEKLIEKIVILPEEEKGMKVIKSEIYLINKELYKFRKEMGTKTSCSDNVTLIMFPKQRMEITNENAHCVNQYKRFSIEFSLFVRF

SEQ ID NO: 427 - protein, 525 aa, unidentified
  source 1..525: note = Bacteriophage uvig_278686 from the Index of /pub/databases/metagenomics/genome_sets/gut_phage_database (ebi.ac.uk)
MQAAKNITVIPATRMMHTGLPRNAAVRKRVAGYARVSTDSEEQQTSYEAQVDYYTNYIQSKPDWEFVTVYTDEGISALNTKHRDGFNEMIQDALDGKIDLIVTKSVSRFARNTVDSLTTVRKLKEKGVEVYFEKEQIFTLDSKGELLITIMSSLAQEESRSISENVTWGQRKRFADGKVSIPYGQFLGYRKGADGLPEIVPEEAETVRTIYRLFIQGKTTNAIAASLTRNGVPTPGGKEKWQATTIESILTNEKYKGSALLQKKFTTNFLTKKMKPNEGEVPQFYVENSHPAIICPEEWDRVQNEMLRRKATGRHQNSLSPFSAKLICGDCGGYYGSKVWHSNSKYRRTIWQCNGKFKGVEKCRTPHLYEDDIKAMFLKAVSELMIDREALIDDGRVLHTAFTDFNAIDKEVAEITSEIDVLSGLVQKLVDENASTTLDQTEYRSRYDGYIDRYDKAKKRLAALQEQRQLQELKGDILSGFLFELGELYDLPMVFKDETWNALVDHVTVHKGGRVVFTFKNGTEV

SEQ ID NO: 428 - protein, 553 aa, unidentified
  source 1..553: note = Bacteriophage uvig_441833 from the Index of /pub/databases/metagenomics/genome_sets/gut_phage_database (ebi.ac.uk)
MQYDKADQQNCPRRVVFYGRVSTELEAQISALKNQMNWYLELAEHHPNWTVVGQYADEGISGTGMKTRPSFMKMLRDARKKKFDLIVTREVSRFARNTVDTLVTTRELKQYGVEVYFVNDDIWTMRGDGEVRLTIMASLAQDESRKMSERTKAGIQTSQKKGTYVAGPTPFGYKRDKKAHTLVVQESQAETVRKIFAWYADGINGTEIAQTLTQEGAPNKSGMPQWSARQVLSITKNTIYKGYLTYNKSHIDDFLSHKSIKNSEQDYILVKGSFEPIISEELWDKCQRRRHAWQSYIDGNITQAYLYGKSEHADKWACRLFCGCGARMRAFRAEKGIVRYICYQRSLRNVAPKCSAPNVQAWKLELMAREIYKNVWQDHRQDILEEYQQEQENGAADSEKVEEALSWQESFPNDEISRKFLDRFVPRIFSIDGQKFIWELNLFQESCTVQCNVRGTYNYHSISAEKIMPGKTKAKKGDGAVNRILEVANSTRFWVHTYDDDPISRLLSSRLAADLPASITIKLNYEQARAYRNSRGYVLWPGNWKDLTVKVLL

SEQ ID NO: 429 - protein, 536 aa, unidentified
  source 1..536: note = Bacteriophage uvig_584681 from the Index of /pub/databases/metagenomics/genome_sets/gut_phage_database (ebi.ac.uk)
MKLTHGAYILARFSTDRQDADSIEVQVSRCREWCDRQRLPVLDVFADEAVSGMKETRPQFDRMMRLLSEGGADTVVIYDQSRMFRKMTAWFTLRERLERLGVRVVSVTQPMIGGDLRDPATFMSEGGMALMNQMWVLQTRQKVCEKMRWMAEQGKYTGGVPPLGYVVIDGRIEVCEPEAETVRIIFGDYAAGRSYREIIQRLNAEGRRTKSGGTFGSNSLHDLLKNEKYIGVLTYGRTQKRPDGSRNSHAVASTVMRMEGVIPAIVDRETWDIVQEKLMANKRKQAGRPVRVREYPLKGKVFCGECKASMSVTCSQGGYYYYACSEKKRKKTCDNMPIKVDDLERMIAEAIKNMLGNPENVDGLICILREERGKIQEQTAMRMKALFDRQAEIKKQLDAAMSAVLAGMHSQSLIDTVHALEAEQAQNDREMTTLHNQAQGTTIPEDRLRELLKVAANDIPALLSVVVRVEVGKDRIRVWTLLDAKPDGTFDFNTDWDDPEIGLIIIPGVAPPVPRIIINGGLLCFSLPRPKKNRAE

SEQ ID NO: 430 - protein, 475 aa, unidentified
  source 1..475: note = Bacteriophage uvig_441567 from the Index of /pub/databases/metagenomics/genome_sets/gut_phage_database (ebi.ac.uk)
MQEELSPDAQLRLIREYCDRHNYILPEEYIFMDIGISGKKAEKRNDFMRMISLAKQKQGSPFEAILVWKFNRFARNQEESIVYKSMLRNKCNVDVISITQTITEDIYGGLIERIIEWTDEFYSIQLAEDVTRGMTENALRGNFQASPALGYRVIQKGVPPIVDEDQAAIVRTIFKLYTSSTMGFYEIARHLNSLGYKTRNKREFEARGIKYILQNPIYKGYLRWNYSDSSNKEIKPESEWIIRKGNIKPIVSEEIWTLANDRIKTEYRPRGGKPITQKRHWLSGLIKCSSCGASLSTSVHRDKRYGRIYTNFQCYRYVKGKCLVSHGISEKKLVPLVLSALEEDMNKSSIECEYIPPESVTNDLDILKSQLKKLDAKEDRIKEAYQSGIDTLEEYKENKLKLKKDREKLSVEIQKQEEQKPEVIDMPDRIRGVYNILTSDQCNKDEKYAAIRSIVKKIVFDRENKLIDIYYYTSV

SEQ ID NO: 431 - protein, 577 aa, unidentified
  source 1..577: note = Bacteriophage uvig_3575 from the Index of /pub/databases/metagenomics/genome_sets/gut_phage_database (ebi.ac.uk)
MPTSKNTARKYAAGGGSDNSCGVEPLRAVIYARYSSSGQREESIEGQLRDCYEFAKKHGIIVIGEYIDKAMTGRVDRRPDFQRMMKDSEKGRFNCVLLWKMDRFARNRYDSAMYKYKLKKNGIRIFYAKETIPDGPEGIILESVMEGYAEYYSENLAQNVKRGNYDSALELKTLGKTCLGLKTGPDGRYMIDQAEAAIVRRIFEEYAEGERAKDIYERQNSGGYRTGRGGKFNKNSLRRILSNKKYIGVYEYEDIYVENGIPAIITDRDLFERVQKMLKINHDAPARGKAQNFLLTTKLFCGLCGSPMIGDGGTSHTGKAYAYYSCTKRKRGRSCKKESVPKDWIEDLVVGELVKIVHNDELIEQIADRVMEYQKREKDQSGLHALEIRQKENEKAISNMLAAIEAGIITPSTKTRLMELEADRADIEKGIAHELLAEPEFERDQIIYFLERFRSGDINDEAYRIMLVDTFLNSVYLYDDDHLVLVMNYSGENCKVDLKLVEGAVSGDGCKGSAFAPSSALETRKASQMGCFFVSKRLRLLNPWVQGLLAINGSSVGSVGKRSTGPFSDSTSPHLPR

SEQ ID NO: 432 - protein, 520 aa, unidentified
  source 1..520: note = Bacteriophage uvig_195822 from the Index of /pub/databases/metagenomics/genome_sets/gut_phage_database (ebi.ac.uk)
MLTNYLIYLRKSRADNPDMTVDEVLAKHETILQDFARSEFGEEIPERFIFREVVSGETIAARPIMQRLMQLLESSNVKGVLVVDPQRLSRGDLEDCGKIVNVFRYTGTQVLTPQRSYNLADEYDRKFFEMELTRGNDYLEYTKKILYRGRTASVKRGNYIGSVAPYGYKKITVGSGKDVQHTLEVIPEEAEALRLMCRLYLDDGMGFRAIAHQLDALGFRPRKAPQWSPAAIKDMLENPVYIGKIRWNWRKSEKKMVNGEITLSRPKNKDQHDYIYVDGLHEPIISEDVHRAILAKRGTNPCVRKGSELKNPFAGLLCCGSCGHAMSLKRSTYKRQPGRMTESFLCDNQSNCHTKSVLYAALYDRVVQTLEASISDFEILLKNDDDGFQRSNLAIIQTLESEIEKLHAKDMRQKDAFDDGIYSKDEYLSRNAKVQEQLEKAHQALQEARLATSPIIDYQEKIARFTDCLSALRDPDVSAAEKNKFLKTCIKKITYHNHMESKAGIGRYVENVFDLDIELL

SEQ ID NO: 433 - protein, 561 aa, unidentified
  source 1..561: note = Bacteriophage uvig_386577 from the Index of /pub/databases/metagenomics/genome_sets/gut_phage_database (ebi.ac.uk)
MQKSIDKIYYAAIYLRLSKEDGDLSSGEKKESNSIANQRKLIEDYLSRNPEITLVQEFCDDGYTGANFDRPDFQRMMEQVKTGKINCIIVKDLSRFGRDYIDSGRYIEKIFPSLGIRFIAINDNYDSAQSQQVGNEIILPFKNLINDSYSRDISIKIRSNLETKRRNGEFVGSHVVYGYRRSDDDKNKLVIDQTVAPVIQSIFSMKMDGFSPAQIADKLNKDGVPSPYEYKRQSGSKYQSGFKKQIQTDWGAKAIYRILKNEMYTGTLVQGKTTTPNHKIKSRTTKDEADWMRTENAHDAIISPSIFDMVQKLMLEDTRSPSGDNSVHLFSGKMFCADCQSTMTRKKTKSAGKEYVYFVCNANKVDRKVCDAHTVKEQVVYDAALAVIQAQVSLALNLEIALGELNGISWERREMERIASKIARQEEVIEHNKQMKAHVYEDFKTEMITREEYFIFKAEFDKNIQEAKEAIARLVGNKNQISSGLTEQQSWLAQFREYENIQELNRRVVVNFIDRIEITEDKKVHVVLNNADQFQAIMEFLEEEKAKANAKKVISFIREVS

SEQ ID NO: 434 - protein, 522 aa, unidentified
  source 1..522: note = Bacteriophage uvig_381373 from the Index of /pub/databases/metagenomics/genome_sets/gut_phage_database (ebi.ac.uk)
MLTSANVIIYLRKSRSDDPSMSVDEVLAKHESILQEYAINNYGSPIPEEQIYREVCSGETIADRPVMLQVMRLIEARIYGGVLVVEPQRLSRGDLEDCGKIINAFRYTETLVVTPPKTYDLLDDYDRKFFEMELMRGNDYLEYTKKILFRGRMASSKQGNFIGSIAPYGYRKVVVGSGKDAYHTLEIEPTESEAVKIMYHLYLDESYGFKKIANRLDELGFKPRKVDHWSAATIQNILENPVYCGKIQFNRRSTKKKIVDGELVKTRPLVTDPEKVVYVDGKHPALIDEARFQETMERRGKNPRVRKSKELTNPFAGLLFCGTCGHAMSHKKFYQHYKKSVCENMLCNDQARCHTKSVSYDAFVNRVTTSLEETIANFEMKLKNGTPSDAMMHQNQIRNLENELQHLKQRDTRQKDAYEDGIYTKEEYAQRNAKLQEQIASTTASLKAAKESSGNIIDYQEKLCRFRDALNALNDPDLPASKKNTLLKACIIKIVYYNDMPSLPGIGRYVENVFKLDIFYKL

SEQ ID NO: 435 - protein, 529 aa, unidentified
  source 1..529: note = Bacteriophage uvig_100318 from the Index of /pub/databases/metagenomics/genome_sets/gut_phage_database (ebi.ac.uk)
MAKVTVIPSTINPITKLPNNGLQKRKVAGYARVSTILDEQCSSYQAQVDYYTNLIKRNPEWEFVEVYADEGISGTNTKRRGGFNQMMQDALDGKIDLILTKSVSRFARNTVDSLTFIRKLKEKGVEVFFEKENIYTFDSKGELLITIMASLAQEESRSISENVTWGKRKAFSDGKVSMPYKHFLGYKKGEDGRPTIDEKESLVVKEIYSLFLKYGYSTTKIAKEFNERGICTPSGKGKWTLTTVESILSNEKYKGDALLQKKYVVDFLTHRSKPNEGEIPQYYVENSHPAIIDKVEWDLVQIELERRKKLCKTYSSKNIFSSKLVCEDCDSFFGRKIWHSNDEYKAIVYQCNGKFKNKDKRCNTPTLREEEIKSMFLEAYNKFVLDKTALVGDCKLMIETIADVSLLDEQISKQIEKLEELAKKVKELVSSNASTPELQIDYINDYDKLCTMHSIEETRYKLLLKEKSGRLAKAKSMELFIESIKDKADVIDSWNSDLWILLVDKAIVHHDKSITFVFKNMKEITIAAK

SEQ ID NO: 436 - protein, 355 aa, unidentified
  source 1..355: note = Bacteriophage uvig_206650 from the Index of /pub/databases/metagenomics/genome_sets/gut_phage_database (ebi.ac.uk)
MVQKDSKQTEIQNAYARENHVEHIPATLHLNAKEDFAKAIRVAPYVRVSTDSTEQQASYELQYQYYQEYVANHPGWILSQVYADDGISGTSTKRRAGFRQMIQDCIDGKIDMIITKSISRFARNVVDCVETVRQLKALEHPVAVYFEDIGINTLTQTGELLMIVMAAIAQGESETKSSSIKWGFQKRFAKGLPKLADLYGYDREKRVLTINPLESAVVKLIYQMILDDRTISEVADILNLQGIPSPRGARWSYSTVHGILTNEKYCGDVLMQKTVTIDLFSHKSIRNDGRADQFYLQDYHDPIVSKDVWNEVQKILNGELPSVIPSLDAVTDMQDATPDILSDFCVVKPRKEFKK

SEQ ID NO: 437 - protein, 529 aa, unidentified
  source 1..529: note = Bacteriophage uvig_192865 from the Index of /pub/databases/metagenomics/genome_sets/gut_phage_database (ebi.ac.uk)
MPKAKNVTVIPATLNIHTKTPTTERVRRRVAAYARVSTDSEEQLTSYEAQVDYYTKFIRENPDWDFVEVYTDEGISAVNTKHRDGFNRMIRDALAGKIDLIVTKSVSRFARNTVDSLTTIRKLKEAGCECFFQKENIMTFDSKGELLITIMSSLAQEESRSISENVTRGQRKRFSDGKVSIPYGQFLGYRKGADGLPEIVPEEAEVVRRIYRELLQGKSTNAIAAMLTEEGIPTPGKKTVWQRATVESILRNEKYKGSALLQKSFTVDFLTKKTKINEGEVPQYYVEDSHPAIIEPWEWEQVQAELERRKNSRTRHRQTSPFSGKIFCADCGEIFGSKTWHSTDRYRRIVWQCNGKFKREHKCETPHLTEERLKELFFAALGEYLSDRNAAIDRLRYAQRMLTDTDFIDADIQALEEELTTITGMLRLCIAENAANTMTEETYRTTHDELCSRFEETEAKLAVLQKQRDKMKADAIAIGGMMFKLGELESLPLTFDEKLWNGTVDHVTVHADERVVFRFKDGKEIVTRL

SEQ ID NO: 438 - protein, 496 aa, unidentified
  source 1..496: note = Bacteriophage uvig_416748 from the Index of /pub/databases/metagenomics/genome_sets/gut_phage_database (ebi.ac.uk)
MAEKAVIYARFSSDKQREESIEDQVRVCSQFATSNGFEIVKTYTDEARSGTNAAGRPGFQKMVLDAQAQRWTKVIVYKTDRFARSRYDSAVYKAKLRKCGVEIVTAAESVPDGPDGIILESVLEGMAEYYSANLAQNVKRGMEGNAIKCKHNGVSIFGYDRGADGYYAINEHEAAGVRMAFDMCAAGETKAEIMRRLNGLGYKTVTGRQFSNEAVSRLLNCERYIGTYTWGDFRKENGMPSIINRDLWDSAHAHMASRGRKRRGKMNADYLLSGKIYDANGNQFESDCGYGENGKQYHYYRCRKTKVSMRRDEVEDKVIGACARLLNENPDLDERIVDMVLARQDKDAEQEIAAREALRHRITDVEREIDNAIDLACKLGSTDRMAVKINGLQDELTALKAELDEIKRGAPLIDRDMILFALYKMRHSDGPRGMVAAFVDRVTVNEDGSLLVQFILCRPTCENKKPEPSNGEFGKLSCGSPYQIRTGDLRLERAAS

SEQ ID NO: 439 - protein, 571 aa, unidentified
  source 1..571: note = Bacteriophage uvig_495199 from the Index of /pub/databases/metagenomics/genome_sets/gut_phage_database (ebi.ac.uk)
MICVDQNGQAVEISVADQMWLDDAYFKEKQMRLEPNAPRAALAYRVSTKGQVDHDDIPMQKIDCRKFAQKQGWRVVKEVAEKGVSGSKVSASKRDAIQQLKEEAANGEFDILLVYMFDRLGRIESETPFVLEWFVQHGIQMWSTHEGQQKIETHGDKLMNYIRFWQAAGESEKTSIRTRDRIRQIVSSGHYTGGFVCYGYQLVDQGRRNKRDKPVMDLVINEEESTWVRELFYKVIQEGASGYALAEMLNNRGLRTRAGAKFQSSNIIRIIRHEGYTGYIITKNARSEYIPELQIIDRETFDKANDIINRRKAKSEQERKIAHTSQNPTLLAGIVYCAHCGAKMSGFMHTDRYKLADGSIREKVQPKYNCFQRGQRNKGGRDCDGQALYLAEKVDAIVLQAVSKIFEQIRDTPYSRMAENRIRQESNLQKSKRASVEKKIKTAQHALERFEGEILKCLDGTSNFTEDMIAKQIRRYQQELDDAKAEYAALQNARLNEAAEIRKLRTYYDEFRGWAEEFDAAPLEIKRMIQSQLIERVEVGRKYQVTIKLNMEYQQFLEITEEQKLIPLISA

SEQ ID NO: 440 - protein, 490 aa, unidentified
  source 1..490: note = Bacteriophage uvig_305979 from the Index of /pub/databases/metagenomics/genome_sets/gut_phage_database (ebi.ac.uk)
MKIAAYCRVSTDKDEQLDSLEHQKQFFSEYAEKNGHRLIRLYADEGISGTSLKKRNEFLRLMKDAKLGLFEAVVVKDISRFARNTVDFLQSIRELRALGINTLFITANMESLGESEFVLTIFGAMAQEESANLSKRVKFGKKINAQKGRVPQRIFGYDRIDNFTLKINYQEAQTVREIYRLYLKEGLGCRTISLRLNQQQRKTKFHCDWNPRGVRRVLTNPIYCGHYVNHKYEIEDYLTGKQIHIPQEEHFHHERPEWAIITPEVFAKAQKQLEERRTKYDCGEPFKGARYSTKHLFSTLIKCEHCGRSFCRKDYTYVKTRVYWKCTTNDQFTAERCDNTIKLEEADLLAEIRAYFGALIHDKDSFIAGILAAVERQAGGEKNPYDKARIERRQGELLAKKERYQEMYANDVMTMAELKEKTALIAEELEELDYDLRQYEHSLEVRQNAGHFVEQYMQEIERFLELETVTNMDLRRIIDHISVNKDGNVR

SEQ ID NO: 441 - protein, 496 aa, unidentified
  source 1..496: note = Bacteriophage uvig_291363 from the Index of /pub/databases/metagenomics/genome_sets/gut_phage_database (ebi.ac.uk)
MKRLRVAAYARVSSDSEDQLNSLAVQVDYYTHLIQENPNWEFAGIYTDEGITGTSTKHREQFNRLMDDCRAGLIDRVLVKSASRFARNTADALTSVRELKSLGVTVAFEKEGFDTETSNGEMLLSIICAVAQEESLSISQNMKWGIHKRMRTGNYITNATPFGYTQINHQLVPEKNNAMIVNDIFKSYLSGMGINEIAEHLNTIYPKENRKWNPRTIHAILRNEKYIGDSLYQKTYTTDSLPLKRYLNTGQRSKYYALETHEGIISKTDYEKVQNLLAKKSITGEIDRTCVFSKKIYCSICGAICSRKGPPTRGFVWCCRTHLQSKALCLLKSIREDELQQAFLSIYNRLQCNQKTILEQLVDDLLGLRHLQEQKYKNRLALGEDIQHLAKQKHNLTRIHTLGYIEETQFIERSAAIEQQIREKKQQLSRNDMPNTSEKILQKTRLIQKKLSSTPPLESFDESAFKELVKKVLISNTAIQFELINGMKLSESRAAT

SEQ ID NO: 442 - protein, 580 aa, unidentified
  source 1..580: note = Bacteriophage uvig_263829 from the Index of /pub/databases/metagenomics/genome_sets/gut_phage_database (ebi.ac.uk)
MYNMSPYSLSRSFRDKPCRAVIYGRASTEHEAQVKALQNQMQWYDDVARFHPQWNVINRYIDQGITGTQVYKRDAFMRMMEDAKQQKFDLIVTREVCRFARNTVDALVCVRQLAAIGIEVYFVNDNIWTLDGDGELRLTIMATMAQEESRKISERSLAGQRVSREKGVLYGNGNIFGYTRNKLTKQFEIDPDQAETVKMIFDLYDSGMGETLVAKELTRLGRKNGVGKVKWDAGKVSKIIKRKNYLGYTVYCQSYSNNYLEQKRIKRDESEFVYVKGGFPQIISEEQYERCNAIRRSRTKRLTDEKGRTRSFGIQQAQNVWGRKMRCRCGSPMLRHRWRTNNAGKPIYGYECKRHHDTPRIRLQNEQGNPTPICEIKPVGQSKLELMASKIFERVWGDQREIVLQTCKMLDACYKPDADRRADLMKAKDDSIQLLQQQLDDLVVVRARGEIEQDKFLQRTIEIQQQMEALRQSKAQIASEDYNPGRLDMEAIEAALCEAVEMHDGLVSEDFIDLFVSQVTPLSDSRFAWCLDFSPQPTVAFLNLAGQRKYTTCSMDSKLHFGPFADEEGHTIPFPGSLRR

SEQ ID NO: 443 - protein, 613 aa, unidentified
  source 1..613: note = Bacteriophage uvig_13765 from the Index of /pub/databases/metagenomics/genome_sets/gut_phage_database (ebi.ac.uk)
MYVMSTEEEKQKVRERQKGYRTDEIVVIKAAEPVSLRDTRTELRVCAYCRVSTDNIEQTSSFELQKNYYEEYIAKHDNWKMVDIFADEGISGTSMAKREGFKRMIRECLAGKIDLIVTKSVSRFSRNVVDCIDTIRKLKTMNPPVRVFFESEGIDTGDSSSDVMLNILAIFAQEESHTKSEIMQWSVDNRFARGNFLTPRLFGYNIDPDKPDRYIINEEEAKVVKLVYSMYVTGYSPNEIAVTMTKLNYVSNIKGDRKWTAGVVNNILNNERRCGMIIARKTYTPDFTTHKSRKNINQRNKYQMNDHHEGIVAVELYREALRIKEMRKHRNYDLIPSLSVIKEGALKGFVPVSVKYSGFTYNNYLFASEFAYTKDKNGNIIKDKIKPIYKNDLSNFDLSDFEKVDSQLFSTVSQPMCWFKYNQMYFNRACIDKMKNTQYIELLFEPTEKLLAIRSCNEYDDYAIKWGVEKNDKLSPITKTSSGISHVLFDCMEWNEDYRYKMIGVRRTKNNDSIVIFDLNNAEAICREELESENPDEVISKITSYYDEYLSDHFGNNFYDDIYTMRLYMMDILKKWNLGAELVPIEDPKEWLIEAKKCVEEHLSKLMEEQLDV

SEQ ID NO: 444 - protein, 594 aa, unidentified
  source 1..594: note = Bacteriophage uvig_527169 from the Index of /pub/databases/metagenomics/genome_sets/gut_phage_database (ebi.ac.uk)
MNITQRMYFGQFPLDKDRDRRIVFYGRVSTQHEAQVDALGNQMQWYDDQLRYHPNWQVINRYIDEGITGTSAKKRPAFMQMISDAKRGKFDLIVTREVCRFARNTVDTLQLTRELRNFGVEVFFVSDNIWTMDGDGELRLSIMATMAQEESRKISERVLAGQKISRQNGVLYGSGNIIGYDRDKVNRTYVINEEQAATIRMVFTLYSQGYGEKAIVNELSRLGRKDGHGNVSWSCTKISRILRNATYMGYICYNKSKVNNYLEKKRINNLDEASFVYVKGNFEPIVSENLWHECERIRKSRISSLRLPDGETRRKGARTTKNLWVSKLRCRCGSSYRIFNWRKLKDGTPVFGYQCNMRTVNPTRSFVLEHNMTQQLSCDAISIPEWKLELMAKKIFEKVWGNQNKAILRACKMIESCQNGKATARMSAAPIQSKIEKIKKRKLNYAAMRADGELPREEYQALCKQADDEIARLEQELKALSPAPEPQTVSSDMKAIYDFLSQKVDVHGACLAPELIEQFVEVVTPIADYSYRWKLNTGCKKSKEERTDLMAVSEKPILTFTIDFETAKRYREANKMPHQFRRAAWTDLTVEVYL

SEQ ID NO: 445 - protein, 508 aa, unidentified
  source 1..508: note = Bacteriophage uvig_133907 from the Index of /pub/databases/metagenomics/genome_sets/gut_phage_database (ebi.ac.uk)
MYAMYLRKSRADDKDIPLEKVLKNHYNMLTELADKLKIQIEEENVFREIETGDSISIRPKMQDLLEKVSEGLYEGVFCTELSRLCRGSKIDQEIVSSTFTAAECKIITPSKTYDLANNEFDEEMVDFGLFMSRREYKTITKRMQRGREQSVKQGKYIGSILPYGYNKEKIEGENGFKLVINEEESHIVRLIFKWFLEDNVGASIIAKRLNQRGYPTRKGQVWSYSSVKNILTNNVVSGYLKHNNRKYKKYIDAKGNVKKSRPVNQNAEYYKGLHEAIIPLADFEKVQNILGTRKQHKSNFDLPLSNPLAGLMKCSECNRVMIKRRCAQGDFLYCPTTGCENKGSYLHRVEENILQALSDTLSDYNYYLDNYEQEMIKEKRNVDNDLERIEKEIEKLNKQFEKCCTFLEQDVYTVEVFQDRTKKIKDKIKILEENKKVLEKEFKNDKVVKIKKSIPKLENVLKNYNTLNIEGKNELLKSIIKEVIYSKKKKCKKGSDEDYFELEITLNI

SEQ ID NO: 446 - protein, 575 aa, unidentified
  source 1..575: note = Bacteriophage uvig_8523 from the Index of /pub/databases/metagenomics/genome_sets/gut_phage_database (ebi.ac.uk)
MRKTNGMTRETTAFLYERLSRDDNLEGDSYSIQNQKKLLTKVAKEKGYTHLVHFFDDGISGVTMDRPGYKDMIAQLELGRASAVFVKDLSRLGRNYIEVGKLTEEFFPDHDIRLVSVSDAIDTDEGENELAPIRNLFNEWYSRDISKKSRISYKIRGNAGIPMGQPPYGYIKNPDGSKSWVVDPEAASVVRRIFMLTLDGYGSEQVADTLTKEQVLTPRFYWEAHGIMRPGKPSSHDEYRWNSSTIMGILSRQEYCGDLINFKTYSKSYKNKKRLTNAPENRAVFRDVHEAIVPREVWERVQQKRAGIRKRKTNSGERNMFSGLLVCADCGRNMHYHFNYTNPEITYFSCPNTKSERGTCTGTHYIRVEFLEQVVLGEIRRLTKFVSQYETQFAKLMMGFTQQAMATERKQVQFELSKAKARDRELDTLFEKLYEDNVAGKISDERFARMSKKYEDEQADLRNSIKTLQADIERIDGKAATADMFISAVRKYTRARKLTPRMLNELIDKIEVHQAEKVDGIWRQRLTIHYNCVGAITLPDTATIQAPHVTMNTRQGVYVTYEPDTPSPAAGTASA

SEQ ID NO: 447 - protein, 542 aa, unidentified
  source 1..542: note = Bacteriophage uvig_361885 from the Index of /pub/databases/metagenomics/genome_sets/gut_phage_database (ebi.ac.uk)
MPRAERIVEVIPATWNPADESVREIRKLRVAAYCRVSTELEQQQSSYDIQIEYYTRHIMQNPNWIFAGVFADDGRSATNTFRRDDFNQLMNQCMKGKVDMVITKSISRFARNTVDCISWVRKLREKNVAVYFEKENLNTLDDSTEMILTILSSQAQEESRAISTNVKWGYARKFEKGESTRQRSYGFRKAPTGEMCIVEEEAAVIRNMARWFLDGDSLERIKHRLEDAGIETTTGKRTWSTGTIYNILTNEKIMGDVLLQKTFTADYLTKRRVKNSGQQKQYYVKNHHEAIIPKTVYYKIQEEIARRSSLKKAGTRKGKTAQGVYSSKYALTGIMVCNECGAHYRRTTWAKNGKKVIVWRCINRLEHGTKRCHESPTLKEEVIQEAIMGKLHSLSIDQEEENFLNGVKEDILRAAKVVGGACTEEEIDKTIEELRDQLMDYVGMAAREHGGENWYSDRMRKLGLQISELKRRRESIREQEKIRDEYEYLDQEISRIIGETGGATGAEFDNIFIRQIVREIRVISKNKLQIQLRTGMVLDVNL

SEQ ID NO: 448 - protein, 513 aa, unidentified
  source 1..513: note = Bacteriophage uvig_186102 from the Index of /pub/databases/metagenomics/genome_sets/gut_phage_database (ebi.ac.uk)
MPEVRLITPITRQSTKKMQVAAYCRVSSNSADQLNSYAAQIRAYKKYIGARDDWELVDIFADEGLTGMKSETRDEFQRMIRMCELKQIDLIITKSISRFARNTKDALAYVRKLKLLGVGVQFEKEGISTLSMGDEMLLNTFSALAQEESQSISMNQRLSIVKRMELGEYVDSNAPYGYRLVDKALAVYEPEAAVVRDVFDLYLRGFSISEIGRELKSRNIPTKAGKESWHPYRIAYMLKNERYIGDSFYQKTYRETTVPFNQHINRGQEDRFYAKGTHPGIIDTDVFNAVQQLIQKRKETFSRTTTQNIYPLTSHIQCSECGSFYRRRSVSGTVKWVCALHKDDSTACDSHYYSEERIYDGFITMVNKLRFSEDNILGQVISRLEMTLAAIKRNNLAARDLSKSIAELNAKLLMLEQLRSKGYLAPEVYQAQANEIGAELARLKDVRQEKFNSKAASMLEEVKKFKMLIFELEEPLEAFDEKLFLEIVKSIQINKEDEMSVEFLGGLRFRERI

SEQ ID NO: 449 - protein, 540 aa, unidentified
  source 1..540: note = Bacteriophage uvig_183615 from the Index of /pub/databases/metagenomics/genome_sets/gut_phage_database (ebi.ac.uk)
MQRQVVKREVQVIQPTLRTGLMHSTLAPAIKQRVAAYARVSTEHEEQQSSYEAQVDYYTRKIKERSDWSFVEVYTDKGITGTNTKKREGFNRMVKDALDGKIDLILTKSVSRFARNTVDTLTTIRKLKERGVAVYFEEQSINTLDGKGELLITIMSSIAQEESRSISDNVTWGQRKRFADGKVSVGYKQFLGFEKGEDGLPKVVEEEAKVVRFIYRSFMMGKTGTHIAKMLTEAGIPTPGGKKEWQSSTIMSILQNEKYKGAALLQKAFTVDFLEKRMKINEGEVPQYYIEHSHEAIIDPLEHDRVQMEISRRKALDRHYSSAHLFSSRVICGECSGFFGRKVWHSNDVYKTYIWQCNEKYRKGLKCKTPHFREDELKQRFVDAFNQRAEIKEETLAACQLGIETICALDELDSQIRSVKDEISVLVEMSRQLIDENAHSAQDQDDCQRRHSALVAKYEDADTRLKALESERSRRIDMRKSIEWFMESFRQQDGLLTEFDEGLFFSVTDVMTVYDDERVAVRFRDGVEIETFAHSQEHMA

SEQ ID NO: 450 - protein, 520 aa, unidentified
  source 1..520: note = Bacteriophage uvig_159029 from the Index of /pub/databases/metagenomics/genome_sets/gut_phage_database (ebi.ac.uk)
MAKKVRKIPATLNQFTSEPVAVRRKKKVAGYARVSTDREEQATSYEAQMTYYKTYIEGHEDWEFVGMYSDEGITATNTKKRDGFNQMVEDALDGKIDLIITKSVSRFARNTVDSLTTIRKLKEKGIEVYFEKENIWTLDAKGELMITIMSSLAQEESRSISENTTWGKRKQFADGKGSVAYSWFLGYDKDFKINEEQAATVRLIYRLFISGLSLYAITKELESRGIKSPSGKDRWHISTVKSILTNEKYRGDALLQKQYTTDFLQKKRKTNNGEIPQYYVEEHHEAIIPPAQFDFVQAELARREQNGRYSGVSIFSNKIKCGCCGGWYGSKVWHSTDKYRKVIYRCNRKYGKDTPPCNTPHLTEEEIKQLFLKALNALVDAKEETIENLQGLIETVCQTESLDAEQERLEQELRIIAENLANLIQKNASVALNQTEQAEQEEKLRNLYGEKHSRFQELEALIQEKNDTKEILTNFITKLEDLTGEQTEFREELWGGLVDYIRIDEKSSTVVFRGGIEITI

SEQ ID NO: 451 - protein, 619 aa, unidentified
  source 1..619: note = Bacteriophage uvig_89669 from the Index of /pub/databases/metagenomics/genome_sets/gut_phage_database (ebi.ac.uk)
MTNTIFKNNTKIGNPYDFLDRNRHRKMVFYGRVSTEHEAQMAALENQIEWYDDQAKHHPNWEVLNKYIDEGITGTQAKKRPAFLQMIEDAKKGKFDLIVTREVCRFARNTVDTLVTTRELKNIGVEVYFVEDNIWTMDGDGELRLTIMATLAQEESRKTSERVKAGQHISRQQGMVYGRGNILGYNRKAKSTYTINPEQAETVRMIFDMYLQGEMGASKIANELTRLGRKNASGLVKWSPCVITRIVNNPTYMGYQAYGKSYSNNYLEQKRILNNDFSTYMLVKSDYEPIITEEEWYRCQEIKQRRVTKTIGVSTDGKKKQPNHGKNETKDLWATKLKCRCGASFRRNRWHKNNNAPWSYGYLCYNRLNNGSAQKRRDAGLDDTGYCDQTEIPDWKLEMMGKMIMEQVWRTRAEDIKLACKILNECYKPDIKAPRQNKSVMLANIEKLKSKKDNLLDMRSDGEITKEEFLNKKEEIDKKISQLTAEYEKDDCPTESDEAGLELSKIEAALNELIDFSQPVLPREIYQKFVSKVTPYSKTHYRWYLNLDGTGTQTADVKVNGRKSNAAVAFCEEGEIPPVHFKEIIFFNILKQEIINKKSFFVATLHRLLSQTSNPHRMY

SEQ ID NO: 452 - protein, 475 aa, unidentified
  source 1..475: note = Bacteriophage uvig_47505 from the Index of /pub/databases/metagenomics/genome_sets/gut_phage_database (ebi.ac.uk)
MTEQKSDDLRMGALYIRVSTHEQDELSPDAQKRLLLDYAKSNGIVVQKDAVFVESVSGRNVKKRKEFQRMIAQAKSPEHPYDVILVWKFSRFARNQEESIVYKSMLKKDRVDVISVSEPVIDGPFGSLIERIIEWMDEYYSIRLSGEVLRGMGEKALKQGYQISPPLGYDAVGDGKPYKINEKEFKIVSYIMSQYDDYCQDTTAIARKCNDLGYRTKRGNLFERRNIDYILRNPFYAGIVNWNGQTFEGTHEARYTTEQLDKRIKLMDARRRPAKHRNASTCKHWLSGLIKCSICGATLSYTGSGACPYFQCWKYAKGFHPESVSITEKKLVKTVLDNFREILDGKDFSFQYIPSASPKSNELSLLQDELSNLKRRETRIRLAFENEIDTLEEYRENKARIQVERERIISEIDKRKTPNSIPTKEEMLLKIQHVYNIISDPDVDYQSKGVFIRSVLEDIVYDKQNDRLLFHFYCS

SEQ ID NO: 453 - protein, 512 aa, unidentified
  source 1..512: note = Bacteriophage uvig_51452 from the Index of /pub/databases/metagenomics/genome_sets/gut_phage_database (ebi.ac.uk)
MEIQLKRAGSYVRVSTYQESQEKSITDQVRMLNEIIDKDETLVNVGTYIDQGVTGKYQTKRKQFLALIKDCMEGKIDVVYCKQMSRFGRNALETMQAIEKLRSVGVAVRFVLDDIDTIVDKDCSRLAMLASIAEDERDNLQDTMTWSFHRRLEQGHYIFRPDMLYGYGLDENKNMVVIPEEAVAVQYIFEEYAKGTMVKKICEWLNEHGYKTRKGMPFNKSSISDITTNEKYYGDMIIGKWRTEGPKRVKNNGESEMYLFENHHEPIISRELFEKCAEVRRTRSEHSKPVQNYDRADPFRRKVFCGQCGSLFICQGRTNCTHDFAKLAFVCGKATRSSRRECRNKLQRIGTLEDSFMAVFNYLLENRSVLSDIVTDNEEFNEVTARLDELRESEKKYFELEVKGLMNEQMTKNHTRLVGEMLQLEEKRKAFLTRNYEISTCNQNLKKFQKILKTAKPMTTMDAEMCDLFVKRILVMDRNNLIFELTSGHKVKVEVLDFYKTRDEIRRVYVTE

SEQ ID NO: 454 - protein, 574 aa, unidentified
  source 1..574: note = Bacteriophage uvig_239031 from the Index of /pub/databases/metagenomics/genome_sets/gut_phage_database (ebi.ac.uk)
MARKSRKDLIRAENSGQTAAAVQSKPCPEPAPTYLAVGYARLSIFETRDRADSEALQNQKELLRQYIANAPGLQLVGIFEDNGQTGTNFDRAGFETMMETVRSGKANCIVVKDLSRFGRDYVEAGNYLEHIFPFMGVRFISISDGYDSADATTADCLTVALKNMVNQMYSKDISRKSGSVLREKMRRGEFIGAFASYGYRKDPVDGHRIIIDPEAAGVVREIFRRKLEGQGDTAITRWLNATGVPSPGCYRYQKGIILDKRFARYKPWLVQSVKDILRNEVYLGHMVQGRRRSEFYAGRPDKRLPRDEWTVVENTHEPIISRGDFNAVQAICAERNNAYHARLGKYDHLGKRENILKGLVYCSDCGRTMVRYKQVSHGKNVSYYYLCPSYAAMLEKSGCSYKFLPEDLLLDSLEQVIQKEIEQAVDMTALAKRLSARASSKADQGALMLKKLNAQLERVEGTRRNAMRDYLGGQMAQADYELLKECCMGEAEELKKQIFDLREQQRYRSETLTEKNPWLAAFGGLGRPFHLTKELAASLIERVTIYGNNRVEILLRFHDEREQLLAAVGEEDAV

SEQ ID NO: 455 - protein, 547 aa, unidentified
  source 1..547: note = Bacteriophage uvig_543352 from the Index of /pub/databases/metagenomics/genome_sets/gut_phage_database (ebi.ac.uk)
MVKKKLRAVFYARVSTEEEKQLNALEKQIQENRDVIISNGWELVDEYIDEGKSGTTTKRRSDYKRMLEDMAEDKFDIVVCKDQDRLQRNTLDWYLFVDRLITNEIQLYFYLENKYFRSNEDALITGIKAIIAEEYSRNLSKKLNNSNKRRIEKALQTGEVSAMGNGKSLGYKIVDKKWVQVPEEIELCKIIWDKYEEFDSIRKVRDFVNDAGYRNSVGKPFTSESIARIIKNEKAKGVLVMGRFHHDFDKKKIVKRSDDEVFRIEIPELAYVSAERFDRVNAHLKSKTNGKRGKRSGSDPLSGKIFCSKCGSVYWKHQSNGYYNWFCSQKYAKGDVACKGSGTVTTVRIRKIYAELTNNLEVNREAVKGSLLKWLQSLKNSLTDEKANNSTLKEIERQEKRKNKLTEAFMDEIISKEDYKAKYAELERSLEELKLKIQPVEENEDVKDIEKVIANIDEEIDAYIKSTGFEDSKIDFLIEHTQRITVNDKHLIIELDLLAGAIITGKDFLLFVHSNMPQHHGPKHLHPSGPQTAPRCCFRDRFSCDQP

SEQ ID NO: 456 - protein, 511 aa, unidentified
  source 1..511: note = Bacteriophage uvig_248716 from the Index of /pub/databases/metagenomics/genome_sets/gut_phage_database (ebi.ac.uk)
MNVIEITAEKETVQETIRLAAYCRVSSDSEDQLHSFAAQIRYYKDYERRNPQYKLVDIYADEGITGTCMDKRDDLHRLIRDCKKGLIDRIIVKSVSRFARNTQELLSTIRFLKDIGVSVYFEEQGIDTDKLNSEMIITFPGMAAQQESEAISGNMRWSYKKRMESGEFNCCAPAYGFNLVDGSLVINEAEAAVVRRIFSMYLQGYGKQTIANKLNEEGVSRRHGVKTWYAFGIDYMLNNERYMGDALLQKKYTTDTLPFRRKENRGECPQYYVENANPTIVSRETYAAVQELQKSRQKNAGGEKAVYPLTGMLRCPDCGRTYRRQLVRGKAYWICSGKASGATTCSSRRMAEPDVYEAFNRMLFKLKEHHPMLLGTLIRDIETMQSKTSENHEKIAEIDKEIADLAARNLVIARLHTSGILNGSDYSAQSSEINNRISALRSERRKKLAEDEGDEQLDKLKELQGILDEYEPTAAFNEDLFNQIVETATVMSRSEIVFQLIGGLKLTESIA

SEQ ID NO: 457 - protein, 609 aa, unidentified
  source 1..609: note = Bacteriophage uvig_366853 from the Index of /pub/databases/metagenomics/genome_sets/gut_phage_database (ebi.ac.uk)
MQDDGRREQLRQIYQREDTGEKTFIPAKPKINPNEKDRFFRVCAYCRVSTDNDEQLSSFELQQAHYRQLVQDHPNWDLRHIFADQGISGTSLKNRDQFNEMIEACRRGEYDLILTKSVSRFARNLVDCISLIRMLKGLTPPVGVFFETDNLYTLGENTEFMLSFLATFAQEESVKKSESMNWSLQQRFKDGKLLTPAPLGYDREKDAAGHYVKYAPLLLNESEARIVRFIYDAYLSGWSQENIASFLKDIGCLTKTGSTDWTSSAIGYILTNERYVGNVLTWKTFTADLYEHKHKKNKQDRDQYLYHDRHPAIISVEKFEAVQSLIENRKHHVRGGLPALHVIDEGIFRGYIPINHHWVNDDPNVYYDISNSVAKVLKVKTIDKRSFSAFDLSGYQVVRNQFTQVRYEGPSITLAENRVSFNLFCMRCFESVAYIQLLLHPAERKIAIRPCRERDTHSVRWRPDPDKPVYSKTLNCQHFGNALFRIMEWDPEYIYRVRGTWAKRGAEQIIVFNLVNAIPAMLVPSENADNTARRRTELCPAEWTDDFGEEFYEHILENGFYYLAPDSEWRTTAASVPAPGMEQFDVPTAEQLQLTIDNLTRGNEMPYDG

SEQ ID NO: 458 - protein, 767 aa, unidentified
  source 1..767: note = Bacteriophage uvig_203185 from the Index of /pub/databases/metagenomics/genome_sets/gut_phage_database (ebi.ac.uk)
MKEGISGSIQNQRAILEKFAQDNHLPNPKFFFDDGYSGVTFTRPAFMEIMELAEQGLVANLVVKDHSRLGRNRLVVGQLLEEDFVRLNVRYIAIMDNIDTARGVSDIVPMQDLFNEWHAKNTSDKVRRVMQSRGSAGIPLTTNPPFGYRKAPEDRNRWLVDEPAAEVVRRIFRMSVSGLGPTQIAKKLRSEGVMTPSEYLHSTGVKCPTKPPAFPHNWCSSTVAAILDRQEYTGDTVNFRSFSRSFKQKKRLKRPQEEWKMFPNTHPSIIDRETFALVQNLRQHRRRPTKTGIVSMFSGLLYCADCGSKLGYSATNNYKREQAFFFCSAYRSNTRVCSAHFIRENVVEELVLEGLQRLLSAVSEQTSGELKNISQSLGFAVKQPDGKLKFTQAADFYQQSLDNAIMGIASGAFDYNTIIKKVISDMTNSGLRTVDYATGWSNRADVAARRSVMTGLSQLTAKMNEDNAKELGTDYFEVTWHSGARPSHQEWQGKVYSKKELETICGLGTVTGLCGANCYHDYYPFIPGISERSYTDEELAQMNAEENKPVKYGDKEYTKYEALQRQRKLETAMRAQRQKIHLLEEAGADEEDIINARCRYRGTSQEYTRFSKAMGLPQQRERVNADGLGNIGVGKTKIDLTQKDYSDIIDMKGKMSDIDVRKWYRHHNKNIPQLIDKSKSIEEQARQACELRNKYRFQARELMEDQKARKALDQTDPIISFEDLVSDKMARKNMSREDAVADTLKTAVKTRRSVDKRYGLEDRNEEI

SEQ ID NO: 459 - protein, 525 aa, unidentified
  source 1..525: note = Bacteriophage uvig_54187 from the Index of /pub/databases/metagenomics/genome_sets/gut_phage_database (ebi.ac.uk)
MPTVKVIPATRDFHTGIEKTTTRKKRVGAYARVSTDSDDQLSSYEAQCDYYTRYIKSRPDWEFVGLYADEGISGTNTKHRDRFNAMIADALNGKIDLIITKSVSRFARNTVDSLTTVRKLKEKGVEVYFEKENIYTLDSKGELLITIMSSLAQEESRSISENVTWGKRKLFADGKVTLPYSSFVGYRKGANGLPEIEPEGAKIVRRIYTEFLNGRTARQIADGLSADGVPTPRRAKMWRCTTIISILTNEKYKGAALLQKSFTVDFLTKKMKPNEGEVPQYYIENSHPAIIDPVEFDLVQAEMQRRRKLGKIYSGNSIFASKIICGDCGEFYGEKVWHSNDRFRKTIFRCNHKYNNEKGKCQTPVISEQQIKETFVVAYNALMADKAGVIADCRALQHMLTDTTAMEQEIADLSKQLGDSTAELRQHVEGNMRSAMNQEQFWKRYNTLEEQCNCLSDRLAKLQSSVKERKQRADVIGGFMFEIKERDGIIDEFDEELWTALLESVTITRDGKWQFKFKNERVIEV

SEQ ID NO: 460 - protein, 530 aa, unidentified
  source 1..530: note = Bacteriophage uvig_373913 from the Index of /pub/databases/metagenomics/genome_sets/gut_phage_database (ebi.ac.uk)
MTTLHHGAYILARYSTDRQDEDSIEVQVVKCSRWCDANGLPVLDVFADMAVSGMKDDRPEYSRMMRQLSLGSADTVVIYDQSRMFRKMTAWFDFREKVERLGVRVVSVTQPMVGGDLRDPTNFLTEGSMALFNQIWVLQTRQKVTEKMRFLAQQGRHTGGKPPLGYNVVDGRYVVCEAEAEIVRSIFKWYASGKTYREIIRALNEAGYTTKSGNSFGTNSLHDLLKNEKYIGVLTYGKVEKRPDGSRNSHASASSVIRVEDAVPAIIDRCTWERVQRKLQENKRSQAGRAPVVRSYPLKGKVFCGECKSAMVVSKAKGKYYYYACSAKQRKGKCDCMPIRVDDLEVRVLDTMRELFCLPANVEYLLAILRDERSKLQGSAGEKLQQLVTRRSAVDKRIAAAVDAVLSGLNSPALSAKLTELEAEKAKLEHDMLQLKAQVSGASVSEDKLREILNMFARSPETDDLLLSIVVRVEVHADFIKVWTLLDPTPRGDFDFSDDSETVIRIDGVGSPAPRILITQSLLCFCVPRK

SEQ ID NO: 461 - protein, 463 aa, unidentified
  source 1..463: note = Bacteriophage uvig_284738 from the Index of /pub/databases/metagenomics/genome_sets/gut_phage_database (ebi.ac.uk)
MKVVTYLRVSTEMQKDRGSLETQRESLNEYCKKNNLNIIDSFEDVMSGGIADRDGILKIMAMLPLKKFEGVVVQNSDRISRDFKDGTLFFNDFRKHNVRLISVMEGPLDFRDDNTDAMAKIRLIFSEMERRKMRIRTKVSMAALANTDRYLGGGLLPHFKVKIINKEKKIVKNEETWDLERQKYLDILKYRSFKKVAELYCINYSTFLEQVRKVELIGHRMFGEFIKDPYTLKKVKNKDPFISSEKVLPALLTDEEFNLINALLKDNRKKFKNPKRKYLFSGLLYCSCGKKFAGNIVNKKTKSYYYYRCEGCKVFYNVDKLEINIKNAILSHPHLKLLNDTTFRLQDLQDKIELENKKLEDLVKRQREITQLLMDGLLDASTIKPELEKLKKLVDLSKQEIKKYENLILENSNFVITEDNISDLKELLFMENTDEIMEELQEILCLIVNRIIIKTLEDIEVIF

SEQ ID NO: 462 - protein, 520 aa, unidentified
  source 1..520: note = Bacteriophage uvig_31017 from the Index of /pub/databases/metagenomics/genome_sets/gut_phage_database (ebi.ac.uk)
MKRITKIEENRALSIKKKTRVVAYCRVSTASDEQLISLDTQKAHYEDYIKSNAEWEFAGIFYDEGITGTKKECRDGLNSLVAACEKGLVNMIITKSISRFSRNTTDCLELVRKLISLNVTVIFEKENINTGSMESELMLSILSSLAESESVSISENSKWSIQKRFQNGTYIISYPPYGYENVGGEMIVVPEQAEIVKKIFEDTLAGKSTHAIAKELNDCGVTSKKGGKWTPGAINAIIRNEKFTGDVIFQKTYTDSQFSRHTNDGELNQYLCENHHEPIVSHEIFDKANEVLNQRGREKGNGERTERYQNRYGFSGRIKCGECGGVFKRRIHYKPSGSYIAWCCTHHIEDRHSCSMKYITDDGIKTAFLTMMNKLVFAHQSVLKPLLHSLQGFDDKDRLLQIQEYETKLEKNMEKRQVLTSLMAGGLLEPALFSKENNALILEEKHLQEEKKQMINSVSGDRTKIEALETLIKFASGSEMLTEYSDEIFLSYVEGITVLSRKEIVFELKCGLKLKERLVG

SEQ ID NO: 463 - protein, 376 aa, unidentified
  source 1..376: note = Bacteriophage uvig_51541 from the Index of /pub/databases/metagenomics/genome_sets/gut_phage_database (ebi.ac.uk)
MEEKRTSLVSRKPGKTGVGQRNREKIREAYANANPNLEVIPVKETVQEAGEPRKLRVCGYCRVSTESDNQQGSFELQVQDQERVIRENPSWEFAGIYADEGISATSVEKRKEFLRMIEDCEAGKIDLIITKSVSRFARNLVDCISYIRRLKALKPPVGIYFQNDHLNTLDQSSEMMIAFMSCMAQEESAKKSEAVKYGIRKKFAVGIPLCPRVLGYDKDRDDKYFIVEEEARIVRLIYGFYIEGYSTPAIANALTRAGVPTITGQNTVWNSNSVLYILRNEKYCGDVAMQKTYIEDYLTHKAVKNTGKVQAYLLHNHHVPIIPKDEWEQVQELLANWKTRRKKKTFIQKKVITVKRGRFAGYIIIDPSWKNKNYME

SEQ ID NO: 464 - protein, 526 aa, unidentified
  source 1..526: note = Bacteriophage uvig_525361 from the Index of /pub/databases/metagenomics/genome_sets/gut_phage_database (ebi.ac.uk)
MATVLKIPAKFHPITHLPEIKVQKRRVAAYARVSTDSEEQQTSYAAQVDCYTKYIQERADWEFVAVYTDEGISALNTKHRDGFNRMVADALDGKIDLIVTKSVSRFARNTVDSLTTVRKLKEKGVEVFFEKENIYTLDSKGELLITIMSSLAQEESRSISENVTWGQRKRMADGKVSLPYKHFLGYRKGADGLPEIVPEEAEIVRNIYRWFMEGKTPTGIARTLTEQGVPTPAGKEQWCSSTVKSILINEKYKGSALLQKRFTVDFLTKKSKVNEGEVPQYYIEESHPAIIVPEEFELVQAELLRRQNLRRQYNGKSVFAARLVCGDCGNFFGAKVWHSNSKYRQVIWQCNHKFQGVCKCQTPHLQESVIQQRFQAAVQELLQKRKAILENCQVMLELLTDCTDLEYQLQELETQKMRISEQVQGYVRENSEIVQDQEKYEERYQALVGQYEPLQKQETALQEQRAERLARREQIQGFQRALSGQNGMLPEFDTQLWLAAVEKAVVHRDGKIVFVLKDGTELVQKI

SEQ ID NO: 465 - protein, 630 aa, unidentified
  source 1..630: note = Bacteriophage uvig_520815 from the Index of /pub/databases/metagenomics/genome_sets/gut_phage_database (ebi.ac.uk)
MSKSAKKAADQAEREKVHKRYSNRREPDVIYPAKKQVDFYDADIHQRVAVYVRVSTDNLGQETSYELQKNYYEEFVLKHPNWKLVKIYADKGISGTSTKHRVELNQMLADSSAGKIDLIITKSVSRLARNTVDCITMVRNLAELRNPVGVFFESECIFSLNEDTNMPLSFLASIAENESRIRSRSMEVSLAQRLNGGLPLTPKLLGYSHDTDGKLVINPDEAPTVKLIFYMYLSGYSSSHIAKTLEALGKRTFLGNSKWTSGTVIQVLRNERHCGDVLTRKTFTPDVISHKSKKNRGERQQSLYKGEHEAIVSRDDYIAVQHMINNAKYGGKSILPELRVIESGVLKGFVTISPKWAGFKAADYLQASMSVYTDDTYYGQPAEGDATFEVAAGDFDLRGFEVTNASLFDANKRPYVLFQSKQIKFSTDCVRQFGKDNKVELLIHPGLRKLAVRRASKDSRQCVQWSRPDDGKYYAKEIPCTAFGGTLFELLDWETDFKFRAYGRLLQNEGDAVFLFDLSEPEIFIQSYLMTGTDSPISGDGELSPLSVSGKRVRAVPKKLADRFGSDFYSHRLTSSSPELQSEDAWKLWLEGQLFETGEKLRVTQFDEMQRFIAEQLAPIKQMEEVDFNA

SEQ ID NO: 466 - protein, 601 aa, unidentified
  source 1..601: note = Bacteriophage uvig_92124 from the Index of /pub/databases/metagenomics/genome_sets/gut_phage_database (ebi.ac.uk)
MKDVEVIKARNTLSPRARTNFEKRLRVAAYCRVSTDTEDQLNSYKSQVEYYTELIKSKPEWSLAGIYADEAITGTQVKKREDFQRLINDCMNGDVDMVITKSISRFARNTLDTLKYVRMLKDKGVAVFFEEENINTLTMDGELLLVILSSVAQQEVENISANVKKGLKMKMQRGELVGFQGCLGYDYNPEDKTLTVNEEEAAVVRYIFQRYTEGAGGSVIAKELENLGYKTKRGSPKWADSTVIGIIKNEKYKGDILLGKTFTVDPISKRRLYNFGEEDQFYIREHHEPIISEEVFEAAQEILRRRAKPRSLNVDGKREKFSRKYAFSCMIECGFCGGTLTRRSWHSSSQYNKAIWQCVVSTKKGKKFCPESKGVDERTIERAFVESYRLLCQNNKDVLDEFMKRTEEALSESNAGKRLAKAEKDIHALEVKKNKLVDMRLEDTIDKETYDRKYLDLSSQIEQLQKECESLQDAAETESTMRKRVATFRQTLEQNEVLDTFDRHIFESIVEKVIVGGYDSNGNKDPYMIVFVYKTGFKNSVDGKNFKPLRKNSKENHSPAVLCSHASNEAESMCSDSSDDTCGVHHGICPHESLIFDVFKV

SEQ ID NO: 467 - protein, 501 aa, unidentified
  source 1..501: note = Bacteriophage uvig_588507 from the Index of /pub/databases/metagenomics/genome_sets/gut_phage_database (ebi.ac.uk)
MRIAAYCRVSTGKEDQLDSLEHQKEFFIEYAKKNGHTLVQVYADEGISGMSLKHRAEFNRLMKDAELHLFDMLVVKDISRFARNTVDFLQSIRTLKKFGINTLFLTANMESLGESEFVLTVFSALAQEESVNLSKRVKFGKQINTKMGRVPHKIFGYDRVDNFHLRINDNEAAIVRKIFELYLSGMGGTCIAQALNANGCTTKTGLQWKGYTVRRILRNSIYCGQYVNNKYEIADCLEHTRTIKDENQWLVHDRPEWAIISRDIFDQAQKQMAHRRQEYNSKTQKGISRYSYKHIFSMLIKCDCCGRSFTRKHYKNNGKRGAEIDRYCWKCITYDAYSAKGPCHNRVTINETDLIEHIREYLKSLIEDPKTFVQQIIDEAQSYCKSTPNEDVVQLKQKKASMQARRKKYQEMYAADLMTIDELKIEINKISDEMEMIDYKIKSSEMPLDPNDSNGIIDQYRKEIESFLNLETITSMDIRKIIDHIDAKADGEIIIHLKHLA

SEQ ID NO: 468 - protein, 602 aa, unidentified
  source 1..602: note = Bacteriophage uvig_129895 from the Index of /pub/databases/metagenomics/genome_sets/gut_phage_database (ebi.ac.uk)
MKQSDNTKITALYERLSRDDELNGESNSIVNQKKMLEKYALEQGFTNLRHYSDDGWSGTNFERPDWKRLLDDIENGLVGTVIVKDMSRIGRNYLQVGFYTDVFFREKGVRFIAISNGVDNTRSDSNEFAPFLNIMNEWYVRDTSRKIKEVIHAKGMDGKHLTSTAIYGYKKDPEDSNHWIIDEEAANVVRRIFNLVLEGKGPMQIARILYNDKVERPSYYLAMRGLGTCRGSCDMNEPYTWTASTISDLLRKPEYMGHTVNFRNYKDSYKDKNSKRADKKDWVIFENTQEAIVDENTWNIVQKIRETKHRPTVKGDFSPLTGLVICSDCGRPLYHHQTWGYEKKDKDGNPTGKWTNAQDYYRCSTYGLSSGKFATKCSGHYIRTAVLNELILDTIKYTCKYAKENKEEFAKKVEDSFNLRRVSSLKGIKSNITKKEKRSMELNNLIKKIYEDNVNGKLSDKRFQMMLSDYEKEQDEVDNAILALNEELEKYQTDSMRTENFMELVHKYTDFTELTAPMIYEFVDKIIVHEADKSTGERIQQVDVYLKYIGKLDVPMPELTPEERKEQERLRKKRAQSRNYRQRQKLKKQAEKEAREKANSEA

SEQ ID NO: 469 - protein, 477 aa, unidentified
  source 1..477: note = Bacteriophage uvig_74804 from the Index of /pub/databases/metagenomics/genome_sets/gut_phage_database (ebi.ac.uk)
MQQAAAYVRVSTDDQTEYSPESQLKELKDYAARHDLMIDPEHIYIDAGISGRKAAKRPQFQKMIAAAKAKPSAFGTILVWKFSRFARNQEESILYKSLLRRECDVEVISVTEETGDSMFGSLIERIIEWMDEFYSIRLGQEVRSKMTFVAEKGLPQTVAPFGYSKKPDEAIMIVQKEADWVRFMAENLLRGRSLRWISNQLNDHGIRTHRGNKFEPRTIEYILRNVTNAGAVHWTPNQDDHDNRIPYSENTIIVRDVCPAIYSYEYYESLVAELDRRAKTHKKHQKSDTVKRHWLSGFLKCSNCGSSMVYQRANNGFQCYKYGKSLCNVSHFISAPKIENAIIDAISHVTITDDFIRSITRPVTSKNSNYKKDIKRLEKMLDRAKLAYVEGIDTVEEYAENKKRIISEIEILKSKEKEQAEAITYKTKEEVCRQFKSAQELIASDADNDTKRAAFGSIVEKVVYSKPDDSVSIFFYL

SEQ ID NO: 470 - protein, 437 aa, unidentified
  source 1..437: note = Bacteriophage uvig_9192 from the Index of /pub/databases/metagenomics/genome_sets/gut_phage_database (ebi.ac.uk)
MERLIQKIEPSVDISHKLQNVAAYARVSSGKDAMLHSLSAQVGYYSELIQSNPEWRFCGVFADEAITGTKESRPEFQKMLAECRKGKIDLIITKSISRFARNTITVLETVRELKMLGIDVYFQEQNIHSISADGELMLSILSSYAQEESFSASENQKWRIRKDFEQGKICNIRMLGYRRTTNGSLEIVESEAEIVRFIFLNYLSGNGKLLISNKLNEMGIATINGCEWTTADIHRILQNEKYAGNMLLQKRFRENHLTKRMIRNDGQLPKYFVEESHPAIIEKSIFDAVQKKLEEQRQRFSSSKSVVSYPFTGKIQCTCCGKNYRHKITATGNVWICATYNTRGKKYCPTAKQIPESTLISVCCEILSITEFDANIFENQVEKILVPVPNKLIFQLTNGKCINTTWKDRSRSESWTEEKRAAAAESSKTRRWRKCQK

SEQ ID NO: 471 - protein, 443 aa, unidentified
  source 1..443: note = Bacteriophage uvig_190248 from the Index of /pub/databases/metagenomics/genome_sets/gut_phage_database (ebi.ac.uk)
MYTLDRFARNRYDSAIYKAKLKKNGVRVYYAKQPMPDTPEGIILESVLEGYAEYYSENLSRNIKRGIRENALQGLATGGANLLLGYTVGEDRKYAIDPTGAKIVQEIFQLYADGMSATQIIAYCNERGYKTARGNAFNKNSLRTILRNEKYIGTYKLMDIVIPDGMPAIIDKVLFEKVQAMLKHNGKARAKAKAHENYLLTTKLFCGHCGSPMVGESGTSKTGQVHYYYKCTKAKREHACKKKSERKDWIEKLVVRYTVQNVLTDENIALIAKRAMEIIEKESADTTYLDDLNAELKDVQKKIKNLVSAIEQGIITSATKDRLDELEQEKSDIEGRIAREEMKKPLLNESRIRYWLTSFKSGNVDNEDYQRRVIDTLVNSVYVYDDEDGGKRIMLTFNLSGNNTATLTSSDIGCYAPPNSANPNSVFFIKHTFGFVYKIENAD

SEQ ID NO: 472 - protein, 529 aa, unidentified
  source 1..529: note = Bacteriophage uvig_41106 from the Index of /pub/databases/metagenomics/genome_sets/gut_phage_database (ebi.ac.uk)
MAKVRVIPSTLNPLTQSPISETKKKKVAAYARVSTDSDEQYTSYEMQVKYYKKFIQEHDGWIYVNVYADEGITGTNTKKRDSFNQMINDALDGKIDLIITKSISRFARNTLDTISITRKLKVSGVEVFFEKEGLWTFDSKSELILTIMASIAQEESRSISANVTMGKRWGMQEGKVSFAYKNFLGYKKENGKIVIDEEQAVIVRRIYSMFLKEGKTCSGIAVQLKKEGILTPSGNSSNWQKNTVLSILTNEKYKGDALLQKTFTANFLEHNVKRNNGQLPQYYVENSHPAIINRYEWEQVQTELARRQEIGRNYSGAGAFASKLVCEDCGGFYGMKVWHSNSKFKKMILQCNNKFKKGKSRCQTPHLTEDEVKEMFIRTYNETMKDKTKVIDDTEAVIAMLTNTDEIDKRIASLTSEIEIVSELVKKLIRENSSAAQSQDDYQTKYNELSSRYDKTKKALEKAMQDKAHKQGQRIKLQSFLESLKQKECIIDQWDEELWMIMVEKAIVHRDKSITFKFYNGKEITLTSA

SEQ ID NO: 473 - protein, 575 aa, unidentified
  source 1..575: note = Bacteriophage uvig_453452 from the Index of /pub/databases/metagenomics/genome_sets/gut_phage_database (ebi.ac.uk)
MENFELKGFAKGKKQQKEQVGGNAIIYTRVSSSEQVDGQSLEVQIDKCREYANMHSYNIVGEFGGTYESAKSDKERKEFSRMLTFIKQSNKKGSNQIVKTVIVFSTSRFSRTGSTTIIEEVEARGAYVVSATSNYDPRTPVGKYMQLMELANARFQNDEKRATTVENSVKALLKGRWIGKAPRGYDQKTTKKEQIITINEEGKLIRKAFLWKANNKLSNEEIRHRLAAEGFHICKQKLSEVFKNPFYCGYMAHKFLQGDIVQGNHPPLIPKEIFLKVNGELSKNHSGYEQKIDKEYAPLLGSIKCPCCGNNLSASISTKMRKKFGRTDIGYYVCSRKGCKYNSSTKNVHEAFEEEANKYVLSDKVSELLKLQLTITFENMNKENKERAQSIKSNIKAKEKELEQVETNYVLCSDTKKQEICVKVMTRLEEEIRGLQAEYSKVNTKILNLDKFIDYAFAMRSNLFNLWELQGLEGRRRLQKLVFPDGFIYDKNNEHIEPKTVNQFFLLNYSFPTNNGDKKRETNSENHRSSLQVLEAGLEPAQPQWPKDFKSFVSTIPPFEHPFKESGKRDSNSRP

SEQ ID NO: 474 - protein, 511 aa, unidentified
  source 1..511: note = Bacteriophage uvig_244564 from the Index of /pub/databases/metagenomics/genome_sets/gut_phage_database (ebi.ac.uk)
MNYLMYLRKSRADGDNETIEEVLFKHERDLQNFSIRMFGSKIPEENIFREVVSGETIEDRPEVQKVLSLIESDDIKGVLVIDPQRLSRGDWEDGGKILSTFKYSNTLILTPPKTYDLNNKFDYKFFKMELSQGNEYLEYIKEILMRGRVSSINAGNYIGSVAPYGYDKTFVEKSPTLKPNEREAEAINIAIKKLVYDGLGWTQICRDLESMGYKPRKGEHWAPYTLRDICINPVNIGKIKWNTRKIVKVFEDGKLKKKRPRNKNDVIYVDGKHPAIVDVELFNKLIEKVGKNTREKSSSELVNPFAGLIFCGTCGRAMAYRTYKNKDGSFRSSPRLLCTNQVYCKTKSATFSEIYNSVVAILEDIVKDFEVKIDNDDYKAYNIQTRMLKEAEEELKKLDEKQEELYDFLEDKIYSKEVFLDRSAKLNAKREEVEKRIEFLKLNTIEPIDYKQKILMFSDVIDALKNDDVPAKYKNNLLKNIISRIDYYRESENRTKWDTSEPRLEIHLNDF

SEQ ID NO: 475 - protein, 530 aa, unidentified
  source 1..530: note = Bacteriophage uvig_563601 from the Index of /pub/databases/metagenomics/genome_sets/gut_phage_database (ebi.ac.uk)
MSYNDNIKNLKPDEIIIYLRKSRADNPAESVEEVLEKHETILQDFARQTWTYQIPESNIYREVVSGETIEARPMMQAIISLIELPQYKAILAVEPQRLTRGDLVDCGTIINSLRYTNTLMITPAFSYDLNNKQDRKFFESELMRGNDYLEYTKEIMSRGRIAAARRGCFIGNVAPYGYQKHVIGKDHTLAPDPDEAPVLKQIYEWYVYDDVGADTIAKRLDKLNISPRNGGRNWNSAAIKDMLHNPVYNGKIRWGYRATKKIMVDGQLISTRPQASDDDYIIVDGLHDAIVPHDLWLAAQEKKGRTTRKKASTKVRNPLAGLVVCPCGRMMSLRTYRKNGIERSAPRLLCDNQSNCHTRSVLYQDMISAIIDILTKYVNDFQVKLDSSSAASHDFYEKRIESMQSEINKLEEKSERQKDLLEDGIYTKTEYVKRNSEVRKRIQALLLSIEKLQKETPPNIDYQQKIHALSKAISMLKKDNSNPEELNKLLKSIIEKIEYRSEVDTIRFSGEKLKGGWKPQKFNIDVYLKF

SEQ ID NO: 476 - protein, 533 aa, unidentified
  source 1..533: note = Bacteriophage uvig_203635 from the Index of /pub/databases/metagenomics/genome_sets/gut_phage_database (ebi.ac.uk)
MSIGTELRAVFYARVSTEEEKQLNALEKQIHENKDVIRDHGWRLVGEYIDEGKTGTTTKRRNDYKRLLKDMTENKFDIVVCKDQDRLQRNTLDWYLFVDNLVTNNLKLFMYLDNKFFKPSEDALITGVKAIIAEEYSRNLSKKLNNSNKRRIERALNGEEVSAMGNGKSLAFKIVNGKWVKDEEEAKLGKKIFELYLEYDSIRKVRDWVNEHGYTNSVGKPFTSESISRILKNEKAKGVIVMGKYHHDFDKKKIVRRSEEELVRIPAPELAYVSEEVFDKVQERLRAKTGNGRGVNAYSDPLSGKIYCGSCGRKLWKHASNGYVNWMCASQVAKGDVECNGTRITTVAIRNIYKKITDNLEVNKGVVKQDIVKWLNELKATLSDSSVNEKIQKDLDKLERKRTKLLEAYLEDFISKDDYKAKYEAIEGQIEEKKKLLVPVEENEDIKVIESVLQNIDDEIDAYVKTLDMEESKVDFLIEHTKRITVLENRDIIIELDLVAGAIIAGKDFLLYVHDTMPQHHGPKHLHPSGPQT

SEQ ID NO: 477 - protein, 562 aa, unidentified
  source 1..562: note = Bacteriophage uvig_311594 from the Index of /pub/databases/metagenomics/genome_sets/gut_phage_database (ebi.ac.uk)
MKRVNCLYRVSSKQQLHGDDIPVQREECMAYLGEHTDWEFNREYVEKAVSGFKTSVKDRDILQEILTDAREKTFDVLLVFMSDRIGRKEDESPAFVTTLNDLGIEVWSVKEGQLKTAEHVDKLMNYIRFWQAEGESRKTSMRVKAAQETFVRDGKFVGGKAPFGYRLEYSGAISNHGRALKHLVIDKEKAKIVQQIYDYAYYYHYGALKIAKTLNEQNIQAPVDTWKACTISQILQNPVYMGYIAYNRRQHSKCGGSFERTPMEQWIMSDEQNTELVIVSREKWEKVQEIRESRKKNMKDARDDKQGKYVYTSSGQLVLMGLVYCGYCGKRLTNGSKYDYWETKEGERRKKFVGRYRCTQMANGSLTCSGKAYYRAEEIEPIVYTVVTSYLNSLKEADTYDDILKLQEEQRILVKHELEQLQKEIKAIKKDIETLEQNIPSALRGEGNFSPVQLSALMDKNKQQLIELEHRLEIKNKEYKEMECKKKDIKNIGNMISNWGELFMECSIPERKVMLSKLIERIDVKENDIKIKFKISLEEYIGEKDGRKGIGSPTTLYTPCSA

SEQ ID NO: 478 - protein, 528 aa, unidentified
  source 1..528: note = Bacteriophage uvig_85018 from the Index of /pub/databases/metagenomics/genome_sets/gut_phage_database (ebi.ac.uk)
MNTNIKHTALLSRLSREDENIGTSESILTQKTMLTQYAKSHHFKNIIHYVDDGYSGTNFERPDFQRLMQDIKLGKIGVVITKDLSRLGRDYIKIGNLLEEYFPKYQVRYIAINDDIDTINGIPEYVPFKNIINEWYARDISRKIRSAYQTKALNGEFTASYAPYGYKKDENNKHQLIVDEETSWVVKEIFELIANKNSLYQVARILKDKKILKPRAQIMKKEGKYYNELWEKYPYDWSPQTIHRIITNEEYLGHLVCNRNSTISYKSKKLKQNPREKWIIKKHTHQAIIEEELFYLANKALEGSIKKKVIKPRNMFSQLLRCDCCGKALSLYHSDRRVASFCCVTYRSFGKKYCTAHYTRYDTLYRYVLEDIRKHAKKAIKNKEELLQEIINHRTKTNEEEHKNKIKENQRIEKRLKEIKEIMIKLYEDKALNRIKEEMYEELLESYEKEKAEKVLKRNENNIFINESKIKEKEVKKFLECINKYEDLKELNEEILHQLINKIVVYEREIIDGKRIQKIEIEYNFIND

SEQ ID NO: 479 - protein, 529 aa, unidentified
  source 1..529: note = Bacteriophage uvig_81090 from the Index of /pub/databases/metagenomics/genome_sets/gut_phage_database (ebi.ac.uk)
MANARKVQVIEATINPKTHLSTTSPRKRRVAAYARVSTDSDEQAGSYDAQIDYYTRYICNRPDWEFVKVYPDDGISGLSTKKREQFMAMINDALAGKIDYIITKSISRFARNTVDTLTYVRMLKDHGVGVYFEKENIDTMDAKGELLITIMSSLAQEESRSISENVIWGQRKRFADGKVTLPYKRFLGYDRGASKDDPPVVNEEQAVWVRYIYSEFMLGKTACAIAKALTASGVPSPSGKPKWSPSTVESILSNEKYKGDALLQKTFTVDFLSKKKKVNEGEHPQYYVEHSHEAIIDPREWQLVQLEMERRKSLGMRYSGNCVLATRIVCGDCGSYFGPKVWNSTSKYKRTIWQCNNKFKGETKCSTPHIEEQEIKSRFISVINFLLPDKQALLEDCRLMQDALTDCTKIDEQLNALTEELEVVAALTRKCIAENAAEVIDQVEYKKRYDGLNDRYNITREKIEAMEKKKTSRIGEADKIGAFMFEMLERDEPLDTFDDRLWIAVIDHATVFHDGRIVFTFVNGMEAEG

SEQ ID NO: 480 - protein, 520 aa, unidentified
  source 1..520: note = Bacteriophage uvig_81430 from the Index of /pub/databases/metagenomics/genome_sets/gut_phage_database (ebi.ac.uk)
MSNLVMYLRLSLEDDVNADESNSITNQRRIIRDYISSHEDLRSMTVTEKCDDGYSGTNMNRPGMQELLAMVKEQRVDCIIVKDMSRFARNYLETGKYIEQIFPFMGIRFIAINDNYDSKDYVGGIGEIDVQFKALLYDFYSKDLSQKVSTAVMARKDKGMFIGICAPFGYLKSKNNACELLVDEEAAAVVKSIFTLRAGGASIAGIVRTLNGEGIDTPAAYHRRKGTYANMYTKGDSPLWTDYKVNSILNNEMYIGTFVYGKSRVKEIGSRRKKMLPPSEWKRIPNHHEAIVSKEVYEKVQAMKGTVPEAFTPVGKKASVYTGRLVCNCCGRNMIYHKDRLGKRFFNCEVNYRKNNNCVHRVLVTDLDGIIKGELSKQISGLAKLKLLMEKEREQHNERIRGAKQRLAMAEDTHRRLELELRTAYESYAKGVTDRETYLMQKQSYEAMIDGIREKIEAQKEAIFTLENQMPSENSGIQFLEGKSEIAEITDELLDVLLDKVVVYADKTIELRWKFSNRSN

SEQ ID NO: 481 - protein, 520 aa, unidentified
  source 1..520: note = Bacteriophage uvig_144265 from the Index of /pub/databases/metagenomics/genome_sets/gut_phage_database (ebi.ac.uk)
MQYEEYLIYLRKSRSDASLEAMGVDVLERHEQILLDLAKRMNLSIGGIYREVVSGESISARPEMQKLLSEVESGRWEGVLVMEVERLARGDTVDQGIVQRAFQYSGTKIITPTKTYNPNNEFDEEYFEFGLFMSRREYKTIRRRMRAGVTAAVKEGKWPFNQAPYGWQRVKLEHGRGWVLAPDPDEAPVVKLIFRLYTGPDRIGITHICRYLDNRGIKPRNGDTWLECSVMGILRNVVNDQRVGIGRRKVVKQVQNGSVSKVRPHSDYDFTAPGLQPRLIDHDVFLEAQEYLARNSHKLPESYGIKNPLAGILVCSCCGKKMQRRPASRDGSSGRCPYDVLMCNTRGCPTIGSTLELVERELIQALSDWVAGYQLDPTLEVENKVPEKEQLLSSAVSNHDLLLKQNGNLYDLLEQGVYTTEIFLERSHELQKRIKESEAHIEILKKDLEYEKEKIANIENFIPSCKELLSCYWDLSAQDRNKALKMLLESVEYTKTKRNRKGDKDNPTFTLNLKPRIPRI

SEQ ID NO: 482 - protein, 515 aa, unidentified
  source 1..515: note = Bacteriophage uvig_597427 from the Index of /pub/databases/metagenomics/genome_sets/gut_phage_database (ebi.ac.uk)
MAFCMYLRKSRADMEAEAHGEGETLARHRATLEQLSRRLKKPIAEVYQEIVSGESIADRPQMQRLLADVSAKKWEGVYVMEVERLARGDTMDQGLVFHAFRYSDTLIITPMRTYNPCDPADEEYFEFSLFMSRREYKTTARRMQAGKIAAAREGKSFNGRAAYGYRTVKCADGRGVTFEQVDDEAPVLYQIRDWLLNGVDGEPCGLTRIARMLNDAHVPTRQHAAWTSAYLHHLITNPVYAGYIRMGARKTERVATPSGVQKRLVRQDDPQLFRGQHPPYFSDAEFDAMRAKLRTRCFPIRGDAEMINPFCGLLFCGECGRAMMVNRDAARNRTRIRCKTPGCGTVQSVLPPVEAALLETLRQWVDDPGSFVIPDAPPEENPVLLQSTADSLRVERGKVAQQIERAQDLLEQGVYTVEQYSERFAKHSARLREIDASLADLQHRIDARPQYCTLDEISPAIRALLDDYDAMSALQRNGLLKQCISRIVYHKSKSTATSGSSAPANFVLDVFPRLK

SEQ ID NO: 483 - protein, 555 aa, unidentified
  source 1..555: note = Bacteriophage uvig_593889 from the Index of /pub/databases/metagenomics/genome_sets/gut_phage_database (ebi.ac.uk)
MKSTIYARYSTDKQRESSIDDQTRLCRQRAQTEGFEITAIYSDDGVSGSMPVSRRSGGAKLIADALAGRFDALIVESLDRLSRDQVEQESIIRRFEHHGIIIIGVSDGYDSRMDGRKIMRGVRGLINELYLDDLRHKTHRGQEGQVARGFLAGGKSYGYNIIKTDKGSRPEINEQEAKQVKWIFTRYAEGWSVQKIAAELNRQRIPSPRGRTWAVSGIYGSPAKGCGILNNEMYIGRYVWNRSQWVKDPDTGNRQRIDRPESEWKITEMPELRIIDDNLWQAVRNRMGKHGKKIIGRKATTLFGGLMTCPYCGGSIIAVSSRLYGCNTRKDRGSSVCKGILFSRDDADKNLLAILQDEMLTDEAIHEIENQVHAILASRQKDQRDQKNAAENRLKELDAEINRLVDAIASIGLSNALKSRLQAAESERDALQAQQSAQKAINKPIHKMDIVGRIRKKIGEMKTVLTSDTKRARKIIADMLGEIRITEKAGNVIAEYDKATQKLLLVSSGVSLNVVAGARYQLERQTKIIATRKLSPVSVDKDGEKMKIIRRHKDL

SEQ ID NO: 484 - protein, 459 aa, unidentified
  source 1..459: note = Bacteriophage uvig_55768 from the Index of /pub/databases/metagenomics/genome_sets/gut_phage_database (ebi.ac.uk)
MGNKKVTKIDATIKIASFDGGIVKKRRVAAYARVSTAAEEQETSLAAQRDYYEQYIKENKEWEFVGIYYDDGISGLSFRNRDGFNRMIKDALDGKIDLILTKSLSRFARNTVDTLTTIRKLKAANIEVYFEKENIFTLDSKGEFLITIMSSIAQEESRSISENVTWGTRKRFSDGKYHVPYDSFLGYEKGTDGSLQIVEKEAAIVRLIYLLYLAGKSPHTICELFNALEIPTTKQQGPWNKTPVVSILTNEKYKGDALLQKTITIDFLTGKRKINEGEVTQYYVSNAHDPIVSAEVFEMVQNALKYRRGTSLRFSGFYPLGGRVFCSSCGSFFGHKILQRRRNGRLTRKEIWRCNSYYDGNAHPHSIKDGQMVDGLAAALQTAIESNMDVVDLCWETMKAIHPRLQRPKYEKIIRSIYEDANRTRKNILFLHFLIDKVSVSDGLHLTFCLKDGTQIEYN

SEQ ID NO: 485 - protein, 508 aa, unidentified
  source 1..508: note = Bacteriophage uvig_120053 from the Index of /pub/databases/metagenomics/genome_sets/gut_phage_database (ebi.ac.uk)
MAKTVRVIPASPKIFRSEVTAEPRRRRTAGYARVSTDHEEQASSYEMQMAHYKNYIESRADWDFVGMYSDEGISGTNTKKRDGFNQMIEDALAGKIDLIITKSVSRFARNTVDSLQNVRKLKEHGVEIYFEKENIWTFDSRGELLITIMSSLAQEESRSISENTTWGKRKQFAEGKTSVGYSAFLGYDKDFKINEEQAKIVRLIYKLFVGGRSFYAITKELEKRSIKSPSGKDKWYISIVRSILTNEKYRGDALIQKEYTADFLDKTRRKNTGEIPQYYVEEHHEAIIPPDLFDFVQAEIKHREQNGKHSGVSIFANKIKCGCCGTWYGAKVWHSTDKYRRVIYRCNKKYAHKGKPCGTRHLTEEEIKQIFVKALNSLVEVKENVIAELRSLINGVCQTGELTEEHDRTEQELGVLTERLETLIRENARVAQDQTAYLKQENEIRARYLEKQGHLARLDEQIAERESKRKTLETMIQVVCGINGEQTGFDEDLWGGLLDHIVVKADGQ

SEQ ID NO: 486 - protein, 650 aa, unidentified
  source 1..650: note = Bacteriophage uvig_441833 from the Index of /pub/databases/metagenomics/genome_sets/gut_phage_database (ebi.ac.uk)
MTDYIGNYKNRPRRVVFYGRVSTEHEEQLSALGNQMEWYTDLALRNPNWTVVAQYIDEGITGTQMKKRPSFMRMIEHAKEHRFDLIVTRELSRFARNTVDALNATRELKQYGVEVYFVNDGIWTMDGDGEVRLTIMASIAQDESRKTSERVKAGQKMSREKGVLYGSGNIIGYDRVDGTYVINEEQAATVRRIFNLYAEGHGETTVAKMLIEENRKDGCGGLSWTASKVSRVLRKPTYKGYMTYNKSHIDDFLSHNRINHNEEDFVLVKGNFEPIVSEELWETCNQIRSKRAAFVKGKDGRAHKFGVSFPQNKWTKILFCDCGMRFQIEGYDKTANGGKNMRLICARSKMFKKKDAARTLNGIPCPAPYASEWKLELMAREVFRTVWKENAEDILGLLRTLDANLNTTGTPNDGNQLENKLSALNEELDDLVSQRASRSITMDDFLSKSTEINNEIINVEGLLQSSIQEQRPKARLDMHSIEAALSDDASFPDGKIEPGFLDRYTNRIVKSNNRYIWMLQLMNVQQIMPIQSERQPIAMVTYKSGVPYDIEQEQIGKQDKESAGPDCATICRPQDFFLNMSRTKRKRKLVEWLESCQENQVSVLDEKIPLLSFAVDFVTAYEYQKARGIKIHPGLWKDMRVDIFLVKKEN

SEQ ID NO: 487 - protein, 606 aa, unidentified
  source 1..606: note = Bacteriophage uvig_210070 from the Index of /pub/databases/metagenomics/genome_sets/gut_phage_database (ebi.ac.uk)
MKRKIAIYARVSTEHEAQISALENQIQYYDEILKKHPEWELYERYIDEGITGTSIGKRDSFLRMMSDAKDKCFDLIVTREVSRFARNIVDTLQQTRTLKQYGVEVYFTDDNIWTMNDEDGELRLSIMATLAQNESKKTSMRVKAGQMISFKNGVFYGNGNILGYDREGKNLVINPTQALTVKRIFELYLQGNGIRKIQFIMEQEKRKTSLGKTKWSASNIARILKNPFYCGRIEYRKQYVPDYLTQKKINNHGEIERVITKGTHDPIVSEEDFDKVQEIFKTKTTKKDNKKYGKPLAYNVWVRKLKCKCGHGMNRKINYVSKITGVKTYSFQCHDQIHTGTIKTRLKKGLSINGICDNKSFPEWKLEVQADFIFRKLLLNKQEIYETAIEMLESSVAVDTHIQDKKKKIEDSIKNIDKLKARNDMLLDMCTDGDISRETFKKKTELNNQNIHELEEKIKLIRKQIEENDAQEDLNKRIVLLSEFIKMKAFSKKEKIPETIIEKYVEKIIFYKDDFEWYLRPTIGNVDFLSIDAKNMKKGTHELEKTMCHVPSSTGSDCRRRKIDKRKYFYFTTLIVTRDDVNEYMKYHAEYTKANRFKDIVCKIYI

SEQ ID NO: 488 - protein, 540 aa, unidentified
  source 1..540: note = Bacteriophage uvig_236827 from the Index of /pub/databases/metagenomics/genome_sets/gut_phage_database (ebi.ac.uk)
MATATRRVVRTMPQMFIDVADNQSERLQVAAYARVSTEKEEQEDSFERQVEHYKQLIYSKPDWQFVDVYADPGISGTRAEKRPDFLRMIEDCRAGKIKKVLVKSISRFARNTVDALQYIRELKDLGISVYFESENIDTLTPGGEVLLTILAAMAEQESRTISSNIKWAWQRKFQKGDIILNTGLMLGYRKIGKDDEGHDVYEINEEEAEIVRRIYREFIAGYSITQIAKRLQAEGVKTKLGRESWRHNVIESILTNEKYTGNALLGKTFKPDVLTKYRQKNDGKKAPIYYVEGSHPAIIEKGLFDLAQQEMQRRRDANDNKVGGGRYSSRYPFSGMLVCGICGSKLRRQVRTMGSGKRTASWGCCNRINNGRAVCDSHHVNEDVLEAAYLTAMRRLVDSAEEVVEAVRDGAELALEPENKAAMDRIDEETIQLQEAALALHKAKQRMEIGSVEYASRVKEYSERMKELEAERNELQGTAAKYAEVRLWLDTFIEQTMQSDTLTTVDGTTMKMLVDRIHVRNDGVVVEFKCGVAIEQEYVK

SEQ ID NO: 489 - protein, 525 aa, unidentified
  source 1..525: note = Bacteriophage uvig_393304 from the Index of /pub/databases/metagenomics/genome_sets/gut_phage_database (ebi.ac.uk)
MNRTVTAIPATKKLGNLTASSGAPARRRVAAYARVSTEMEEQTSSYEAQIDYYTTYIRSRNDWQFAGMYCDEGISGTSMKRREGFQTMIDDALAGKIDLILTKSVSRFARNTVDSLTTVRKLKDAGVEVYFQKENIYTFDAKGELLITIMSSLAQEESRSISENVTWGHRKRFADGKVMVPYKSLLGYKKGADGSLVIDETQAPAVRLIYQLFLDGMAISEIKTELAARKILTPRGKEVWSTSTVRSILSNEKYKGDALLQKTFTTDFLTKKMKVNEGEVPQYYVTGNHEPIIEPRIWDQVQYELATRHGNISSAKVGLFSTRLKCSQCGAWYGRKTWASNTKYKYTVWQCNHKYTDEHPCSSATVKDEQIKDSFVQALNQLIACRPQQSQLPQVLGDMFDTSRLEEQAAACQAKIVELTEQIEALIAENQQRALDQDAYQNKYTELDTAYRKTLARKTSLEADITAKTAKHAAVTTALDDLTGEPVSEFRPSQWSALIDHAIVDEDGIRFVFRTGEQVRIALKG

SEQ ID NO: 490 - protein, 527 aa, unidentified
  source 1..527: note = Bacteriophage uvig_55768 from the Index of /pub/databases/metagenomics/genome_sets/gut_phage_database (ebi.ac.uk)
MAREVRVIPASVHKFTTVPFGSTVRKKVAGYARVSTDLEEQLTSYEAQVDYYTKYIQNNPDWDFVEVYTDEGISATSTKRRDGFNRMIQDALDGKIDLIITKSVSRFARNTVDTLTTVRQLKEKGIEVYFEKENIHTLDSKGELLITIMSSLAQEESRSISENVTWGQRKRFADGKVSMPYKQFLGYDKGPGKHGTPVINEEQAEIVRLIYRLFLEGKTPSGIARYLTEQQIPTPGGKTKWQSGTVLSILTNEKYKGDAILQKCFTVDFLTKKQKVNEGEVPQYYVENSHPAIISPEVFDMVQTEVERRRSLPTRHSGVGLFASRIFCGDCGAAFGAKVWHSNDKYRKVIYQCNHKFKGKEKCSTPKLEEEQIKELFVKAVNLLITDAKEIIRNYEEVRPLIFDTACFDAEITELQEEMTVTAELIQKCVDENAHTAINQDKYKKKYDALVKRFEKAKKRLQEIHDTKRDREARRLQTDHFMRELKKQECIITEFDEVLWYTMVDRITVYNETDIRFTFKDGTEYRV

SEQ ID NO: 491 - protein, 486 aa, unidentified
  source 1..486: note = Bacteriophage uvig_227545 from the Index of /pub/databases/metagenomics/genome_sets/gut_phage_database (ebi.ac.uk)
MIIAAAYVRVSTDEQTDYSPSAQLADIREYARQNGYHIPDEFVFMDEGISGKRADKRPAFQSMIRQARKKSNHIQYIIVHKFDRFARNKEDSVLYKALLKKDGVKVISVKEPIPQDDKFAVIYESMLEAMAEYYSLNLAEEVNKTMIKKAQAGEWQATAPFGYKNENKSLSVVPEEAKMIRYIFEQYIAGTSMFALSRQMNQMGYRTHRGNVFENRTIQYIINNPVYKGYSRWTPGRMHLRDYSDPASIISKGNWEPIVSEEIWEAAVTRFKAEKRTYYKHKRPETEGIHWLSSMVKCSACGRSLIVGTKYKNGAVQFQCGGYNHGQCHDSHAISSNRLIPALLSELEKIAAHPNTEGCRYTIRREFPASHELDVYVPLLAKAQQRLKKAKDAYLNDIDTLEEYRSNKTSIEKEIAELKEHIAEIEEQQKMPFDQAAFSTKIASVIEILRDESRSMEDRRKAFKSVCEKVIYNKHTNSLELFLIDG

SEQ ID NO: 492 - protein, 591 aa, unidentified
  source 1..591: note = Bacteriophage uvig_285944 from the Index of /pub/databases/metagenomics/genome_sets/gut_phage_database (ebi.ac.uk)
MIDNCARAVFYARVSTQEEEQLKALPKQVEECKDIIASKGWRLIDGYVDEGKSGTKKDGRKAYIKLLEDMQEDKFDIVVVKSQDRLQRNTFDWYKFTDLLNKNNKRLYLYMDNKFYEPSEDALITGIKAILAEEYSRDLSKKLNNSNKRRIEKAKAGEEISAMGNGQTYGYSIVNGKWVVDESQREVVRRMYELYTELHSVRKVRDALNKQGYRNQRGNLFTDENIGRIVKNVMHKGWVILNRHHRDFASKEIIEKSEEEWVIVKNDHEAIVSEELWDAVNDEIQSHRNKGNSGTRGKRGGTDLLSGKMVCSCCGRVLWKHASQGSYKSKQGRKYTYKRYTQWYCSGKMGRGELACTDPATISGVKLQKYLVEMADMFLDYSTVEYSKNLLKRRTISWLEDLKDKLTTPNDNGKIEQDLKALEGKRGKLIDLYTDELISKEEFKSRSVDLDAEIEKKRALLVPVEENPDIKAIEDTIANIDAEIEALFEDEAMVEEKKVQFIQEHIKKVYVSKNSDVFIVLDNVAGAFLFIDKEDTRIEVVPVAEYNSEELSEEGITENDFVPFDRESMPQHHGAECLCPSGGGSEPGRLF

SEQ ID NO: 493 - protein, 554 aa, unidentified
  source 1..554: note = Bacteriophage uvig_224805 from the Index of /pub/databases/metagenomics/genome_sets/gut_phage_database (ebi.ac.uk)
MAERVCCSYQNVLSIQNRVCCLYRVSTTKQVDHDDQNQADIPVQRKACREFAERMGWTIVYEEQENGVSGFKVSANDRDKIQLIKEYAEQGKFDILLVFMFDRIGRRAEETPFVVEWLINHGIQVWSVNEGEQRIDTHVDRLTNYIRFWQADGESQKTSMRTKAALGQMVEEGRFRGGSAPYGYDLVPSGTYNKRKHEVFKLEINPDEAKVVRMMFDLCVGSGYGRFKIANFLSEMGIKTRDGKNWHEATVGHILHNIMYTGVLRSGCTQSEVFPDLQIISPENFGLAQKLMAERANECNALRTMPRNTRGQSLLSGNVFCGHCGGRLTLTTNGTTRINAAGEKVGRKRIRYVCYNKTRKRSNCDGQTGYTMHILDKMVTDILHQVFDRMRSVEENEIISRTHRSAMVSLKKRLSDAKAESAKATKEYESLKLEVIKAVQGESAFPMDILSELVNNARTRMLDANAQLTELNEEVEKSNQRVEAIKADYRRIMEWSEMFDGSDMNVKKMIAGYIIKRVDVYSDYRLHIEFNMSFAQFELGLETEVEYEAQNIVS

SEQ ID NO: 494 - protein, 586 aa, unidentified
  source 1..586: note = Bacteriophage uvig_395773 from the Index of /pub/databases/metagenomics/genome_sets/gut_phage_database (ebi.ac.uk)
MINSDFVKKRVVIYARVSTEHEAQISALENQMDWYKPILAARPEWTLVGQYVDEGITGTSAAKRPQFMKMIADAKKKQFDMIITREVSRFARNTVDTLQYTRQLKSLGVEVFFINDNIKTFDGDGELRLTIMATLAQDESRKTSVRVKSGQQTSMNNGVIYGNGNILGYKRVAKIVDDNKKEVEWTVDPEQAKTVKMIYAMYLDGMGLMQIKDELERRGRKTSAGLDRWYCTVISHILKNSFYCGIITYHKEYTPDYLTQKKVKNYGEIEFTKVQGSHEALVSVADYERVQIIMESKRSKCKNLDTGRKATGKRPRTTVWGKLLICECGHKFSMRVWDRKDRVANAAYQCYSSVHTGSYESRKKRGLSLDGICQTPMIPEWRLQMMANYIFRNYLTEKDKVLALANSMLEAHIGDTESREDHTETLRCKRAELEKLNTKLDNFIEMRAEGEISKELFKKKTSELELTMQKLDSEIKELESKQEPEIQIEDYAEKLTVLQYALEQYTNWDDKDVPESVIEAFVVKIVASKDGFDWYLRFSGNPDDPLHCTVGGKRKSTAKISVAGECSPAIHKGDTGSYQGTAPIKS

SEQ ID NO: 495 - protein, 519 aa, unidentified
  source 1..519: note = Bacteriophage ivig_749 from the Index of /pub/databases/metagenomics/genome_sets/gut_phage_database (ebi.ac.uk)
MMRVKKTDTSKDRVAVIWCRVSTKEQFKNNCSIDVQKKECREYATQHNIQVIGEYEGKGESAKTTNGRQFQEMLKVVTSNKKVNTILVRTYDRFSRTGGEGIVVKEMLRKRGVDLIAVAQPVEKNTQGEFLEDLYLILSKFDNSQRRDKCLAGIKGCMERGDWCCRVPMGFSRKKVDKRHIITVNETGKILREAFLWKANENITSDEIMRRLNRRGVFIKKSQLSEMFRNKFYCGMIRHWSLGEDWIRGNQEILIEPEIFDKVNRKMNEGHLAGYEKQESNNFPLKGHVFCPDCHRPFTAYTVKKKNRDYYKCNTKGCCHNRAADVMHQKYINLLSDYRIPKCLFPILQRVFTKVFWENNQREKEEIKSLNIRLTDCEVKAKAVRLRYGLGEIDKEIYDDTMNVLEEQKDEIEQNLELYKNKLSNLDRYTTKVLKMSCKLGDLWQKGNARVCQKLQNLVFPQGIEWDDKNDDYRTFSENEVFRLFRKISTTYKYESKKNTPLSSEVSALVENNGNSFLW

SEQ ID NO: 496 - protein, 620 aa, unidentified
  source 1..620: note = Bacteriophage uvig_537547 from the Index of /pub/databases/metagenomics/genome_sets/gut_phage_database (ebi.ac.uk)
MEKKVIAIIRTSTTQQEIDSQRKEVLSMAIADGYSIDEIEVVGEKGASAIKMDDAYLKNMNKVYELIEVQPIEAVYAWAIDRIGRNRTMLNNFRETLCKKHIQLIIKNPELRLLNPDGSENNGIGLAFALFSEMAVQEMEQKKARFNRARKRNDEKGKYNGGYVAYGYMVQDGYIVINEDEAKVVRLIFTELASGKYSCDGLARELQARGIKFKGKKMLFSNVRGILKNKIYCGEQVTTSGAIRNVPQIVSKELYDKARAAISANNPTKTNSTTNRFCFGLRLIKCPYCGCHFSVAAKLYQCHNHNRNYYDSRQGFEKCPNGISIGAANLDRLLWYAAATVHFAYLKQLTGQRDEEIDDKIEVLNQKIQHLQNEIDSLIDKRKRINLVFMDGDMSEKERDERLAKLLKDNEKYAVQIREYEEEIGKLTALKDGDIGDEILFENFHNLMMLDNLELQSKIVRQHIKNIVLEKAEYAPYKRVLKITIQFYNHPELQYLYLAKSLGEFYTITNGELDRDIKGNLVPIPNLKEMGDILGDEEEGVSGYRFAPEIIAIKDSISESKELTDIVKQTYSLTDIDIAFISRTASRFFIGKADAVLQQRIGRLVARKVVIPLDNTTIPL

SEQ ID NO: 497 - protein, 487 aa, unidentified
  source 1..487: note = Bacteriophage uvig_449731 from the Index of /pub/databases/metagenomics/genome_sets/gut_phage_database (ebi.ac.uk)
MKKETEYLQIGAAYIRVSTDDQTELSPDAQLRVIRASAKEDGFFIPDEFVFIEKRGVSGRRADNREEFQRMIATAKSQTPAPFRRLYLWKFSRFARNQEESTFYKGILRKKCSVDIKSVSEPIAEGMFGRLIETIIEWFDEYYSFNLSGEVLRGMTEKALREGYQSTPCLGYQAVGGGRPFIINESEYTVAEYIHQSYHSGADMRAIARSANDRGYRTKRGNLFDKRAIEGILKNKFYVGIVTWNGFTFQGPHECRTSITAIFEDNQIRMQREYKPLNRRETSSCLHWASGLLKCGYCGASLGYNKSKNTGRNPSFFQCWKYAKGIHGESCSITVSKAEKSILKSLDMAVNDPHIKYEYIRQSVPDSDASISKLESALSRLAVKESRIRDAYENGIDTLEEYRDNRGRIKKEREELNAQLRELKDGPARNVEDDRKALQSRIQNTIDLLKNPEVCYEVKGNALRGIVKKIVYDKEHGKLKCYYYISI

SEQ ID NO: 498 - protein, 590 aa, unidentified
  source 1..590: note = Bacteriophage uvig_287167 from the Index of /pub/databases/metagenomics/genome_sets/gut_phage_database (ebi.ac.uk)
MRTIRKIERSIPNLKKRKKVAAYARVSVDSERMHHSLSAQVSYYNSLIQKNPEWEYAGVYADYGISGTRIKKRQEFLRMLEDAEAGKIDIILTKSIQRFARNTVDLLRTVRHLKELGIEVWFEKENIHTMSGDGELMMTILASFAQEESRSISENVRWRIKKQFEQGNPNGRFRVYGYRWEGDKLVVVPEEAAVVRRIFQNFLDGKSRLETEREFAAEGITTRNGCRWMDSNIKVVLTNITYTGNMLLQKEYVTDPILKKRKKNRGELPQYYVENTHEPIIDKKTFDYVQQEMARRKELGALANKSLNTTCFTGKIKCGICGRSYMHNLRTDRGFEEFWDCGSHKLKGRNCGAKGSIPHAVLIKECTEALGLDNFDEQAFLDQVEKIVVPEYHVMVFCMKNGQKLIRHWVSTAKKDCWTDEYKERQRDWMRNYMASGKGTRFSPFTTRVRCAVCGHAFRRCKQKKKQGISVHWRCGQGGKCSSLSVREEELMKIAADAMGLEAFDGDRFREEIDFMEAGAEERITIHFKDGRIQTVPWTKPKKQGTRHTETYKEYMSQLGKKRWTPERKQRMSEQMKALRKERGENWQRQ

SEQ ID NO: 499 - protein, 544 aa, unidentified
  source 1..544: note = Bacteriophage uvig_189213 from the Index of /pub/databases/metagenomics/genome_sets/gut_phage_database (ebi.ac.uk)
METAVTAPRQKTVTKIEANPALASRKNSNRPLNVAAYCRVSTDAEDQINSYRAQVSYYTEHINQNPKWRFVNVYADEGITGTMVKKRDGFLKMIRDCEKGKIDMILTKSVSRFARNIVDSISYVRKLKAMGIGIYFEEQNIDSLKEDSETYIGIYSVMAQSESENISANISWGIRKRMQNGTYACRFNMLGYRKEKGETEPRIIPEEAEVVRNIFKMYDEGHSLDQIKAYLESKSIKTPTGKPVWSKENIRKMLTNEKYVGDVIYQKTYRTDCISKHTKINRGERTKYLVSNNHPAIVDRDLFNAVQAELVRRSSKRKTSDKTLTSLGKYSGKYALSELLICAECGSPYKRKTWTQGDEKRIYWRCLSRIEHGKKYCPYSKGLEENKLHSAICRALKAAMNENAEALALIKANLAYAVTGDEANLDLGAIEKRIKEATKEMENYMASYRNTGGDKTRYLECIQKVADEIKSLRDQEATAKAKLEKSTEVNSEIKRLCDWLDSHDTSFSEYDDMVIRRVVECIKVFKDGTIKVITKFGTEATETV

SEQ ID NO: 500 - protein, 496 aa, unidentified
  source 1..496: note = Bacteriophage uvig_437676 from the Index of /pub/databases/metagenomics/genome_sets/gut_phage_database (ebi.ac.uk)
MFYYIMYLRKSRADDPNESIDEVLAKHERILQNYALLNYKDKIPEENIYREVVSGETIDDRPEINHVFERMQDKECRGVLVVDPQRLSRGDLIDCGTILRLFKYTNTLIVTPRKSFDLSDKYDEKSIKNELMQGSEYLDYIKEIMARGREQSVLLENNYIWPVPPYGYKKVVEGKHQKLVVDPIEGPYVTYAFKRSAEGVGARRIGNEIEAMGARPRKAEHFLPDYINRILQNKVYLGHLCWQKTKTIKRVDGKNLVSKRICNQEYLVIEDTHEALIDEETFNLVQEKHRAPRVKSSKVLQNPLAGLLKCKKCGSSVERKTIKGKRPRYFCRRTQYCKNRSVYMDAVINAVIKGLKEKLEDFEIKVTSNDGSEMDQKVKMITSIDLKLESLEEKQNRLYDFLENGIYTKDVFMNRNELIEKEKKTLINEKKNVEQIISSFKPTKEKIASLHKAIDMLSDPSLPAENVNIFLKSFIKVMYYEKGCTSEDIQLEILLK

SEQ ID NO: 501 - protein, 509 aa, unidentified
  source 1..509: note = Bacteriophage uvig_535546 from the Index of /pub/databases/metagenomics/genome_sets/gut_phage_database (ebi.ac.uk)
MDKTIALYMRLSDEDDNLAAHEESNSISHQRKLMLDHIQKLPELKDCNIMEFSDDGYSGADFSRPNFVKMMDLVKAGKIQVIVTKDYSRLGRDYLEVGNYMECIFPVLQVRYISVNDNYDSANSFGSTGGMSVALKNLVNALYCKDASKKVRAAKAVLAKQGKYIAAFAPFGYQKSEDDKHMLVPDPVTAPVVQLIFELAIKGMKYTEIANYLNNNGYDSIFEYYQKIGVKRCYERDIGEHMWSASTVMEILYNEVYIGSVINNKTADNIDTGHQVVQRDKEDWIIVENCHEPLVSVEDFKLAHKMIARREVTKRKPNGKWRKSYIRCGICGKGLYKYGNKSSYRCHNGHVSRIRGEELEATLLDIARNMALAQLQEFELKTDGGNCPDNLEREIESLKKSKAHYAKLKFEIYDDYTKTNITRDQMAKKTAEVKQKIAEIESLITEKQETLDMQKDLFLDAKQEQLTKLSKLDEFDEEVIRYLIDYVLVYDNEHIEIRISFRMKIDKRL

SEQ ID NO: 502 - protein, 541 aa, unidentified
  source 1..541: note = Bacteriophage uvig_102394 from the Index of /pub/databases/metagenomics/genome_sets/gut_phage_database (ebi.ac.uk)
MTDEKPRVIIIPPKPELQQTAAVTKQLRVAAYCRVSTKEEEQASSYEAQCEYYTDKIMSNKEWTMAGIFADEGITGTSTKKRTEFLRMIRQCKQKKIDLILTKSIQRFARNTLDCINYTRILRQLGIGVLFEKENINSLPADSEFMITMYGAMAQSESESISGNIRRGRQMHAKVGTLKIPCHWLYGYKKDAGGKFCIIPEQAEVVREIYERYKNGASLRNLKDWLEENQIKTVLGTADWSISVIKGILTNEKYCGDVLLQKTFCTDVISKKIVKNVGQMAQYYMPDHHEAIVSREQYNAVKAEMARRSALRSPSKEAVTGRSCYTSKYALSDRLFCGECGTLYRRKTRNVKGNIYHEWRCISRLEYGKKYCHESPTLREIPLQNAILAAINSAMSVKTALVDQIKNVVSLELLPVQGQTMSLVDIERRLAQLDEQFQRLLAEAIDAENKEACNAQFAEILAEQTALKKQKETILQGSADADRVSTRMKQAEQAIENTAQTITEWNENAVRQIVERVTVLSADEILVRIKSGAEIKQRLER

SEQ ID NO: 503 - protein, 487 aa, unidentified
  source 1..487: note = Bacteriophage uvig_318842 from the Index of /pub/databases/metagenomics/genome_sets/gut_phage_database (ebi.ac.uk)
MNAALYIRVSTDDQLEFSPDAQKRAMIEYAKRNDMLVSDEHIYIDEGISGKRAKNRPAFQRMIATAKSKQRPFDVILVHKFDRFARSREDSVVYKSLLKRECNVKVVSITEQLEDDKFSVILEAMLEAMAEYYSLNLSDEVMKGMTEKARRGQLQYASPFGYNIKNGNVTIIEHEANIVKLIFDKFVNEKMTYVEICHYLNEHGLRNRKGNMFQTRFMKYVLENPIYCGMVRWNYSTQKGGTRRLKKESEWIITNGNHEAIVDKEIFNKAQKQISHIKSLYSTPNIDRNQYGHWLGGLLRCSTCGGTLTISNAKLKFGGYYVCNRNRKGSCPTANRVRIDIIQEEIINALKHDLYMLEKVPGTPISIESKKINDSEITLLEAQLEKVKRKYAIAKNAYLAEIDSLEEYKANKNAIQEEENNLLDKLNKISKPQKDNSKYIKKKIKESLNLIDDSETELKVKNEMLKSFIKEIVVNKEADTIDIHYFS

SEQ ID NO: 504 - protein, 458 aa, unidentified
  source 1..458: note = Bacteriophage uvig_284065 from the Index of /pub/databases/metagenomics/genome_sets/gut_phage_database (ebi.ac.uk)
MENKTNVEEVALYVRVSTDEQAINGDSLRTQRDELTKYALENGFHVFGIYEDDGFSATNLDRPALQRLLKDVEQNKINRILITKLDRLSRGVRNYYKVLDVLDEHGVFWQTIFEKYDSSTANGRLHINIMLSVAENESAQTSERIKSVFKTKLKNKEIIAGKIPIGLKKKDKKLIIDEEKKQVVLDVFDEYKKTTSAYQTFQNIDLKYPELNLNYMKVYRMLNNKLYTGIKVTERGNIEDFCPAIIDSETFFNTQKMLEKNARKPSSENSGGYIFQGMLKCAECGYTLGGKFYSKNPESSRYYYICKKHLLSHICNCSTNFNEQKIEQKLLQELKIQLKNYILSYEYKQNSIKKIDKSKEISSLENKLTKLKDLYIRDLIRIEDYEKDYKQCVSQLESLYQEQNKIETNPIDNNLEALKSFLKQDFSSIYNKISRLEKRKIWLSIIDYITLDKDYNMK

SEQ ID NO: 505 - protein, 579 aa, unidentified
  source 1..579: note = Bacteriophage uvig_495062 from the Index of /pub/databases/metagenomics/genome_sets/gut_phage_database (ebi.ac.uk)
MINIDEKLSKKKAAGYIRVSTVYQVDKDSLPMQREDLTNYIKYALGIDEYEIFEDAGYSAKNTDRPSFQRMMSRLRSGEFSHLVVWKIDRISRNLIDFTTMYEELKRLGVTFVSKNEQFDTSSAMGEAMLKIILVFAELERKMTSERVSAVMVSRANEGKYNGGRIPIGYDYDKSTKTISVNDAEAKIVNLIYDKYDEMQSIIQVVKYLNSQGVKTKRGYDFSATTVHKVLTNKFYVGDLVYNKHDERNTGNSSTKSVRDESEWIVIEDHHPAIIERWRQERTIVALSSRNFANVSYKTYQRRNTHIFAGLIQCGMCGKGMTASVDRERSDGYRPSIYICDSRRKTKLCSNKYVSDITLGPFIFNLISNIVKAYNNVGKSTSVEMLEKKLLRGDTFDNVYSIESEGVRQLLDSIRNASDDSTENIILSKSTSAFSASTEEKELLRSEKKRHEAALSRLQQLFLYGEDAITQTDYLVQKTNIEKSIDIIDKRLNEIDSSIANNFVMTDSDFFSKASMFIIQSNLAQARSVDFDKLIRTVDKQTLKMFINKVVQKVVVLDGKIAQISFQNGISLKFLYAAK

SEQ ID NO: 506 - protein, 625 aa, unidentified
  source 1..625: note = Bacteriophage uvig_151327 from the Index of /pub/databases/metagenomics/genome_sets/gut_phage_database (ebi.ac.uk)
MEYNEQNNTEKKNVAGIYIRVSTEDQVREGFSLGEQKEKLEALCKYKGYEIYKVYKDAGISAKDMTHRPQFQQMIEDMKSGKINYIVAYKLDRVTRSVRDLEILISTLEQYHCYLICDRDDVNTSTANGRFFIRMLTVLSQLEIEIVSERTKFGLGGAIKAGHIPGVCPFGYYRDTDKTIKIDNSTKDIVIRIYQMYLEGKSYQQIANILNDEKVPSPVKTKWGDSTIEKIINNRVYMGDFERYKKDKTRESEIYMNVVPPIISRAMWEDTQNQKGKNQRAYSRHRIYIFFQKLICPKCGRIMTGKGAGGKKSKYMYYTCEKCKIYFNEDDVEGTLINHILDFIEYDYHVNKFFYPLLAEKKDDESKEIEKEISKLTAQKDRLKKAYMNGIVEMDDFAEDFKVIDERLSILETKRINSIDLQEECYNPAHLIAQRDIEKETLIEGQMYKDVILNLWTMKSKEEKQAFISKFIESVALNKNEDGSINIEKVNLRSSFIEQVDKLYKKGVIDIPSTMETDGNLQNVRTSINLSAKQVNEYLDEIKKEMNINYLDLGEYHFNGEEFDETEGLKNEIATYKDKVVSFKIKKYEKPIRFFAIKEMKNFLAKPDGNVHLSVVTHVIPPEST

SEQ ID NO: 507 - protein, 573 aa, unidentified
  source 1..573: note = Bacteriophage uvig_61202 from the Index of /pub/databases/metagenomics/genome_sets/gut_phage_database (ebi.ac.uk)
MNKNQERPKKAALYVRVSTNYQIDKDSLPMQRQDLVNYAKLMFGIDDYVIFEDAGYSGKNTDRPEFQNMMKRIRNGEFTHLLCWKIDRISRNLLDFAAMYQELKDLNVTFVSKNEQFDTSTAIGEAMLKIILIFAELERNMTSERVTATMLSRAQNGLWNGGKVPYGYSYDKEQKEFSVNPEEAEIVKKIFDAYSNHHSIVTVARALNEDGYSSRAGNDWSPVSIFIILTNPFYKGTYRYNHYKIPGLKVEKDPSEWIEVPDHHPRIISDEKFEYVNSILKENSRSKRLPGKQHATNNTHIFGGLLYCSSCGSIYVSSPARMQSCGYRPSKYACPNLRKRKACTSKSISDPVIGEFLMNYVLNMMRAKDSFSSIHNSDDLEHALLRGSTFDSVDHIGKDGVESYFYMLTTVPINGKRMRKPKKVVTIDPELKRLRAEKRKTERALERLMNLYLYSEDSISKKDYTIRKSALEDYLKEITENLNMIDRSNNHEIISDENFIKRASYFILNKELADKNYIYFKKLAMDMDPEILKNFFHEIIDSVVMEQNRVMEIVFRNGLTHTFYYKDTEKPEA

SEQ ID NO: 508 - protein, 455 aa, unidentified
  source 1..455: note = Bacteriophage uvig_393944 from the Index of /pub/databases/metagenomics/genome_sets/gut_phage_database (ebi.ac.uk)
MANEIKQVALYIRVSTDQQAKHGDSLDEQQHTLNEYVRQQGNMRVFKTYIDDGISGQKLYRDEFQKLLDDVKKGKIDTILFTKLDRWFRNLRHYLNIQEILDKNNVTWLAVTQPFFNTETAMGRSFVNQSMGFAELEAQMTSERIRAVFDNKIRKGEVVSGKVPLGYDIKDKHLVPNEKAEIVKEIFQYYLETGSMRATVRHLENHFSMTRDYQSVRQMLTNRKYIGELRDNKNFCEPIVDRDVFERVQLQLSKNIRMNKKRDYMFTGLLVCSECGCNYSATAVISRYVRKDGTTNPNERHLYRCTKNRNNVKKCSNKKGIYETTLENFLLENIEKQAEELSVRMQKEPAVKKTKNINDKIKKKIDRLKKAYLNDVITLEEYKEDREELEALLIPEQDNKIAKIDLSSLHNYSTAEFREGYKQLTISEKSSLWRQVIKNIVVYPDGNLKINFLGY

SEQ ID NO: 509 - protein, 511 aa, unidentified
  source 1..511: note = Bacteriophage uvig_53595 from the Index of /pub/databases/metagenomics/genome_sets/gut_phage_database (ebi.ac.uk)
MDNERKIAGVYIRVSSEDQAREGFSLGEQEEKLLQLCKFKELEVYTVYKEAGISAKDMEHRPQFQEMLKDMKEGKINYIVAYKLDRITRSVRDLEELISVLEQYNCFLLCDRDDVNTSTANGRFFVRMLTVLSQLEIEIVSERTKFGLNGAIKLGHIPGQRPFGYKSAEDKRMVIDNSTRPYVEKIFDMYLEGKSFQQIANYFKENKIFSKKNWKDTTIQKIIDNKIYMGDYEQYKRIGKQVNLEPIVYMNVVEPIISRAKWEECQRQKERNQRTYTRDRVYTFFQRLKCPNCSRIMKCKGSGGTKRKYMYYTCEHCHINFNEDHVEHLLRDFIYDLLEYDMAVKKFFLPVLEDKTNNIDTTSIDKEIRDLEKQRNRIKNLYIKGVVEIDDFKEDYKLIEDKLANLESKKLELVNLETFNYSPQELLAQRDLEKEKMIRLDTLNTVLKTKWNDKDKSEKQEFISKFIDTIEIKKDSEGNLILEKINFRNGFIRQLVKFYDAGIFDVAVPVM

SEQ ID NO: 510 - protein, 448 aa, unidentified
  source 1..448: note = Bacteriophage uvig_342637 from the Index of /pub/databases/metagenomics/genome_sets/gut_phage_database (ebi.ac.uk)
MEAMKRAALYVRVSTEEQSRHGLSLEEQKTALESFAKSNGYTIAGEYIDAGISARKPYTKRPALLRLLDDCKDGKIDTILFIKLDRWFRNVGGYYAVQEILDKYNVTWKATKEDYETETASGRLKVNIMLSVAQDEADRTSERIKFVFDGKRERREPITGHPPAGYKIVDKKIVKDENTEQMIDGFFRKFLQTGSISETQKYIYDKFGNIIDYQVASKILRSTAYYGFWHGVEGMCEPYITKEQYDQIQSMRQKVVRKTKENRIYLFSGLIFCGDCGNRMVGRTNNRSGTVNYTCPKYHEKRGCNNSIFISEKKVEAYIIETMDSKFQEAKYEIEKINNNVDNSTVKNQISAIKRKLSKLKDLYLNDLITLEEYKHDQASMTEEVEKLEKSIAMPKTDNIKKIESLLEEDWNESYEHLSREEKRNAWRILIGKITINPDRGISYTLNV

SEQ ID NO: 511 - protein, 562 aa, unidentified
  source 1..562: note = Bacteriophage uvig_173210 from the Index of /pub/databases/metagenomics/genome_sets/gut_phage_database (ebi.ac.uk)
MKNKIAIYIRVSTTHQIDKESLPFQRRELENYAKYVLNIDDMEFFEDAGYSGKNIMRPAFQSMMSRVRLGEFSHILVWKIDRISRNIIDFANMFEELKKLNVTFVSKNEQFDTSSAIGEAILKIILVFAELERNLTAERVSDVMISRASTGQWNGGRVPLGYNYDKENHTFTVNQQEAEIVKFIFDYYIDNGSMVSLVNALKDKEIKTKTNGAFSLSAVATVLNNIFYTGKYRYNYRKQGDRQQVKPKSEWIVIDNHHPAIISEEVFKRAEEIKQTNLRLKNEKGKIVKKNNIHLFSNLLECDVCHNNFSSSLDRPRVNQGGYRHSMYNCYGRRIGACKSKYVSDVYLGKFVFNYIANLYKAYCSFGKSTTFETFKKKMLRGNIFSDIKEVTNLEGIYNIFCSKYNDKATANIINYKNTKQDFGNELRIALSEKGKYERALARLKDAYLFSDDAMTQNEYISQKHSIEVKLSATNKKLDKLQSKDDTPFDDVEFLNVLSYFILNQNLQDKREIDFVDFITSVDKKIISDFVHKMFIKFIISNGKIKSMTFRNGITNTFVYDD

SEQ ID NO: 512 - protein, 452 aa, unidentified
  source 1..452: note = Bacteriophage uvig_13498 from the Index of /pub/databases/metagenomics/genome_sets/gut_phage_database (ebi.ac.uk)
MPKRTRIEDTGIQRAALYIRVSTEEQAMHGLSLTAQRETLLKYAEENGLRIVGTYADEGITARKKYKNRLEFMRMLRDVQSDKIDLILFIKLDRWFRNIADYYEVQKILDDHKVRWIATEEDYDTTTANGRLHLNIKLSIAQDESDRTSERIKFVFDSKVKRGEVISGKIPLGFRVEDKHLCIDQETAGIVVDIFNKYVAIRSLGALRKYIMDTYGMVYCYSGLRALLQNTRYIGLAHDMDDFCPPLIDRDVFGLVQSIIKERAQRNATKRTDWVYLFTGLVRCAECGNRLSAHTVAGKYIYYRCTRYEKLHLCTHKKRTSELVLEDWLLHNLVSQFAQYNLELEARTAQQVQKVDESKVRRKMDKLKDLYLNDLIDRDAYEKDYTTLRDELRAATAAREKLPEPVNLKEITDALSAYSELSKEHKKEFWARIIGRIVVTNEDDFFVYPISP

SEQ ID NO: 513 - protein, 444 aa, unidentified
  source 1..444: note = Bacteriophage uvig_313242 from the Index of /pub/databases/metagenomics/genome_sets/gut_phage_database (ebi.ac.uk)
MRVALYARVSTEEQAVHGLSIGVQQDTLRSWADGNNYTIVGMYTDAGISARKAASKRPALQQMLDDVRAGKIDMVAFTKLDRWFRNVAEYYKVQAVLDAYNVSWKALEEDYETATSAGRFKVNIMLSVAESEADRTAERIKVVNKNKREKGMCHNGHPTLGIKVKDGKIVEDPETADIVRDIFDYYVRTQSITQTSRYLLDKYKIVRAYRNMKSLLKNRRYVGYADNGQLLYAPIVDPTTFELAQEIMAQRSARHSGDFTQKHTYIFSSITVCGECGRRLTYRMNRRHNKSGTTEYVYGRCPRHASGTCGNATSVREDILEAYMLDHLIIECEKYNAIVAQQNATPKPSVDKNAIKRKMQKLKDLYLSDLIDREVYESDYTELRKALEAPEPEDQREIDIGQLRSALALYDDLEPSDKHEFWRRTLKKISIEDDGEINFTVSVP

SEQ ID NO: 514 - protein, 433 aa, unidentified
  source 1..433: note = Bacteriophage uvig_212380 from the Index of /pub/databases/metagenomics/genome_sets/gut_phage_database (ebi.ac.uk)
MKKKRVADVVNGQKSALYIRVSTHWQIDKDSLPLQREELINYSKYALGIEAHEVFEDAGYSAKNTDRPAYQQMMSRLRTGEFSHLVVWKIDRISRNLIDFATMYQELKSLGVTFVSKNEQFDTSSAMGEAMLKIILVFAELERNMTSERVTAVMLSRAGNGLWNGGKVPFGYDYDKETGVFSINEEQAAVVRSIFNEYESIVSLLSVAKWLNERGLRSRRGIAWNPTTVSIILRNPFYVGTYRYNYRGESGGPRNWSVKDESEWILVPDHHPAIIDIDQWARVQGMLTGNRRNRPGGGTTYQRKNTHIFAGLLRCGYCGNWMNATVDRARSDGWRPSIYACSRKRRFDDCENKYISDITLGPFALNYIANMMKAQRSFGRSTSIETLEKKLLRGDVFADVEHIDRAGLQELYDLFRRGQSQPVEYAPASVREA

SEQ ID NO: 515 - protein, 541 aa, unidentified
  source 1..541: note = Bacteriophage uvig_34482 from the Index of /pub/databases/metagenomics/genome_sets/gut_phage_database (ebi.ac.uk)
MGKIADKLKQIRVAIYVRVSTHYQIDKDSLPVQKEELIAYAKYVLNADSYEIFEDAGFSAKNTDRPGFQQMMSRIREGEFSHVLVWKLDRISRNLLDFAAMYDELKRLGVTFVSKNEQFDTSSAMGEAMLKIILVFAELERKMTAERVIAVMISRAGNGQWNGGRIPFGYNYDKNAETFSVNETEAAVVLKMFDLYEETHSLLQVAKALNASGSRHRSGKEWTPTTVSIILKSPFYTGAYRYNYYDMSKRNSRQDVKPEGEWVVVEDHHPAIIDPVRWKNVVELLERNRRGWQSAGKTYTRKNIHVFAGLLTCGVCGSIMSATSNARAHKDGYRPSNYACMSHRKNNGCTNKYITDTKIGPFVLNYISNLIRAKDSFGKTTSPETLQKKLLRGDMFKDIVRIKEPGLMELYNLYRSQLPGVKYASKVAERSGSSDTASEKDILLSERRRLERALSRLKSLYLYSEEDMSERDYVIEKNRLTESLDKVNERLDKLNDGLSSQFSISDEELLAKASYFIMSQKLLDRRFVDYRRLLKETDPES

SEQ ID NO: 516 - protein, 519 aa, unidentified
  source 1..519: note = Bacteriophage uvig_463416 from the Index of /pub/databases/metagenomics/genome_sets/gut_phage_database (ebi.ac.uk)
MRNVAIYVRVSTMHQAEQGYSIDSQLVDCRKKAHDLGAITINEYVDKGKSGAFLDRPELQRMLNDIKTEKESYDALIIYKLDRLSRDSMGLAYIIKILQQKNIKIISTDGAQYGANPQDVLTMQIMGSIAQFDNALRKERSIRGKIEKRKQGKLDKITKYGYIFNDEKQNLDIKEDEAIVIRKIFKWFTEDNLSAFRISKKLNTEKIPAPQPKINRKIINKDNIWFESTIRTMLKDETYAGIRHTMIYKFEKISLNNMKKTKRPPEEWISVPVPSIISREMWDKANNIMNRKSTNPRRTQRTWILQGLVYCEKCGQIMNIKQTPKIGKIKENEEKYNFYFKCRTNILNWFGSDKKCPNRQVPIYTLEDSVWETLLNIFYSKETLEKYLKETQLKDNVYNLLDKLIEDRNKLSKNKNKIVEWFADGKIDQEIADNKINDLNNKINDLDKKISNLQSTNRSKKSFSINNLYDIFHKIKNPNREQKKEIIHSVVEKIFVERLDNKRSNAYTKPVLKIRIILR

SEQ ID NO: 517 - protein, 451 aa, unidentified
  source 1..451: note = Bacteriophage uvig_346035 from the Index of /pub/databases/metagenomics/genome_sets/gut_phage_database (ebi.ac.uk)
MTRVALYIRVSTSEQVINGLSLDAQKEALIKHAKERGYNIVDIYADEGITARKKLSNRKELQRLLNDVKKDKIDLILVTKLDRWFRNIKDYYAVQDILEAHNCNWRTIFENYDTSTASGRLHINIMLSVNQDECDRTSERIKAVFKHKKENKEVCSGSVPYGYYIDENKHLQIDEEKAKEVQDAYNHYELHNNMMQTRNYLSDKYGYITYSATRKRLTHEAYTGTFDGIKDFCPAIISAKQYKNVQRLISMNKKEYKPKAPQEEYIFSGMLRCKVCGSAFNSNRIFRYGTCYKFYRCQKHKREKACTNKYTISEKGILEKYLLENIKAELNNYKISYEVKQASIDTSAISSQLVKCRQKLEKLKDLYLDDLIDKTSYKEEYARLNNTIADLEKQIDNDSDMDIDAVETILSMDFEGIYNTLQPNEKRYLWQSIIDYIEVGTNRDDITIHFK

SEQ ID NO: 518 - protein, 450 aa, unidentified
  source 1..450: note = Bacteriophage uvig_375837 from the Index of /pub/databases/metagenomics/genome_sets/gut_phage_database (ebi.ac.uk)
MKRVALYMRVSTEQQAKHGDSLREQKETLYEYIEQHKDLKVVNEYVDGGISGQKINRDEFQKLLQDVKENKIDLILFTKLDRWFRNLRHYLNTQEILEKHNVSWNAVSQQYYDTTTAYGRTFIAQVMSFAELEAQIDSERIKAVMANKIAQGEVVSGKTPLGYSIENKKLVINDDAPIVIDIFNYFLSSGSLRKTVYYLGSQYGIVRDYQSVKNMLTNKKYIGELRNNKNYCPPIIDKKLFYAVQKALPKNLKTNAKRDYIFKGLLKCSDCQGSVAGQTIKARYKKKDGTESIYERTCYRCVKRRNNKLRCTNKRAFYEKNLERYIFEATKQKFEQIQINYSKKQPKIIKKKNSKKNIENKLDRLKKAYLNEVIDLEEYKKDREALMKELNEIEVEPAKIDIKNVEFILSKEFDEIYKESSEEEKNALWRSIIDNIIVFPDGNITVNFLI

SEQ ID NO: 519 - protein, 543 aa, unidentified
  source 1..543: note = Bacteriophage uvig_324806 from the Index of /pub/databases/metagenomics/genome_sets/gut_phage_database (ebi.ac.uk)
MLKYLKNDNEIVAVYCRVSSDEQADKGTIENQKEYAEKYVRLNMLNVYDYYLDDGVTGTLPLQKRPEGKRLLEDAKAGKFNLVLFFKLDRLGRSVRVILNAVYDLMELNVDVRSMTEAFDTTTPSGRFTLNTFAGIAELERDTILTRMRMGTIRHAKLGKWLGGPVPYGYTLENGYLEISRTKIPGLTYSEADIVKLIFEKTVYEKMSAEAIADYLNNLCVPTKYKILNRKLITSGYWYPSRILSMLHNTVYYGVHIFGQMSKHQKPEIIKQTNPAIVDIDLWDAAQKQLTSNKLLAARCRKNDYLLSGLIKCGLCGRTYIGTGYAGSKKEKVLYYVCNDKNRYHPDKNQKICQSQNLRADWIENIVWNDCLSYIMQPDKLYLENKAQNLTDPKDELNALEQTAVKLERERSSILDLFRKKIITENDLKNQLDKIAKEQDKLNRAINDKKALISKIDKINSNMIKMVDLLKSFQKYISDNITFADKRKIVEALVENIIVYTDYDNGQRDIPIVTIAINYVFKNEKNPLKRNYQPSSKQNIHGF

SEQ ID NO: 520 - protein, 546 aa, unidentified
  source 1..546: note = Bacteriophage uvig_527025 from the Index of /pub/databases/metagenomics/genome_sets/gut_phage_database (ebi.ac.uk)
MVRINCAIYVRKSTEKGLELEFNSLHNQEDACRSYIMAQAFNNWEYFKTYTDGGISGGTMERPALKQMLEDIRRGLIQTVVVYKVDRLSRSIMDFHNMMKEFDKYGCSFVSITQAFDTSTSMGKLTLNMLLSFAQFEREVSSERVRDKIRASKAKGLWTGGVPKLGYDIKDKKLVINPVEAEQVRSIFEGYLQCGSLAELEKFAEIKGFKHKDWITNKGEQRGGKPFKISALHRLLHEKLYLGMIENKRTGQAFKGQHEAIISKDLWDKVQTKLKDNDNCANHTRNRNNNLLTGKLFDSNRTIFTNQANSKNKATKRHYYSIKGLFLPTEQIDKLTKDAIIEILNSNLNGLNKDSAMALKLINFTDMNYFMQRNFIRNFINKIIYQKDRLTFFFNTAPITLSAYTGDSLNPNDNPLEFIADNINNQIIYEKQVVINRGLSSNVYNAGKVGLMSVNDNNRLIIRAFAYAWKFKKLYERGIRMEDIIKQEKMTKRTIYKYLNLAYLSPKIVNQLLNGTLTVNLQTLFEIASKNLSFEEQENLIYNRLI

SEQ ID NO: 521 - protein, 506 aa, unidentified
  source 1..506: note = Bacteriophage uvig_450121 from the Index of /pub/databases/metagenomics/genome_sets/gut_phage_database (ebi.ac.uk)
MAIALYARKSIERENSISCETQIEYCKSVIKPDERSEKTIEFIDNGYSGGNVDRDGFQKMMRQIERGKISKVIVYRLDRISRSLSDFVGILETLKKHNVQFVSSQESFDTSSPYGEMIVKILMVFAEFERKSIIERVKHAYAYRSEMGLYMSGRRPYGFNLKDTVINNVKTKMFEPVTNEIEQIKYIFENYSVPNVTLRRLMDNLIDNNISATTGSWSTAKLSNIIKNPIYVKADNAIYEYYSKRNANIMSDINQFDGLHGIQTYGKSKHTADDMSDIKIVVMPHDGIINSELWLKCQKKIVKNKKLGNSVNNSTSWLGGKIACKQCGRTMTVTKGGKKKDGTQTRYFSCTGKSHNRICNGPKVTLYADSLEDMVYKLIAEKLQSLKGSRKKISTDNSNKINLLKNQLSEIKQSQEKIVNMLLDDSFKSDMKSLLNEKAKKLSEESKAITEKIEDLESEENEIISVINLSQKWKSANTDERKAVCNVLIHKIFICEDGTCEVVWNI

SEQ ID NO: 522 - protein, 504 aa, unidentified
  source 1..504: note = Bacteriophage uvig_42449 from the Index of /pub/databases/metagenomics/genome_sets/gut_phage_database (ebi.ac.uk)
MDRAVIYARYSSDNQREESIDAQVRACREYCKRKDYFVTHIYKDEAKSGTKLAGRDAYKQMLADVKENLFDVIIFHKIDRNARNELDYYLTKDMLEKNNVRYEYAVQNIDGSPEGQMMENMLVGFAAYYSRNLSKETKKGLNENAHKCLFNGGVPPLGYDIDQNQRYVINTKEAEIVKLIFKLYIEGIGYKKIAEKLDELGYKTKTGGDFGKNSLFDIIGNEKYCGIYSYNKHPRAKNGKGRNMHAKSFPEDYITIDNAIPAIISMELYEAAQARRRQNKSRPGIYNGKRQYLLTGKIFCGHCGSAMGGHTNTPRKKSYSYYGCLDKDRTPAHKCTQKQINTEIVDTAVINKIKHTFLNSEALLRIADKMRQQYATLKDDVEDEIHSKTSQMAGAIKRRNNLYCLVEQGINDDYTLSRISAVNAEVEKLKAQIDNLKDKKNLKVLTDEAIIKAFKLFESKICSLDTNSAKKLLVELFLIKVIVTDKNIDIILDADKITNMVMGQ

SEQ ID NO: 523 - protein, 551 aa, unidentified
  source 1..551: note = Bacteriophage uvig_396773 from the Index of /pub/databases/metagenomics/genome_sets/gut_phage_database (ebi.ac.uk)
MIAAIYSRKSKFTGKGESIENQVNLCKEYALHNLRDKNITEFLVYEDEGFSGGSVDRPEFKRLINDIKLKKIDIIICYKLDRISRNVSDFSNTIELLNKYNVGFISIKEQFDTSTPMGRAMMYISSVFAQLERETIAERVRDNMLELAKTGRWLGGATPMGYESKKITYIDENMKERSLVKLKQVPEELEIIKLIFNKYLYFKSLSKVETYLLQKNIKTKRGSNFSKSNLRVILNNPVYVKSDNKIIDYLVDMGITVCGEPDGQSGILTYNKQMTIRNDKGKAVRVYRDTDDWVAAVSSQKGIIEADDWLEAQKILSDNKDKFPNQGKTHNALLTGILRCSKCDSPMQIAHGHISKKTGKKIYYYTCPLKKNSKSVRCDNRNAKVEEVDKIIIDHLKELPLNKKAIIKNLLKQNKKAKETTIASNEKSIKNEIATKEKQIDTLLTKLSIDDDVSDLIIDKIKKLKNELNSLKVDLLNVNNTKTKLNEVEVSLNFIELLLDKCSIIDTLSVEEKKQIIDVFVTDAEWNGDDYFFGADFLGSEPIEENELKKK

SEQ ID NO: 524 - protein, 544 aa, unidentified
  source 1..544: note = Bacteriophage ivig_4126 from the Index of /pub/databases/metagenomics/genome_sets/gut_phage_database (ebi.ac.uk)
MKIAIYSRKSKYTGVGDSIENQVQMCKDYANAKYMGQDLEFATYEDEGFSGRNLIRPEFQKLINNINSYDILMCYKLDRISRNVADFSSTLEVLQDAKCDFVSIKENFDTSTPMGRAMIHIASVFAQLERETIAERVKDNMLELAKNGRWSGGRTPLGYKSEPVQYIDEEGNERKAVKLVQDQEELELVKLIYDTYLKQGSLHKTEVWFTQHKIKSNSAVLLEKTSLKIILQNPVYVRSAPEVINYLKDNNWNVYGEADGVHGLLTYNKTESVAGSNGKVTKRVQNKENWIAAVSNVKGIIDADTWIRVQEQFKKNKNTFPNLGKTHTAILTGKLRCSKCKNYMLVQHGRTSVKTGDKIYYYICSMKRKSKGELCNCKNIKANEIEPAVLNLIEELATNKEEFKNKLREKNTASKLDNDIKLKKSALEKQIADKEKQITGLVDKLSLDDSIADILINRIKNYKAEIETLKADLLNISAEIEQNNNYKLAESFLDGFFEQCKDISSQPKEKQRQLINSYVNYINFDSDTEEAELKLYEPGEIKKN

SEQ ID NO: 525 - protein, 441 aa, unidentified
  source 1..441: note = Bacteriophage uvig_591587 from the Index of /pub/databases/metagenomics/genome_sets/gut_phage_database (ebi.ac.uk)
MRVALYARVSTEEQAIHGLSIGVQQESLKKWASENHHTIVDMYVDAGISARKPASKRPSLQRLLDDVRAGKIDMIVFTKLDRWFRNVKEYYKVQEVLEQHDVSWRALEENYETETSNGVFTVNIMLSVAQSEADRTSERIKVVTKNKRDKGLCHQGKKPLGLNIVKGELVEDPETAPIIRDIFRYFIATQSVTATRRYLLSQYSITRSYKNTKLILKNTRYIGVADNGQRLYHPIVPPEDFALAQSIMAERSTRHSGDFTQKHVYLFTGIVFCAECGRRLSGTMSHLHNREYVYYKCPSYVGRSCTHLRREREEALEQYMVEHILSGCIDYNAAIAQQSAVKSPTIDRAAVKRKMEKLKDLYLSDLIDREMYEADYLVLKKQLEAPEPAKREPIDIDVLKSAIGAYDDLEPLERREFWRRIVKRISVDQDGGINFELVGHI

SEQ ID NO: 526 - protein, 454 aa, unidentified
  source 1..454: note = Bacteriophage uvig_39360 from the Index of /pub/databases/metagenomics/genome_sets/gut_phage_database (ebi.ac.uk)
MECVAYLRVSTEKQAEEGYGLDLQRISITDYCRKNELIISDWYIDDGYTGSNMDRPQLQRLIRDCSKKRIKCLVAFKLDRISRSMVDGIYMIERVFQPNGVDFRCVYDSVSYDSPMEQAYTQMMAVFAQLDKNTMMMRMRGGRLERVKKGYWYGGGNRPYCYDYSREKGILVPIPERAEQANRALDLFLQGYSDERIMKICGYSSELLVRHILTGVVNIGMIPYKGEIYKGLHEPIFDERKFELAQEYRKTRRKTKTACFSMETNLLTGLCYCGICGCKMRYQKWTNGKHKIYCYSHDRSLKKLPNHNPECDNTLEWAKDIEKQVEEEILKISLNISSYQKTQKESELEITKKALEKNKAKLKRLYNFYAEGNDTIVDSIRETEDEINKQKEVIFELQKSEGNKQSKEIVYDKIKSLADVWPHIDKTSKNVILKTIISKIVIVKGNVEIQLKEF

SEQ ID NO: 527 - protein, 580 aa, unidentified
  source 1..580: note = Bacteriophage uvig_460722 from the Index of /pub/databases/metagenomics/genome_sets/gut_phage_database (ebi.ac.uk)
MEFSKLTRVAIYIRVSTTMQAENGESLNVQRTQLTTYAQMMLNALPENIVIFEDAGYSGKNMDRPKFQDMMSQIRAGKFSHLLVWKIDRISRNLLDFSMMYKELKELGVTFVSKNEQFDTSTAMGEAMLKIILVFAELERNMTSERVTHTMIAMAQSGRWNGGRVPFGYTYRTEGEKKEKQIFEIDKGEAALVQEIFDLYEQERSIVREAKILNDRNAISRYGHEWSPVTVHLVLRNIFYVGDYRYNALREGDRSKPKPESEWIIVKDHHPAIISREQFARVQAILKANKRYRKDMAPASSRERIHIFGGLLFCGNCGKPLNNSVSNKKADGWQYSNYPCPTRRRSSNKCTGKSTSDPVVGEFVFNYILNMLNAQKGFKDIQTPAQLQDRLLFGDAFHNVISIDSDGLNSFFNLLSSGNISGAIYGKDVAVSKPKTAKVDPELVRLRKEKKRLERALDRLLNTYIMSDRPISENEYIRKRTDLETLLSDVNDKLGIAQSEEVQMALTDSEFLTKASQFIIGQKLSNRLYINYKNLAQSVDPSVLKTFVVSVIDNIVIYNGKVKSIVFRNGLAATFEYSSI

SEQ ID NO: 528 - protein, 467 aa, unidentified
  source 1..467: note = Bacteriophage uvig_288194 from the Index of /pub/databases/metagenomics/genome_sets/gut_phage_database (ebi.ac.uk)
MLKAALYARVSSEEQAKRENSIPAQLRALREYCRKNNIEIFKEYKDEGITGQISKRPAFQQMLSAAFSGKINVILVHKFDRFARKAELSRSVKNSLQAAKVNVVSITEPIEDSPMGFFMEGLYELMAEYYVRNLSAEVFKGMNERALKGKHMGQMPYGYYCKDGNVYVNETQAEVIHKIYRFYDEGWGHMKIAKWLNESKIPTYKGIIGGWQTFQVKQILKNSKYIGENLWNGTVYPADFPAILEPALFHRVQEKSNLMTRTHTYRGNNYTKHHLLGLLYCGECGSIMRVKPNQDWQRRKFDTYTCRDASQYRGDCRFTKIFDATKLESEVDAYLRSVLAGAPISLIVSKDAEKVKPADASKSQIEKINAELKRAKDAYLSGVFDLDEYREIRQGLENNKKIIEAETKNVPAPLRANEKEDILRKKIKSAWDLYKNVQTAEEKRTILKTFIHKILIYRDRWEVVFYI

SEQ ID NO: 529 - protein, 599 aa, unidentified
  source 1..599: note = Bacteriophage uvig_296879 from the Index of /pub/databases/metagenomics/genome_sets/gut_phage_database (ebi.ac.uk)
MSTNKELREGVADKAKTCFLYVRVSTKMQVENGESIEAQLYDLRDYAKRNNLRILHEYIDDGYSGKNITGRPHFQEMMEEIKSGVRVNYVLVFKLSRFGRNAADALSSLQLMQDYGTNLVCVKDGINSEAQMGKMMIAFMSAFAEMERENILVQTMAGREQKAREGKWNGGQAPYGYKLVKDEKGKGHLEIDEDEAEIVRIIFHEYTKKGKGVMALASWLNAQGYRKNVRGNGKYEHFVPTFLKNVLCNPVYVGKIAYGRRRTTPVKGKRNEYRMIKQSDYDVYDGEHEAIIDEATWNAAQERMAEESHPFPEAKTGEHVHLLTGMLICPVCGRKMIANVSHGKRKKDGTVGKSTYAYACKYSKKQFGPSCTFTRQFKQEYINREVIEVIARTAYSDIFEERVRDELDAAVDIEKLEADVERIGKALDNNKAARRMLSRKLDSLDVSDRSYERKYEDMQARLDKLYDECADIEAAFGNAESKLESAKEKQVTTARIYEMLDEFREHFDEYDPVRKKEILRQVVDSVEINPDANPKKGDTIVTRVRFRCPVSFYPTLPEEAYDALGIKEFNRLETTEYVSENNSRVDEDTVETVAILGRR

SEQ ID NO: 530 - protein, 428 aa, unidentified
  source 1..428: note = Bacteriophage uvig_151499 from the Index of /pub/databases/metagenomics/genome_sets/gut_phage_database (ebi.ac.uk)
MDKENKAVRCAIYTRKSHEEGLEQDFNSLDAQRESGENYIASQKTRGWICLPERYDDGGFSGGNTNRPALKKLLEDIASGKIDVVVVYKIDRLSRSICDFAELSKTFDKFGASFVAVTQDINTSTSSGRMMLNILVTFAQYEREVIAERIRDKMSASRKKGLWVGGVTPFGYRVLNKHLEIVPEQAEIVKRMFQRYSETASVKQVCDELTDGGIRTRTGKFFNPSMVYRILDNHSYIGKVQYKGEVFPGDHAAIIGQTLWNVVHEILKENTAAENGNSRRQQTSASLRGLLKCGHCDCAMGPTYTGKKGKNYLYYICEKDYKRTRPSCPVRRISGGDIEKLVIEQLQKLFNSQTFIDLTAENGNMSRDSVASAFANLSGFWKELFPAERNRLLKLLIERVTVNEGNIEITIKTEGMKNLMMEMEHEHN

SEQ ID NO: 531 - protein, 497 aa, unidentified
  source 1..497: note = Bacteriophage uvig_539135 from the Index of /pub/databases/metagenomics/genome_sets/gut_phage_database (ebi.ac.uk)
MVAIYARQSIDKKDSISIDSQIELCKREAFGEEVRTYVDKGFSGKNTDRPQFQALMNDIKSKEIHKVVVYRLDRISRALIDFAKIMEDFNKYNIEFVSTTEKFDTSTPMGKAMLSIVMVFAQLERETIQQRIKDNYYARGKKGFYLGGKPPYGFKKEKTKVDGISTSILHNNEFEIDVLTDIFDKYANSDLALGGIVKYLNNKNIPAPHGGRWESTKIARILRNPVYVKADADIYVYYKNKGCKISNELTEFTDENGCYLYGKRDRSAAKYTDVTDHVLSLAPHKGVIDSEIFLRCQHRLDTNKQVKNSGKGKHSWLTGLTKCGLCGYAMTVNATKKYKYFICRGKTSYNACEGPENTIYVDDIEEHVEKAIKDKAVSLSKMKSKVTKNESNVTNAEKIKIIEIDQQIENLLEQMAKSNAVVTEYINDKITKLHNEKNEILKTISEKNEKPNSNLEDILHKINNWDTLEFDEKKMVTKELIQKIDLSDDKINIVWKY

SEQ ID NO: 532 - protein, 540 aa, unidentified
  source 1..540: note = Bacteriophage uvig_57166 from the Index of /pub/databases/metagenomics/genome_sets/gut_phage_database (ebi.ac.uk)
MEEVKCAIYTRKSTDEGLEKEFNTLEAQREAGENYIKSQKHQGWVLVEEHYDDGGFSGGNMKRPALQRLLDDIKCGKINMIVVYKIDRLTRSLVDFSKMVDIFDKYHCSFVSVTQNFNTSDSMGRLTLNMLLSFAQFEREIGSERVRDKTAASRKKGMWTGGVVPYGYRSINKKLEIEPQEADVVKFMFEMYLKYKSVMSVCKLLTENGYRDFRRDALLRMLKNPTYMGKIKYKDELYDGQHKAIISPKIFESVQYILKNKEKSERTCLFNKNEVGILRGLLTCGCCHSPMTPASCQSHGVRRFYYTSTKAKYYGYHHCSNGAVPVQLMDECILKIVTPLISDITVLNGLINKISTDKSAEIYKAMRHPEKIIEKMVERDKLQLMKLLIKGIVVNYDTIEITWSKVALSLLTSNLLAQTQDHTTIIDYPFKRNKGALILSLPEDIAQNVNYSTELIMALCKAFKYQKIISTGKQSILELAAQENIDSGYLGRLIRLTCLAPDIIKRILAGTQPAELYLQRLIREDIPPIWAEQRKLYGVI

SEQ ID NO: 533 - protein, 460 aa, unidentified
  source 1..460: note = Bacteriophage uvig_577393 from the Index of /pub/databases/metagenomics/genome_sets/gut_phage_database (ebi.ac.uk)
MKVAIYTRVSSAEQANEGYSIHEQKKKLISYCEIHDWNEYKVFTDAGISGGSMKRPALQNLMKQLSYFDLVLVYKLDRLTRNVRDLLDMLEEFEQYNVSFKSATEVFDTTSAIGKLFITMVGAMAEWERETIRERSLFGSRAAVREGNYIREAPFCYDNIEGKLHPNEHAKVIDLIVSMFKKGISANEIARRLNSSKVYVPKKKSWNRNSLIRLMRSPVLRGHTKYGDMLIENTHEPVLSKHDYNAINDAISSKTHKSKVKHHAIFRGALVCPQCNRRLHLYAGTVKDRKGYKYDVRRYKCETCSKNKDVKNVSFNESEVENKFINLLKSYELNKFHIRKVEPVKKIEYDIDKINKQKINYTRSWSLGYIEDDEYFELMEEINATKKMIEEQTTENKQSVSKEQIQSINNFILKGWEELTIKDKEELILSTVDKIEFNFIPKDKKHKTNTLDINSIHFKF

SEQ ID NO: 534 - protein, 447 aa, unidentified
  source 1..447: note = Bacteriophage uvig_365918 from the Index of /pub/databases/metagenomics/genome_sets/gut_phage_database (ebi.ac.uk)
MNKLNVGYLRVSTEAQTEKYGLDLQKQKIIERANKDGTTIDRWYIDGGYSGSRLDRPDIQRLLEDVEFWIIKSVYVYKLDRMSRDTIDALTLLCRTLPKYGVKLISATEELRIDTPSDKFLTSVTAVVGQYERELIYMRTRAGMVERVKKGLWMGGGRIPYGYYYDRNDGILHVKSGESEKVIEAYELYLKGYSCQRISDLLDFSCDKHVKNILTSKVYLGYIFYKGKYYKGLHEPIVSEKMFNSVHIFMKKRSSNAYIGNKFMLSGLCYCGKCGARMRYKKWGNCHIMECYSRDGGKQRMVRDPNCKNLRMDAKMIEQEVSDCFRRFIVNVKAEEKKENQKSIIEKKIKKSIDKLKKLYALYGEGDSDTLLSVIQEEEKRQKSLKTELEESIREESVDSSVKIENIQRVSTIWDTLTPKEQNKILKECVEKVVITDGDIDIHFNIS

SEQ ID NO: 535 - protein, 445 aa, unidentified
  source 1..445: note = Bacteriophage uvig_57063 from the Index of /pub/databases/metagenomics/genome_sets/gut_phage_database (ebi.ac.uk)
MKKMNVGYLRVSTENQTEKYGLDLQKNKIIEKAEKEGDKWYIDGGYSGSTLDRPDIQRLLEDSKNGYIEKVYIYKLDRVSRDTIDTLVILYRTLPKYNVKIVSATEELSFDTPMDKMKIGIDALMGQYEREIISMRTKAGMLERVKSGLWMGGGRVPFGYYYDRNDGILHPKEDEAEKVRTMYRLYNDGYSCQKISDMLGMKGERIVIQILKRKSNVGYIEYKGNIYKGKHEAIIDEETFYKTQRFMEKRANNSYICNKFLLSGLCFCGKCGARMRYKKWANRHVLECYSRDGYKEYMVKNPNCDNKRPDAKDVEKEVSDCFKRFAVNITGRREKQISKKELIEKEMKSTVDKLKKLYELYATNESETLLEVIGKSEKRVKELRRELSKETRKKSLTTPERIEKIKKISDVWDKLDVKEQNKVLKECIDKIVITDGNIDIYFNLL

SEQ ID NO: 536 - protein, 455 aa, unidentified
  source 1..455: note = Bacteriophage uvig_586504 from the Index of /pub/databases/metagenomics/genome_sets/gut_phage_database (ebi.ac.uk)
MECVAYIRVSTERQAEEGYGLESQKRDIDEYCRKHQLIIKEYYVDAGLSGMEMSKRVELQRLISDMAKIEVIVVYKLDRLARDTVDALYMIGKIFTPKGICVESVHDFARYETPQDKFQTQVMAAVAEYDRNTMMLRMRGGMLERVKRGFWMGGGNLPFCYSYDKELGILVPIPERAETARNALELYINGYSDGHIARICHYSGEPVAKKILTSVVNIGMIPYKGKVYQGKHKPIFDIERYELAQEIRKSRHDAKSWIAHPTNLLTGLCYCGVCGCAMRYQKWGQKEDSPRKIYCCSKNIDLDYLPNYNHDCDSKPQWASDIEEQVEKQMLEISVNLSKYKPKEKETKLQIMQSQLSREKNKLKRLYILYAEGNDTVIELIKQTEEEVKRITAAIEEESKATKKTQKKEFVYDNIKKLADVWNKIDKQAKNKIFKTIISKIVIANDNIEIQLKNF

SEQ ID NO: 537 - protein, 449 aa, unidentified
  source 1..449: note = Bacteriophage uvig_135914 from the Index of /pub/databases/metagenomics/genome_sets/gut_phage_database (ebi.ac.uk)
MSKLQVAYLRVSTETQTEKYGLDMQKQKIMDYCEKHGITIDKWYIDGGYSGSKLDRPEIQELLNHAKSGIIDTVYIYKLDRMSRDVIDTLNLFYKILPGYGVKVISMTEELRTENPMDRMMLTMNAAMNQYEREVIRMRMSAGMLERVKKGYWMGGGRTPWGYYYDRNDGILHINEQQASVVRKVYDLYLNGFSCENISKILGFKGEPIVKGILKRKSNIGLIEYKGKVYKGRHEPIIDEKVFWKVQDEMKKRHTNAYLSSGHLLTGLCHCGYCGARMRYQKWTAKTMKLVCYSHYQSSKAYMRKSDCCKNRPVDAYKVEAEVEECFKNFAININEYTESHQDSTEILVETLKKSDTKVRRLYGLYADNPSENLLDVIKAEEENIKKLKKKLDDAKTEKRCDPTKIAEIRHMSDVWDSLTLKEKNKILKQCVEDIVVDKDEITIRFVTL

SEQ ID NO: 538 - protein, 451 aa, unidentified
  source 1..451: note = Bacteriophage uvig_256011 from the Index of /pub/databases/metagenomics/genome_sets/gut_phage_database (ebi.ac.uk)
MKKMDVAYLRVSTETQTEKYGLDMQRQKIIDYCERNGVTIDKWYVDGGYSGSKLDRPDIQKLLDDAENGLIGRVFIYKLDRMSRDVIDTLNLIYRILPKYGVKVISMTEEIRTENPMDKVMLTMNAAMNQYEREVIRMRMSAGMVERVKKGYWMGGGRTPYGYYYDRNDGILHVDQEQAELVRNAYMLYLDGTSCDKISKMLGFKGERIVTQILKRKSNIGYIVYNGKTYKGLHEPIVDEKTFYDVQEMMKKRSTNSHVSNGNLLTGLCYCGVCGARIRYQKWGSYHKLVCYSQDIHSGKDYMKKSDHCNNAKIKADYVEHEVEECFVQFAINIDDSKPESIDRTDIIEKQIKSINSKIKKLYDLYIERQSDNLLDMINSEEEKVRDLELEIIAERNDSNDGLSEEKISQIKHMADIWDVLKIQEKNKILKQCIDKIVIMNGNVEIHFHTI

SEQ ID NO: 539 - protein, 425 aa, unidentified
  source 1..425: note = Bacteriophage uvig_150631 from the Index of /pub/databases/metagenomics/genome_sets/gut_phage_database (ebi.ac.uk)
MKKEKTYRCAIYTRKSVAEGLDMEFNTLDAQREAGENYIFSQKNEGWKVITKHYDDGGFSGGNMDRPALKELFSDIEKGLIDIVVVYKVDRLSRSLMDFAKIVELFEKYNVSFVSVTQHFNTKDSMGRLTLNILLSFAQFEREIISERIRDKIVASKRRGQWIGGLPILGFDTNYGGRGVSINELEAQTVREIFDTYIENRSISKTIEVLNLKDVRNKQWRTRKGKVRGGQKFSKSTLARLLKNKKYIGKVDFDGKVYDGDFGYIVSEEIFQKAQEILENNNFEKCIPTKNKYNALLSGKLYCAHCGTLMGTQYTKKTPTKIYRYYICCHAQKYGWKTCPHPSLPADEIENYLVRELSEIANSTKLRNEVIESFYHNTLTQISDLGKRNTALSRSLIELRKKIKTEESIELYPKIRTIKKAGIGD

SEQ ID NO: 540 - protein, 449 aa, unidentified
  source 1..449: note = Bacteriophage uvig_541260 from the Index of /pub/databases/metagenomics/genome_sets/gut_phage_database (ebi.ac.uk)
MRKLNVAYLRVSTEAQTEKYGLDVQKQKILDHCEKKGVVIDKWYIDGGYSGSKLDRPKIQELLDDAEKGLIGTVFIYKLDRMSRDVIDTLNLFYKVLPKYGVKVVSMTEDLRTEKPMDRVMLTMNAAMNQYEREVIRMRMSAGMLERVKKGLWMGGGRIPWGYYYDRNDGILHVDEEQAKMVRNAYKLYLEGYSCDKIATMLGFRGERIVTQILKRKSNIGLIEYKGNVYQGKHEPIVDEKLFWDVQDAINKRKTNSHISNNHLLTGLCYCGYCGSKMRYQKWGRSGHRLVCYSHYKSGKPYMRKVDSCISKPERADFLENEIEDAFKKFAIHVDETENECLDQSIILERTIKSEHERLKKMYTLYISCMSDDLLELIKEKEESIKKLQKQLEENEREKGCDVEKIEEIKQMADVWDSLTVKEKNRILKECVEKIIIKGSDIEVSFVTF

SEQ ID NO: 541 - protein, 453 aa, unidentified
  source 1..453: note = Bacteriophage uvig_484218 from the Index of /pub/databases/metagenomics/genome_sets/gut_phage_database (ebi.ac.uk)
MECVAYIRVSTERQVEEGYGLESQKRDIEEYCKKNEMLITDWYIDAGLSGMDMSKRVELQRLISDISKISNIVVYKLDRLARDSVDALYMIEKLFTPKGVRVNSVHDFARYETPQDKFQTHIMAAVAEYDRNTMLLRMRGGMLERVKNGYWMGGGNTPYCYRYDKNLGYLVPIPERAEQANRAMDLFIDGMSDVKIQRLLGYKSEFVVRSIMTGIVNIGYIPYKGGVYKGLHEPIFDREKFYLAQELRKSRRKQHTYCYTEPHLLTGLCYCRECGCKMRYQKITGMGIHKIYCCSHNSYLDYLPNHNPDCNNPGAWANDIEKAFEHEILDISINLSQYKPKAKETKLQILTKQLEKQKAKLKRLYTLYAEGNDMVLDMIKTLETEIRETTEKLSAERKNGQHEQKKEFVYENIKKLADIWDGISKSQKNSILKTIIDKVIVGKDDIEIQLKNF

SEQ ID NO: 542 - protein, 574 aa, unidentified
  source 1..574: note = Bacteriophage uvig_287622 from the Index of /pub/databases/metagenomics/genome_sets/gut_phage_database (ebi.ac.uk)
MRKKKIDAPKEKPQRAAIYLRVSTAYQVDRDSLPMQRKDLVGYCEYALNISDYTIFEDAGYSGKNTDRPAFQKMMMQIRNGMYSHLLVWKIDRISRNLLDFAQMYEELKTLGVTFISRNEQFDTSTAMGEAMLKMVLIFAELERKTTAERVTATMISRANDGTWNGGRVPFGYDHNKETQTFSVNGDESFIVLEMYDLYEKTDSLVHTARELNDRGYVSRQHNPFSPVSVWTILRNPWYIGTYRYNYYKIPGRKAIKDESEWVVIPDHHTPLVSKERFDRVQKMLDSNARYRNTPGRSATQKNVNIFSGLIWCACCGAAFTASPGKLHASGYRSAKYGCPNVRKTKTCNAKYTSDTVLGEFLLNFILNVINAQKRFDQIKSPADLEAQLLRGDTFKNVAGIDSASVDALYEMLAEYSPADSVLLKKPTVKKNLDPELRKLRADKRKTERALARLDHIYLYSNKQMSDKEYLIKKNDLMNDLKEQDKSIGLLTSESWAQSLSDDDFLEQASSFIMSQRLQEREYIYFQGLAECTEPSVLRSFFLSIVDSVRMRNGHVETLTFKNGISHKFTYLAI

SEQ ID NO: 543 - protein, 565 aa, unidentified
  source 1..565: note = Bacteriophage uvig_138265 from the Index of /pub/databases/metagenomics/genome_sets/gut_phage_database (ebi.ac.uk)
MTKLKKAALYIRVSTRYQIDKDSLPFQKQKLIDYCEFMGIKDYEVYADEGFSGKNTDRPSFQRMMSELRNGDISHIIVWKVDRISRNLLDFAAMYTELKKYRVTFVSMNEQFDTSSAIGEAMLKIILVFAELERNMTSERVTSIMLNRAEHGQWNGARMPMGYKWDDKIKFPVPDEEESKTVQFIFDKYEEVHSCLTVSRYLNNNNINTKRGGKWTSKTVNDIIKNPFYIGTYRYNVRESARGKMKPKSEWIVKENNHTPIIEKDQFERCAAIIQSNLKRDTSEYRRTNYVHIFSHLLKCGKCGSGFCSQKDKMRSNGYRPSMYRCAKRMHMKDCEQKIINDTTIGNFVFNYVSNVVRVQKDFSKINSLDKFEKALLKGPAFEDIAKIEEAGLQQMYNAILYNSATSNSLSFDFLSTTQADNNTAEIILLTKEKEKYAKAVDRLLDIYLYDSEAVSKEEFAKKQKDLQSKIDVIDEKIENLKTSEANNKNLNPLDTSFIKKATAFLVSQKILSARYIDFVDLALNSDPQILKDFVSQIIEYITVDENKVTKIKFINGIEHSFIRK

SEQ ID NO: 544 - protein, 453 aa, unidentified
  source 1..453: note = Bacteriophage uvig_378326 from the Index of /pub/databases/metagenomics/genome_sets/gut_phage_database (ebi.ac.uk)
MTDIGSGSSDIYLDLYLHDGATERTVMRIALYARVSTEEQAIHGLSIEAQSEALEEWAKQEHANVVGTYIDAGISARKPASKRPSMQRLLADIERGKIDMVVFTKLDRWFRNIAEYYKVQEILERHGVNWRTIHEDYDTSTASGRFKVNIMLAVAQDEADRTSERIKAVFDSKRKRGEVVSGSVPPGIKICNKKFIVDEDKAPIMRDVFNFFIANHSVYATQRYAANTHGFLRDTSTLKRLLANPLYRGRVVDEATFDLAKELLSVRSQRNSGSPRGRIYLFKGMLHCDVCGGMMSGIVCKDFYYYRCNKHTFTGNCPNSKYIRESHVEQWLLERVVSECDAYNSRITQERTERPRIDDAGIRRKMSKLKDLYLSDLIDRDEYERDYTELRQTLEKVQEAEPPARPIDVEYVRSAVAMYDDLERPEKKEFWMRIVKEIIAYPDGTFSFVLRNI

SEQ ID NO: 545 - protein, 536 aa, unidentified
  source 1..536: note = Bacteriophage uvig_598266 from the Index of /pub/databases/metagenomics/genome_sets/gut_phage_database (ebi.ac.uk)
MAEEHKILRCAIYTRKSTEEGLELQFNSLQAQREACEAYIKSQKHEGWKLVPTEYDDGGYSGGNLNRPALQRLLKDIADGLIDIIVVYKIDRLTRSLHDFSKIVDVLEERNASFVSITQHFNTSSSMGRLTLNMLLSFAQFEREITGERLRDKIAASKKKGMWMGGTPPMGYKRKDKKLYPDESQSAKIQLIFDKYNELKSVQRLKKYLDSQHIYSQHDRPLSVGNLYRILQNRAYIGEVPHKGVWYKGEHKGIIEIGVFHKAQDTLQEHRIDRQRYEPQKSLLCGKLYDDKGNRMSPCWSTGSKGKKYRYYVSQAVIKCKSDKIGKVSKISLLEIETFIDKWFNKQFKEDKSVFANLLKSYSVNDTKQILNSIQNKTIEQKTQRILLGRVDLLPEEITLTIYQEQLCEYIRSLYENRPIKELFKESLKTSLVFYVKYHIAVIDNGAKAIVGERIEKNTNKTLVQLLIQAFNISHDILQGKQVKDLCEKYQLTDRYMRKILTLRFLPAKVILSILDGTQGREITAKQLFEQANQHK

SEQ ID NO: 546 - protein, 448 aa, unidentified
  source 1..448: note = Bacteriophage uvig_289409 from the Index of /pub/databases/metagenomics/genome_sets/gut_phage_database (ebi.ac.uk)
MKQRAALYVRVSTEEQAKHGLSLQEQLNSLKAYAEKNGMDVVGVYSDAGISARKPYTKRPDLLRLLSDCEAHKVDVILFIKLDRWFRNVGNYYAVQDILDRCGVSWQATKEDYETRTASGRLKVNIMLSVAQDEADRTSERIRFITEAKKAKGQSTNAKAPLGIKVVNSHYTIDPETADIARDMFAQYIALQSALGVSKYMRERYGITRTYNNFVRYIKNRLYIGEAYGVENAFPALIDKKDFDLANAILARRSTRNSSENADRVYLFSRLLVCRECGKSMQSETKIKGENGKTYTYIYYRCRTKMIKGTCKHVHRVKEDVLEDYLLREIVHLIEAYRFQVEKRAKKEKAPAVTPESIRRKMQKLKDLYLSDLIEIEDYKKDYAGLKEQLETLEMVQKMAPPPTPISEIKCQLEEYPSMTRAQKKAFWARTVQRIEADDNGAFFVTPV

SEQ ID NO: 547 - protein, 567 aa, unidentified
  source 1..567: note = Bacteriophage uvig_57389 from the Index of /pub/databases/metagenomics/genome_sets/gut_phage_database (ebi.ac.uk)
MRMKLHREEEHRKAALYIRVSTMYQIDKESLPHQREELTRYAEYALHISDYEIFEDAGFSGKNTDRPAYQEMMARIRQHEFTHLIVDKIDRISRNLLDFAAMYDELKKLDVTFISRNEQFDTSSAMGEAMLKIILVFAELERHMTSERVSAIMVDRAKKGKWNGANIPLGYDWSEKAGYPVENPQEVKIVQMMFDMYEKGYSSNRLTQYLNDHGIRGKRNGLWTTASVRQVLTNPFYKGTLRYNYRHKARGCIKKESEWIVIEHNHPNIISEEQWEHVNEILKSHSVTRIRKKHDHAFSGLLTCLCGGTGGARLDKPRQNGVRPSYYECNTHWRVSKTLCNNNLAMSDMLIGTFVFNYLKNMIRVQQHMGELETPEAMEAELLKGDCFHDISGIEKASLQKIYAVFCKNSNVAYQESEALRYDDPAVIAGNQVKELEKKRQAHERALERLNKAYLYAEIGLSEKEYLQNRQEIMQAIQDIDQKIQVIQPDSNSEDDIAFLEASSNFIIKQELLSDEPIQWLDFALHVSAATIHQFLCAIVTKIVFYQRRILSIEFKNGVVHRFLYRE

SEQ ID NO: 548 - protein, 557 aa, unidentified
  source 1..557: note = Bacteriophage uvig_25407 from the Index of /pub/databases/metagenomics/genome_sets/gut_phage_database (ebi.ac.uk)
MKRMKCYLYTRVSTSMQVDGYSLDAQKDKLRKYAEFQNMLVAGEYCDEGKSGKNIEGRPEFLRMLRDIESGKDGVSFVLVFKLSRFGRNAADVLTSLQRMQDFGVNLICVEDGIDSSKDSGKLMISVLSAVAEIERENILVQTMEGRRQKAREGKWNGGFAPYGYKLVDGQLQIAEEEAEVIRIIYDKYIHTTMGTARIASWLNEHGYSKVCRHNNKREAFTGSFLIGVLDNPVYCGKLAYGRRHNEKIPGTRNQYHIVKQKDYALYDGIHEPIISEEDWQLAQKQRQQTNKRQLKTHSLDHEHVLSGLLKCPVCGGGMYGNVNRKKKGDGTYYRDYFYYACKHRLHVDGKRCDYHHQWGEEIIDGAVEEIIHKLVNTPAFEQGIREKIGGKLDTAELNAEMEALRKQLRQLTGTKDRLGEQIDALDFDDPHYTRKAQDLQERQNRVYDQIASIEVSIAEVQTRMDNIRQHRISTDNVYQFLLYFDKLYDQFTDLEKKTFMNSFIERVEIYPERRSDGRIVKRIEFRFPVYFNGSKITGLGWDETDMSENVMVLAKL

SEQ ID NO: 549 - protein, 453 aa, unidentified
  source 1..453: note = Bacteriophage uvig_351737 from the Index of /pub/databases/metagenomics/genome_sets/gut_phage_database (ebi.ac.uk)
MEMIKVGLYDRVSHDEQALYGDSLRTQIEALRKYAKEKNYIIVDEYIDDGYTATQLNRPGLQRLLQDIQDGKIDMILFTKIDRWSRGVRNYYKLQDILDEHNVDWKTIWEEYDTTTAAGRLQINIMLAIAENESNVTSDRIKVVFKNKLERGEVISGSVPLGYRIKDKHLEVVEELRPLVRDIFNNYERLMSLSKLVDYYKDKHQGLTYWRLKRMLENYLYIGMHVSDYGIYRDFCTKIIEPEQFERVQRLLAMNAKHYKKAKSKNEYIFKGVLRCADCGRKLGGNAGRKTYKYPSQMKNTYRCNWHYRDKTCPNNYNITEKMIERRLLEQIKPELEKYLLTIDIKTKEYKSTASIDIGKINKKLEKLRDLYMDDLIDKDHYKTEYERLTKLLQEKEKVEKPRIIDEKSIQQFLSMDIELIYKDLTKAERRRLWLSIIDHVVVNRETFEITFL

SEQ ID NO: 550 - protein, 570 aa, unidentified
  source 1..570: note = Bacteriophage uvig_155989 from the Index of /pub/databases/metagenomics/genome_sets/gut_phage_database (ebi.ac.uk)
MEEQKQIRCAIYTRKSTDEGLEKEFNTLEAQREAGENFVMSMKHQGWVILPERYDDGGFSGGNLKRPALKRLMADVEKGIVDMIVVYKIDRLTRSLLDFAQLVQTFEKNNCSFVSVTQHFNTCDSMGKLTLNILLSFAQFERELGAERVRDKIAASKKKGMWTGGAIPLGYDVNNKKLVINPAEAETIRFIFEDYKRTRSQIRTVEDLNEKGFKPKTWKTKTGKIVGCEMFNHAMISNILNNPIYIGMVPYKGELYKGQHKAIITQELWDETRKVKKDNIGTAFRPCRSVKNSLLKGLLECSCCGTMTPTRSKRGNKYYEYYTSLKAVKEGANNAHCQIGSIPAGAIDNFVLDKVKKIFQTPELQEELLKEFKRQNEDFNGADVHNIVQDIGQAFQYFEPATVHEFITEVVEKVIVYTDHIIIKLRPMSADLFERGAIEKDSHYNEKLLELSYPIKFGRKRGCVQIVEPNQPSGETCERDMKLYNAVTQAFYYKQVMDDQKISLSELSKREKLDRGYMGQILRLTTLAPDIIMAIIEGRQPKLLTARRLIRDHFPYSWEDQRRELGFNPA

SEQ ID NO: 551 - protein, 432 aa, unidentified
  source 1..432: note = Bacteriophage uvig_321891 from the Index of /pub/databases/metagenomics/genome_sets/gut_phage_database (ebi.ac.uk)
MKRIIAMYLRVSTLDQARNGYGLGDQEVQCKKYIDLYYPNDEVEIYKDDGYSAKNLERPEMARMLDDMKKGKIHTIIAFKLDRLTRNVVDTYKLIKQVMDYNCSLVAVVDRLDITSANGRMFVGLLSLISQWEREVISERTIAGLEQMVRSGKYPCGGKAPYGWNKTEDGKLVINEDEAEIINYMTDCYIEGYSLKDISKMVFAKYGYRKSWRHLKELLIRKLNIGVFEFHGASYDDFVPPIMNLNKYNELLKMAAHREVHSLEKQTYTFHHLVYCSCGEMMQHVCTIKHNSGVSTIYRYYYCSKCNKRVNQSFLEKEIFETLFLEEFRIKTIEKHKKQELILSSLDVKKEEVFNAYKENIIDFDTYKFTMAKLEKERSLALKELTSLDIVSNSKYFEMTQDEKYAYVHDMISKIIFDFDEQIVLSIQFKKK

SEQ ID NO: 552 - protein, 438 aa, unidentified
  source 1..438: note = Bacteriophage uvig_151301 from the Index of /pub/databases/metagenomics/genome_sets/gut_phage_database (ebi.ac.uk)
MQRAALYIRVSSEEQAIHGLSIAAQTETLDAWAQENKIYVFDHYIDAGISARKKASKRPELQRLLEDVKSGQINLIVFTKLDRWFRNIAEYYKVQEVLETYHVDWKTVQEDYDTSTASGRLKINIMLSVAQDEADRTGERIKAVFESKTLRNEPISGKVPLGYKIENKHIVINEETAPIAIDLFNKYIAIRSISSLRKYLMDTYGIAHSHTAIRVMLKNERYIGRAHDQENYCPALISQKTFDHVQEILNIRAQRSSLERTGRVYLFTGIVYCAECGNRLSGHVVAQKYIYYRCTRYEKLHLCQHKKRTSELVLEKWLLENLLTEFMKYNERLEAEVQRAKPLVDTARIRRKMEKLKDLYLNDLIERDIYEKDYTALSAELNVATKKPVIGKPVNIDKLSDSLATYSTLSREGQKEFWSRTVRRIDITNEDVFSVTPI

SEQ ID NO: 553 - protein, 515 aa, unidentified
  source 1..515: note = Bacteriophage uvig_522525 from the Index of /pub/databases/metagenomics/genome_sets/gut_phage_database (ebi.ac.uk)
MYKRIGLYARYSDTKQDDGYSIEYQMSECQDYLNKQGLSLTKTYIDQAITGTKVAGREAFHELLNDVKNELIDVIVVYKFSRIFRNAYESHKYRKLFKKHNVRLISITQLMDDDTSAGRLMINVLADIDQFQSETISDFVKSSMREMAKQGYFTGGTVPYGYKLETVFDNGKKKKKRYTPDEFEKEVVKKLFELYADNYSLKYLQDYTKSIGASTRQGKPFGITSIARMLRNDFYIGVLRYNAQGHEPIVVYDVIPPIIDKVLWDRVQQRHKSQNYVKPRKRKDLYSLTGKIICGKCGKHFFGIRSASVQRGKKYDYKYYVCSTSKTYAECTCKRVRKDFLEKTVLNEIKKHILNEKAIYQIANEIIAKLGENPDSQKNKLKQLKKELSTVKSQISELLELRSLKLVNNAYVAEHMKKYEERAKEIDIQIMSIEQQTKMTISRAMIVDYLNKMMSISDTTDDEVLQTIFNNFVEKIVIDNEVIEVFLFTSPTTEQIGHKLPHGQPEWSLYTKTKR

SEQ ID NO: 554 - protein, 580 aa, unidentified
  source 1..580: note = Bacteriophage uvig_517329 from the Index of /pub/databases/metagenomics/genome_sets/gut_phage_database (ebi.ac.uk)
MSEKIINCAIYTRKSTEEGLEQDFNSLDNQYEFCTNYLKSLNDPTLHLLPTRYDDGGYSGGSLNRPALQCLLADIRCGLVNRVIIYKIDRLTREIRDFFKLLDVFEKYNVEFVSVKENQYYNTTTAIGRLMVNMFLVFAQFERENAGDRIRDKIATSKAKGMWMGGCPPYGYDIGDRCLVINETEAQNIRFIYQTFCNTHSLADTTEALNSGGIRTKCYTTRQGRTFGGRKFSVKTVQRILQNPLYKGMVTHRDKQYPGQHAAIIDATQFDLVQAIFAAHKDKREARRCPQKASGGERETAALTGLIFCGCCGSAMTPSYCCKGDIRYHYYRCYRRASKLEDKCPINQIRTSEIDRVVMEQVLAILKSREFFVQYISHHHEFDVSTAFALFNNLDDVWNSLFETEKRRILRELLAKVTIFKDKIVLDVKKSGLAGVFAELSQNNLLAEVEYKENETFQISIAYRATRLANGAKIIVPATAKEESRFNGSLRLARQIAKGFAWRKMMESGLSLQELTASAKTNERDIRFAMRLSMIDPAIVESVLSGKSPEFLTYAFMKKHPIPLLWSDQRKLYGFEERKQ

SEQ ID NO: 555 - protein, 540 aa, unidentified
  source 1..540: note = Bacteriophage uvig_11457 from the Index of /pub/databases/metagenomics/genome_sets/gut_phage_database (ebi.ac.uk)
MVFAIYSRKSVFTGKGDSIENQIEFCKEYVYKNYPDEDIKESDFKIYPDEGYSGGNTNRPYFKKLLEDAENKKIDCVVCYRLDRISRSVLDFSALIQKLNKLDISFVSIKEQFDTSTPMGRAMMYISSVFAQLERETTAERVKDNMYELAKQGRWLGGHPPYGFDFKKIIYYDEQMKQRKMCQLTVNEEQMKIAKEVFEKYLEYNSIGRVVTYLNEKGVKGARGGEICSRNVQSILRSPAYVKTSNEVFIYLKDKGCFVAGIPDNMHGSLLYAKKSQSPIVAVARHEGVIESDKWLKVQEILDKNAEKAPRAGTGKVALLSNLLVCGKCKSNMILNYKSNSDIVYYVCSKRKRQGKKTCDCSILRTDKIDKLVLDHIKKVDVKKIIEEYNNIKESNTEEKKLVELEVKNKKKKIKDLELQVNNLVNQLANFSNSTASTYIIEKIEELNKEITDIKFEIDKLDIDKISISKDDLNLDILIDNIKKFNSSLDNLELSQQRLLLSSIIKNVIWNDEENSLEINYLGLENIDNYGKKSHFCNDK

SEQ ID NO: 556 - protein, 568 aa, unidentified
  source 1..568: note = Bacteriophage uvig_285452 from the Index of /pub/databases/metagenomics/genome_sets/gut_phage_database (ebi.ac.uk)
MEEQKKVRCAIYTRKSTDEGLDKEFNTLEAQREAGANYILSQKHQGWVLLDERYDDGGFSGGNINRPALKRLIHDVEAGKIDMIVVYKIDRLTRSLADFSKLIEVLDKHKCSFVSVTQNFNTYDSMGRLTLNVLLSFAQFEREVGAERIRDKVAASRKKGMWMGGKVPFGYMLINKHLEINPTEAEIVRLIFNKYSACKSERDVCTFLKAGGYCINARKQKNGTELPAKEFTVSKIDYMLRNPIYIGKVVHKGTVYDGQQEAIISKELWERVENTRLGNRHGKLKPSRVVRNALLKGMLECGCGCNSSMIPTRTRKKNRTYEYYVSLKAVKEGYQHCELGSIPVGELDKFVLSKIQNILKSPLLLNELLKYLKPDMPEIGMNELLQKTKAPEDFFTYLSQESLRQILERLISRVIIYKDKLVIRLLPLGALLLEKSQTADLQASEEHSGLAELVYHISFSRKRGHMKVIPAEESQTAVDETLLNALVKAHNWRDKLENSDMSLRELARKEKVAHVYISKMMKLTYLAPDIIDAIIVGTQPQSLKISDLLKSPIPASWSEQRTKYGFNS

SEQ ID NO: 557 - protein, 593 aa, unidentified
  source 1..593: note = Bacteriophage uvig_325705 from the Index of /pub/databases/metagenomics/genome_sets/gut_phage_database (ebi.ac.uk)
MARKNPKTLDAAHPLSCVLYIRVSTKLQVEKGESIDAQHFELTRYADNHDMRVLGEYVDAGFSGKNVQGRPQFRQMMDDIIKAQPSKRPAYVLVFKLSRFGRNAADTWNSLQTLQDYGVELCCVKDGIDSGTSMGKAMLSIAAVFAEMERDNIRTQTMSGREEKARKGYWNGGQAPFGYRLVDKGNKFKELEVDEDEAKVVRRIFEMYAYENKGSMAIATWLNNHGIKKKPRGNARMDTFSSGTVQRMITNPVYIGKIAYGRRRTETIEGTRGETHVVKSDGYEIHDGQHDAIIDDATWAAAQALVGTRKPNMKTHDDGHVNMLNGLLVCPVCGRKMSSKPNRGKLKKDGTRGKTTWAYYCPHTSKARGASCTFKSQYPQECVDAEVVQLVSLASRSDAFVDALRRRIDDATDIEQLKEDIERIEGEKAANDKRMRMLITQIDSLDTADRSYERKFNDLQRRLDDLYDRDAGLSEALDETQAKMTTAEKRMDGERRLLEELDRIPELLEVADEQTRFDLIHEAVSEVHILPDKNPRKERVVANVTFKCPVRFFWEEIPGVANGYTPMTPDSLGQNNFRDDEAHVETVAILGRR

SEQ ID NO: 558 - protein, 490 aa, unidentified
  source 1..490: note = Bacteriophage uvig_205806 from the Index of /pub/databases/metagenomics/genome_sets/gut_phage_database (ebi.ac.uk)
MKAALYTRVSTDEQAEHGFSLEAQKKRLIEYCNKNNIEIYKLYSDEGISGHSIVKRKALQEMLQDAKEHKFNYVIAYKTDRISRNLLDLLTIKNQLDEADVELLLSDEAIDTKDDAGMTMFSIMGAFAELERKKITERMMSGKRQKLMNEHIKLKNGRVPYGYLYDDENKKYIIDESRRSIVELIYKLASQGWSYNKITRHIAEETAANSSDSKKKWYISDIRAILTNPMYKGYSGISYYYNFNDRAKKPKNSAILYKATNVEPYFTEEYWDTLYSQLEKKTQYFKRKHPIDSYIFSDVLFCATCGLKIGTRQHHANYLYYVCNSKHKMYDNDHICDYAININKFNNWFIEFIRGIDENNIKLSVSKPKDLDKELQAVRSQISLKEKNREVLLDKLMNGVIDDTEYRLASNMVIASLNSLKSQEKELSDKMDSLKEKEQTKRYNRLKIKALKVLVNDWDNLTDQAKKTLINSSINKIMITKDGIQEIEFN

SEQ ID NO: 559 - protein, 445 aa, unidentified
  source 1..445: note = Bacteriophage uvig_119010 from the Index of /pub/databases/metagenomics/genome_sets/gut_phage_database (ebi.ac.uk)
MKNKRVALYIRVSTEEQARQGLSLDAQLTDLRAYADKHKYNIVGVYTDDGASARKKPFSRRAFKQLIEDIKQNKIDRVLFIKLDRWFRSVKDYYKAQEILDTHKVDWETTQEDYNTTTTNGRLMLNIKLSIAQNESDMTSDRIHFVFAQKRARHEICSGKIPFGYSVQGKKLIPNENAKYVQPLFEHFVKTQNLTEAARWMCGHGFYYTYASISHVLKNERYIGRSHGDDNFCQPLVTEELFYRAQKIIKSKKLIKRTPTGRIFLFTGLIRCPMCGHPYTGIGCVGKNNGKTYYYYQCPQSVSPFKACTHRGRVTEKKIEEALLDSFDEAYKDFQYSVKKKQKQQPVTTDVDKLKRKLERLKELFLNELIELDEYKKTHAELSAAIAEVEAPKIQPSAPLNYYLPGGIRPYYEKMTREQRRQFWQQTVDRIDLDEDNTPRITFLS

SEQ ID NO: 560 - protein, 439 aa, unidentified
  source 1..439: note = Bacteriophage uvig_115965 from the Index of /pub/databases/metagenomics/genome_sets/gut_phage_database (ebi.ac.uk)
MTRVALYIRVSTEDQKIHGLSVEDQISSLSAWAEKEAVIVAGVYNDAGISARKPASKRPELQRLLDDVRARKIDLIVFTKLDRWFRNIGEYYKVQEVLETYGVGWKTIYEDYDTTTASGRLKINIMLSVAQDEADRTGERIKAIHESKLLRNEPISGKVPFGYKIEKKQLVIVPEDAEKVRDIFEHYIALRSVRALRPYVLETHGLVYTQTGLAQLLRNERYIGHAHGKPDFCPAILSEEVFFKAQNILKVRAERLNFSRTNRVYLFTGIVFCAECGNRLSAHVVGQKYVYYRCTRYEKTHLCSHKKRTSERTLENWLLHNLPAKIEEYNVTLQAQEKANKAGKDIAKINHKLNKLKELYLNDLISIDDYKSDYSALKEDLIKAYSSQTEHKKPIDVRKITELLSKYPDLSSAGKKEFWSRILKKIVITQNDDFLIEPY

SEQ ID NO: 561 - protein, 422 aa, unidentified
  source 1..422: note = Bacteriophage ivig_3513 from the Index of /pub/databases/metagenomics/genome_sets/gut_phage_database (ebi.ac.uk)
MKKRVALYVRVSTQEQKKHGLSVDSQIAALEEYCAEKKYTVVDVYNDAGISARKKYTKRPGLLRLLNDCEQKKIDLILFTKLDRWFRSVADYYEVQSILEKSKVPWQAIWEDYETITSQGIFKVNIMLSVAQAEADRTSERIRAVMEFKRKNREYLGGPVPLGYMVKDKKLVKNPETEHIVNDMFDYYFSTFSKYKTADYILQKYPEATEMNTRGNMQLLISNPIYAGAAYGIDGYCDAYITQEQRRKMQENSNEKVYLSGVKRTYIFSGLLRCSVCGARMGGTMNHGSKSYRCFNRKMKHYTLVRSEKKLEKYLLENLETILSNKIYVLEQAKEDTQNYKIEKKKLLAERDRVNLMFEKGRITEEYYDSRYDEISIRLKELEKKDDAQSEKSEKLKKYLSGNWKELYKQLDEQGKQAFWKN

SEQ ID NO: 562 - protein, 486 aa, unidentified
  source 1..486: note = Bacteriophage uvig_598110 from the Index of /pub/databases/metagenomics/genome_sets/gut_phage_database (ebi.ac.uk)
MIIKKVALYLRKSRKDEGNESREETLARHERMLRDYCKTHNLEIVKIYREVVSAENLEDRPQARQMLDDVADGLFDGVVVIELERLSRGNQIDQVEVSETFKSANTLIYTLQKVYDLSREDEIDEEFFEFGLFMSRREYKTIKRRLMRGRKQAQKEGYYIGAGLPYGFGKVRGDKGFVLVPNAETPIVQMIFNKFVYEDYSLADLRHYLNKNGIKPQKINEWNSVVLKNLLKNKCYLGYINYNSRSRRTQECYVGKHDAVIDDETFQKAQDKLAISSHKLKRGSELKNPLASLVKCSACGATMQKVNEYFRCLKPNCPTVLSYFDVVEKRIIDELKAELKNFNYFLENYGDEIEKQNKRKEHELALLRKEVAKKDSMINKACEMLELGVYSKDKYLSRVNIIEADKTALQGQISSLEASFSDEQAKAQKAIPILEKCLDAYWDLNAQEKNDLLKSFIEKIEYSKTKRNNRWNSNIDDMQLKIYLKI

SEQ ID NO: 563 - protein, 440 aa, unidentified
  source 1..440: note = Bacteriophage uvig_161644 from the Index of /pub/databases/metagenomics/genome_sets/gut_phage_database (ebi.ac.uk)
MNTNKRAALYIRVSTEEQARHGLSLSAQLENLQQYAKNKGYDIVGIYTDDGASARKSPFSRKAFKQLMEDVQWNRIDRILFIKLDRWFRSVRDYYKAQDILDAHGVDWETTQEQYNTTTTNGRLMLNIKLSVAQNESDMTSDRIRFVFEQKRVKHEVLSGFAPLGYKIKNKHLVPDENASIIANAFNQFIAYPNLQQLTNWFHSQGIHYNVTSIRKLLRNERYVGRNKGDLEYCPPIVSDQQFYTVQDMLDKNLTVKRTASGLVYIFTGLLRCPICGHKLTSSCAYSGTHKYKRYRCSRHWRNEDCSFNRGIAESKLEKQLLAHFDDLYEHFNSAVQEEQKNNARIDTQVIKKKQERLKELFLNELITLDEYKKDYAKYAAMLPSEPRPSIQPSLYKGMKAADIEQLYKALPDRQKQAFLRQIIDYIDFDADLKPIIHFK

SEQ ID NO: 564 - protein, 444 aa, unidentified
  source 1..444: note = Bacteriophage uvig_116390 from the Index of /pub/databases/metagenomics/genome_sets/gut_phage_database (ebi.ac.uk)
MRVSTDQQAKHGDSLREQQETLDEYIKQNKNLKVVDKYIDGGISGQKLNRDEFQRLLDDVKNDQIDLILFTKLDRWFRNLRHYLNTQEILEKHNVSWNAVSQQYYDTTTAYGRTFIAQVMSFAELEAQMTSERIKSVFSNKIQQGEVVSGKVPLGYKIENKRLVPTPDKDIVIDLFDYYVRVGSLRKTTTYLEEKHGIVRDYQSVRKLLTNEKYIGKLRNNPNYCEPIIDKDVFETVQLRLSQNVKTSGSHDYIFRGLVRCADCNGSMSCSTLKSKYIKKTDGEVSYYIRSCYRCTRRRNNPTRCKNKKTYYERALERYLLDNIQTNIAMHVRTLKKEVTKKDSVKRKKDALFVKIERLKKAYLNEIIELDEYKRDREMLENEIANLKEPKINKNIAPLKKVLSDDFFEKYEKASINQKNELWRSIIESIEVSVDGYITINFLP

SEQ ID NO: 565 - protein, 462 aa, unidentified
  source 1..462: note = Bacteriophage uvig_236553 from the Index of /pub/databases/metagenomics/genome_sets/gut_phage_database (ebi.ac.uk)
MKRQTAKLNDKLLLRVAIYIRVSTDQQAQDGDSVRDQLATGQKYIENHENMILADTYVDDGISGQKVKRDDFQRLMNDVRAGSIDLIIFTRLDRWFRNLRHYLNTQDVLDKNGVSWTATEQPYFDTSTPHGRAFVNNSMIWAELEAQNDSDRILSVFDDKVENSEVLSGSTPLGYRIENKHLVPDDDAPTAAAIFEYYRSNGNLAMTLRYMETEFGLIRSSASLKNMLTNTKYIGEFRTNKNYCPAIIDRDLFDDVQRLLKINIKSGKNHDYIFSGLVVCEECEHTMSGCQQRNSRILADGTRVVYKYNSYRCRQGITLHRCPNHKVMLESTMEKILLARIRPELENYIAEYEVANRPAMRTDSKRRNLEHKMQKLKELYLNDLITMDEFKVDREKLMQQLDKIKSDDSQPMKDLSYLKNFLKTDFENIYVSLSIPEKRELWRSIIREIRVDHERNVRIIFL

SEQ ID NO: 566 - protein, 456 aa, unidentified
  source 1..456: note = Bacteriophage uvig_370958 from the Index of /pub/databases/metagenomics/genome_sets/gut_phage_database (ebi.ac.uk)
MKRAVAYGRYSTDMQREESIDAQFRAIGDYCQRNEIELVSTYADEGISGTTDNRPEFQRMIKDAELGAFDYVIVHKLDRFSRSKYDSAIYKRKLKLLNVQLLSVLENLDGSPESLILESVLEGMSEYYSRNLSREVKKGMRENALKCKFNGGTPPLGYDVDENKNYVINAHEAEAIKLIFDMFTKNYSYSQMMRKLNDLGYKTKRGREFTRNSFYEILNNERYVGTYFYSKEDYDGFKGKRNYHKKRNKNNMIRIENGVPAIIDKETWAKAQEKLKNNRNLNRTNKNGRFYLLKGLLFCGECGSPMSGNMQSNNQGNRYYYYKCNRKSRTHKCHAPVVRAEKIEKEVLDCFEDVIFTKTNKDAVIDSMLKFLDKETDTTDHKKSLEKELAVVEKQIDNILDAIMSGISSPSVNDKLKELETKKETLKASISRCNIIGSIINSVGEKSSALFLYGNV

SEQ ID NO: 567 - protein, 550 aa, unidentified
  source 1..550: note = Bacteriophage uvig_299740 from the Index of /pub/databases/metagenomics/genome_sets/gut_phage_database (ebi.ac.uk)
MQREDLINYAKYVLNIDKYEVFEDAGYSAKSTERPAYQQMMSRLRDREFSHLLVWKIDRISRNLIDFSEMYNELKKLGVTFVSKNEQFQTDTPMGEAMLKIILVFAELERKMTSERVSSVMISRANKGQWNGGKVPYGYDYDKTTKEFTINPVEAAVVERMFTMYETCPSLLAIARELNSEGITTKSGIAWTPVTVSRLLHNIFYTGAYRYNRLCESNGANKTPTFERKQEDWVIYQNHHPAIIDKARQDRVLEKLASQKRGGWEMDRGKSYMRKNVHIFAGLISCGVCGSTYQSTSDKMRSNGYVPSVYLCARRRRFSDCDNSSVSDAYLGPFVLNYVANIIKVQNSFGKSTSVDTLESKLLRGESLAGVTGIEQKGLLELYDLLRQKFTDVEFTPSLLKSNETKKPATDEKDLLLSDKRKAERALQRLQQLYLYEDDEKAISDKEYVIQRQEIQDNLARIDKRLAEIEKSESKRNISDDDFVKQATYFIMVNKLNDRRYVNYSKFIQSMDKAVIKEFVQSVISKIVVLDSKIVSIRFMNGIEHKFLYG

SEQ ID NO: 568 - protein, 471 aa, unidentified
  source 1..471: note = Bacteriophage ivig_1066 from the Index of /pub/databases/metagenomics/genome_sets/gut_phage_database (ebi.ac.uk)
MKRVALYIRVSSDEQAKFGDSIREQQETLTEYVERHDDMKIVSTYIDDGISGQKLNRDEFAQLITDVQGDQIDLIIFTKLDRWFRSLKHYLNTQDILEAHNVYWFAVSQPYYDTRTAQGRAFIAQSMTWAELEAQQTSERTIAINISKVKNGEVITGSTPFGYSIKDKHLFPDDNAPIALAIFEYFDQTSSIAGTAKYLKETFGISRTRPGIRNMLKNRMYIGKYRQNNNYCPAIIPEALFASVQRKLPLNVKSNNKNDYIFQGLMMCGCCGRKMSAGQATRYGRPRKDGTKKHYPSVSVYKCRYHISDKRDCPNKKTIKETVLEEYLLDHIKEMIQFEIVAIENKKKQVIDTKARRRKIEEKLDRLKAAYLDDVIGLDEYKKDRQELQETLATFKNKPSADISNKKSDLEELLYSGLFDHYPVLTKLEKKEFWRSFIDSITMDGERNITVKFLESTYVLTDTDGRASFRR

SEQ ID NO: 569 - protein, 528 aa, unidentified
  source 1..528: note = Bacteriophage uvig_441476 from the Index of /pub/databases/metagenomics/genome_sets/gut_phage_database (ebi.ac.uk)
MPYCLYLRKSRTDLDAEANGETETLARHEKILLDLAKRMHLDVTEIYREVVSGETISSRPVVQRVLNEVENGLWDGVLVVEVERLARGDTIDQGIVSRAFKFSNTKIITPLKTYDPNNEYDEEYFEFGLFMSRREYKTIRRRLTQGRISSAKEGKHTASTPPYGYDRVHVESGKGYTLIPNEKEAPVVEMMFDWFVNGELLEDGSCKNLGTMAIANRLTSLQLPTPRGGNVWSQRTVYWILHNPVYTGRIRWGYKKDKKMIVDGVVKRKRVISSEKDQVLVEGLHPAIISEDLFEQAQSIFAEGGTPSVTANRELKNPLSGIVVCGICGAPLRYKIGYNRCSNMLHCRTRGCECKGSYFDLVEKRLLEALQEWVDHYKMSWDDMPEETHSLLTLKKQAYDTSIKELNTLTKQLDKTHDLLEQGVYDTDTFLSRSKSLSEKIATAEKNIQKLSADIQNERLRENNRKNLIPMAENLIDVYWQLPTATAKNEMLKEVLERVEYTKLQAGNRSGKGKDDFELILYPKLPKS

SEQ ID NO: 570 - protein, 586 aa, unidentified
  source 1..586: note = Bacteriophage uvig_112613 from the Index of /pub/databases/metagenomics/genome_sets/gut_phage_database (ebi.ac.uk)
MPFKKAIETMPNCCHRAAIYIRVSTNHQIDRDSLPLQREELINYAKYALGIENYEVFEDAGFSAKNTDRPDYQRMMKMIRSGLFSHVLVWKLDRISRNLLDFAAMYEELKRLNVTFVSKNEQFDTSTAMGEAMLKIILVFAELERKMTSERVTATMLSRAASGKWNGGRIPYGFSYDCDRREFSICTEEQNITLLMCDFYESSHSLLYVSRKLNELGHRTRAGNLWSPVQVRKILVNPFSVGDYVYNQTSLSTGTQIPNKEEDYIVFEGHHPALFPKERQQKIVSQLSRNSRLKSGSNVSVKQKNIHVFSGMIFCENCGQMLTSSTGKALSGDGWRPSIYLCPSKRKHISEGCHDTTDSTVGEFTINFILNMLNAQRNFALIRTPEDLQRLLLYGKVFDDVDHLGEEGLNEMFTVLSENLPANTKSGLKKKAKKPVTNPEITKLKKEQKKLERAMERLKRLYMYSEDSMSEHDYITERNRISEAYEDIETRLSEISTCEHTERSISDQDFIQQATAFVLSKKLSGSSYINYRRLAASTDAQILKDFFNSIIDSITINTDGQVGSIVFKNGLLHRFIYSSAEKSQGS

SEQ ID NO: 571 - protein, 573 aa, unidentified
  source 1..573: note = Bacteriophage uvig_184056 from the Index of /pub/databases/metagenomics/genome_sets/gut_phage_database (ebi.ac.uk)
MAVTPSISKKITAPKAAIYIRVSTHWQVDKDSLQVQRRELIAYCQLVLGINDYVIFEDAGYSAKNTDRPDFQKMMTQIRSGDFSHVLVWKIDRVSRNLLDFASMYAELQNLGVTFISKNEQFDTSTAIGEAMLKIILVFAELERNMTSERVTAVMLSRANNGQWNGGRVPYGYAHQKGSGSFSIDDTEGEVVKRIFQLYEERQSVLYIANTLNDEKILTRAGGTWNPASIHRILTNPFYYGAYRYNIRKGTNGPKRSDSEWVVVEDHHPSLISKERFDVMQYRLKRNKRGGNQRGISVEKKNVHIFSGLLVCGHCSEIMTATPGNRRADGWTPSNYACMNRRKGSSLCEGRYVSDVIVAPFVLTLISNILTAKDKVGARTEPATLEKRLLSGAVFCDVKHIKPDGLNQLLSILKSGISGLEYSPEFKNSQPNDMASEVESLKDQRRKKEIALRRLKSLFLYGSEEIPETEFILEQRKLIDDLNAIDAKLLKLDVDNAGLQSLDDAFVEKASYFIMVERIMNGDRDDPASFIRNVDLSVVKSFLNTIIRKIVILSGKVSSIEFKNGITLEFSYE

SEQ ID NO: 572 - protein, 495 aa, unidentified
  source 1..495: note = Bacteriophage uvig_111591 from the Index of /pub/databases/metagenomics/genome_sets/gut_phage_database (ebi.ac.uk)
MKTGALYIRVSTHMQDELSPDAQKRLLLEYAKANDILVSSDYIFIETGISGRKVDKRPEFQKMISLAKTKPAPFDSILVWKFSRFARNQEESVVYKSLLRKQCNVDVISVSEPLIDGPFGSLIERIIEWMDEYYSIRLSGEVTRGMTEKALRGGYQARPPLGYKIAVKGEPPIIVPEEAKIVRIIFQKYVYEKQGYFDIARYLNSLGYKTSHGKSFEARSIDYIIQNPTYCGMIRWNRTENETNRIKDKDEWIITEGHHEPIISKELFDAAQDRYKSTYRPRGARPSSTYRHWLSGLLKCPHCGRTMIAKRVVKKSNGANYAYFTCYGYSKGKCLIPSNVSSLKLEPAVLSSLKEILDTKTLSFEYKVIEQTEQVDEKALLEEQLQQIALKEQRIKTAYREGIDTIEEYKHNREIIERERDEIQQKIYELESVDMDTSDDKAIMLKKIQNVYEVVSSSDYTDQQKNEMLKTIVDKYVYDKENDTLNAYYYLAKPQ

SEQ ID NO: 573 - protein, 433 aa, unidentified
  source 1..433: note = Bacteriophage uvig_577010 from the Index of /pub/databases/metagenomics/genome_sets/gut_phage_database (ebi.ac.uk)
MDIIRAALYIRVSTEEQVREGYSVEAQRDNLKRYAKNKGYSVVGVYADEGITARKKYTNRKEFMRLLDDVEAGKIDVILFIKLDRWFRNVGDYYKIQEILERNNVGWTATTENYDTTTANGRLYVNIRLAVAQDESDRTSERIKFVFEKKVADGEAIWGLAPFGYKVENKKVVIDEDLYPIVVDTFEAFIKLRSVNSVCVYINEKYGTHYSYNIFKRILRDNTAFYYGTYRNNTSYCPPYLSKAQYEIIKEISDSTTTIRSSGKKYDYIFSGMLECGYCGKRLVGGGSTRRDNGKAYYGYRCTGYRGGTCSNKISELKIESLLFAALEDEVKKYKVDYEIKQKKKKPAYINKSSIEKKIARLRNLYLNEVIEIDDYTVEYRKLQDKLKEYEESINKVEDNKDFTALDNLLKSDFKKIYNELSNIDKRTLWHSV

SEQ ID NO: 574 - protein, 533 aa, unidentified
  source 1..533: note = Bacteriophage uvig_476025 from the Index of /pub/databases/metagenomics/genome_sets/gut_phage_database (ebi.ac.uk)
MKAVIYARYSSDNQREESIEGQVRECQSFAERKGYTVIRTYIDRALSGTRADNRPQFQQMISDSTLREFQYVIVWKIDRFSRDKFDSVKYKYALKSSGVSVISATEPIDGSPEGQMMESVFEGISVYYIKDLAQKTSRGMTENAIKGKFNGGTLTFGYTIDENHHFQLDPVNAPIVLDVFTRYSEGETIHSILDDINSKMSNNGRKFTYHFLNWMLNNRRYLGEYKFQDTVNNEAIPPIISQELFDKCQHRLNVNKHKAGSFKKNKEKYLLTGKIFCGICGATISGISGTGKCKSIYRYYKCMNVKKHKCNKKPVQKELIENIVLNAALDIFKDKALIRKISKACFDLQSKESPMLPALKRRLRENQKEIKNLMNAIKAGIVLKTTKSELEKLEAEQEQLEINIAMEKLVKPVIPQEKIQAWLMNFAAADLSDQSQKQRIIDIFVNSVYVYDDRVVIFFNYKDGERYVDFSTLDDLENPAGSNEKKTNTHENECSPLIKSGDPSGNRTRDTLIKSQRKIMPVNGSAMRFRCLN

SEQ ID NO: 575 - protein, 465 aa, unidentified
  source 1..465: note = Bacteriophage uvig_382772 from the Index of /pub/databases/metagenomics/genome_sets/gut_phage_database (ebi.ac.uk)
MPEKILRCAIYIRVSTFEQSVHGKSLQAQKEYLEHYAKEHNMSVVGVYADEGKTARKELKKRKAIHALIEDVKQEKIDVILFWRLDRWFRSLADFYKVQDVLDEYGVRWISASEPGINMETRDGRLQLNVVLSFGQNEVDTTSERIKFVNEASIKNGRLIFGEANMPFGYKSGVVDGKKCMIKDPETERMVIDFFRHYKKHQGKQDALKYMQRTYGIYFSYAMLKTMLSSEFYKGTYRGYPYCPAYLTEKEWNEIQEISVRNVKRAPSGRVYLFTSLMRCPSCGQKLVGTGCSSISNRKTGKKRTYCYYRCNKALADHLCPNRHRVSQNLIEQYLLENLSSEYEKYKIRSNKINEEKKKVRKAKNPAQLSKEMERLNLLFQKGRISFDYYDEEYQRLEEELAFAASDPSLEEPKRNYSELEKLLRTDFKEMYDSLSLENRRAFWRSIIKQIHLNDDCTIKEVDFL

SEQ ID NO: 576 - protein, 502 aa, unidentified
  source 1..502: note = Bacteriophage uvig_512136 from the Index of /pub/databases/metagenomics/genome_sets/gut_phage_database (ebi.ac.uk)
MPYCIYLRKSRKDMELEQYGDGETLARHKRTLLELARKQNLTIGEIYEEIVSGESIEARPQMQKLLRDVENNLWDGVLVMELERLARGDTKDQGTVAQTFKLTNTLIITPQKTYNPLNEFDEEYFEFGLFMSRREYKTINRRLQAGRLASIKEGNYIGSLPPFGYDKVRLTDAKGYTLAENGESDYVRMIYDLYVNKNMTPGKIADYLTSIGVQPKKGGKFTMHSVRDILRNPIYIGKVRWNWRPNKKSVQDGRIIVTRPRSTSESTVLIKGKHQAIISEEIFNAAQKKHGSNPRTQIKHELKNPFAHLMYCRECGKAMVYRTYANSEPRIICANKYCEISSSPFEVIEKSVIDSLTEKLGELEIAAAQPEQSSAEFKTYRSAVKKIEQELEQANAQQNKLYDLLEQGIYTQEIFLERQKALEQRRKDLQNKLVAARENAPQPINYEERITKVRQVLELYPTLDVKEQNTLLRSVIKRITYYRPKSDRYHQNLAEIDIELVF

SEQ ID NO: 577 - protein, 523 aa, unidentified
  source 1..523: note = Bacteriophage uvig_156529 from the Index of /pub/databases/metagenomics/genome_sets/gut_phage_database (ebi.ac.uk)
MSIKAVSYCRYSTDNQTENSIMYQMAAAEEYCKKHGMVLIDVYSDEAKTGTNTNREGLQRLIKDCDTSKFDAIIIYDQSRLSRNISDWFELRQLFSSKGKQLYSCNEQLSSDYLNSNAFLSEGIHALFAQNHVIETRRKTLDGVKSKAKQAGFCGGTPPLGYDIVNGEYVINEKEAPAIRKMFEMYALGKSYDDIMQVLYREGYRSKRGNKISSNAIYYLLRNERYVGIYYWNKYQYTVMRKRITRKENPEIVRIENAIPPIIDKETWTMVQEQLSKNKGASTRTKRQYLLSGLIKCGYCGGTYTGFASKNRRSGEETVYYTCSTKERLKTCKAKNVRGDEIESFVYYTLKDRIFNQDLAEQVADMIINQSKDIVTFDSAAVKREISKKKQAINNLFQAIENGLNAEITTDRINTLQDEIKALELSLEQSMKQNDTVIDREKLIQSLLEDAKKIDLDFEHRRAIIRKYVVKIEITDDTVNLHCIGDSSTTGGATPQYGVLLFAIDRISLKNIVRQVPTPTSKV

SEQ ID NO: 578 - protein, 458 aa, unidentified
  source 1..458: note = Bacteriophage uvig_594437 from the Index of /pub/databases/metagenomics/genome_sets/gut_phage_database (ebi.ac.uk)
MKRILRAALYIRVSTEEQAKEGESLPAQESALVEYANEHGYRIVDIYKDAGVSGTRKVEKRPEMMRLLDDVKQDKIDIVLFIKINRWFRSVSEYWRVQRILDDYGVMWNAITEDFKNETAMDKAMINFALTFSEYFAGVQGEHIRFTLERMAKNGEPISGNQPYGYMIIQGPKHKMIAKDLSTGDYIPDMYQKYIECHNIAETTRYLNAKYPDQKFAETYTTRRRICTRAYTGYHWARPDYYPPYVTQETFDEANAILKARAERQAHSKHTPPKLFSGLIICPCCGRRLATTYKKPTKGYPNGFRKYRCSMAWNRTGKCSYRHELYQWVIEKYCVEHAMSELKSFTLKAKTIDTEALKTEQEREKLEAQLERLNDMYLYGKMDFEYYKRHMDEVTDKLDRIKRGVKPADRSVDELEALHIDNFESAYAALNEENRAMFWHKLLKGITVEKTHVTGLIF

SEQ ID NO: 579 - protein, 543 aa, unidentified
  source 1..543: note = Bacteriophage uvig_366074 from the Index of /pub/databases/metagenomics/genome_sets/gut_phage_database (ebi.ac.uk)
MRYSSHAQDDGFSIEAQEKAIKKYADEHGYDLQYYYCDKAKTGTNSKRPEFQKMIADSKKKLFQVCIVHKTDRFARSRYDSIFFKSILKKSGVELLSVTENFGNDPEGKVMEGIAEVFAEYYSNNLAREVKKGLDVIASQGLHTGGLPPLGYDVSEKRLVINESEAEIVRLIFDRYSNGYTYNDIAKELNAKGYKTKIGREFTSASLNSILNQRKYIGEYVYNRRSSKNINGSYNSHKNKPEEEIIRIPDAVPKIIDEKIFEKVQQRLEMNKRKAGHYKSKSNYLLSGLIVCGECGFHYQGNTRAAGRGSQSMYSSYRCGKKQNHKIGCGNSEIEKNRLETFVLEQMQKYLFSDNAIKTIVKQVNEYNISVSKSKNSDLALYEKQLNEINKQIKNITLAIAKGVNQELMIEQIKSIDSSKKDLEKRIEESKITAFPPIVEEDVRKALSKFKEFMKENNYIECKNFINQYIDKIIVYRDKVEVTFKVASAIFNASFPDDKSGMLKIIIEISRTELKTLPKQRRKVPANGQFGESYLKQYQITTK

SEQ ID NO: 580 - protein, 498 aa, unidentified
  source 1..498: note = Bacteriophage uvig_573612 from the Index of /pub/databases/metagenomics/genome_sets/gut_phage_database (ebi.ac.uk)
MPKTEEKQAAKAVIYARYSSDRQREESIEGQLRVCEDYARRNNITILHTYADRAMTGRSDQRPEFQMMIRDAATMAFNVILVYKLNRFARNRYDSAKYKHKLKKYGVKVVSAMENIADDPSGILLESVIEGMAEYYSAELSENVLRGMTQNALEGKWPGGVIPLGYKLDKGGRLIINEEKAPIVRMIYQMFLDGMSVARIERELNDKKYTTDAGKVFSRSRVYYILHNERYIGTFQWKDIKKEGIIPPIISKEAFHAVQERINAMKSSSYRTNNNYLLAGKAFCASCGAKVSGTSGKSQNGNKYCYYGCSHHHRSARYEYCGTKNIRADVLEKLVCDKTHEILSSKKAIKEIARQAVKLRPRNESELEIRAIKNHISSCQKKIDNCIKAIENGVMSNALVESLNENERTLDVLKEKLAKASLMQGSGLLTEEKIQFFFETIREKAKETEKYNDILLTSLVRAVYICNEYVEIQYNYAEQLPILTNPVRIESCSYKCTN

SEQ ID NO: 581 - protein, 580 aa, unidentified
  source 1..580: note = Bacteriophage uvig_191392 from the Index of /pub/databases/metagenomics/genome_sets/gut_phage_database (ebi.ac.uk)
MAKLVSRISEALSEMKVAIYIRVSTQYQVDRASLPVQREELINYAKYVLGITDYAVFEDAGYSAKNTDRPDYQQMMTRVRTGEFTHILVWKIDRISRNLLDFAAMYAELKQLGVTFVSKNEQFDTSSAMGEAMLKIILVFAELERNMTSERVSAIMLSRATDGVWNGGKVPFGYSYDKRNKVFSIYEPEAKIVTYIYDQYEAVRSLTSVAKILNEKGVRSRTGKPWNPTTIRTMLTNPFYAGTYRYNYRDESGKSHVVKAAKEWVMVEDHHPAIVTRERQNRIAALLQSRQRGVYSSGMTYQRKNTHIFAGLLRCGCCGSSMASTIDRERSDGWRPSIYMCTRRRRFNDCQNKYVSDITLGPFILNFIANMIRVSNSFGKSTSIETLEKKLLRGDVFSNVDHIERPGLEELYAHLRSGFDEMSFESTGVQAAESASQIQERDLLLTEKRRLERALNRLRSLYLYSEDEMPEKDYIVERKQLTDRLGEVDARLEEVEKLAVDSLTLSDEEFMAKASYFILTQQLQDKRYVNYERFIRKIDPQIVKDFLNSIVTNFCIKDGLTTSILFKNGLEIQFSYKSTE

SEQ ID NO: 582 - protein, 572 aa, unidentified
  source 1..572: note = Bacteriophage uvig_587167 from the Index of /pub/databases/metagenomics/genome_sets/gut_phage_database (ebi.ac.uk)
MANRKWRPACYCRVSTIHQIDKESIPTQVHLLSNYCAGVLGCKKEDIKFYIDAGYSGKNTKRPEYEKMIEDVKAGRRNVVVAYKLDRISRNLIDFAKFLESLKEHGAEFISLSESFDTSSVMGRGMLKLIALFAEMERGITRERVMAVSKDIISRGGHLGAPTPLGYDYDKATKKYSINEKEAETVRWIFKTAGDGESTTYISNYLNDHNITGKRSGYWTSTTVFHILHNPAYTGKYVWNRRSSGRYKLKDKSEWLTQEKVYPVIIPAAEWQSVQDKLAARRKGKNVKRAVQSHLFLGLLSCALCGHDFRARKDKARADGYRPSVYSCPAYTGHAGCTNGHYYSDMQIAPLVTQYIENVDKLANMQDLVNSRADLARVLLFNMPDVVQISNIDTLYGLYGRTNQEPVPENIAMVRAFADAEKLKADKELEKYYKALDRLKDLYLFGDANMSKEDYVTTRGKIESKIAAVISARDETTREVSPRLDVDAKKYGPILKLLRGNVGYKMIGDKVGFDLLAEFFHDVLSGIVVDKSGIVKIIFKNGVAHCLCNKETGAGVVMEYPRAGRRKSLTTR

SEQ ID NO: 583 - protein, 498 aa, unidentified
  source 1..498: note = Bacteriophage uvig_595287 from the Index of /pub/databases/metagenomics/genome_sets/gut_phage_database (ebi.ac.uk)
MDSTNIKAVVYARYSSHSQGEQSIEGQLSAAHTYADAKGYTIIHEYIDRAVSGRTDNREEFQKMLSDTTKKQFQVIILWKVDRFGRNREEITFNKYRCKKNDVRVEYVAENVPDSPEGVILESVLEGMAEYYSLQLSQNIRRGQYEGAKKHNVLSGNIPLGYKAVDKKYVIDESTAPVIKEIYTLYASGCSTAQIIRQLNSEGHRTRYGRPFTKSSLRTILKNESYIGIYTYKDLIRDEDAIPAIVDKDTFYKVQEMLKVNKRKPHSSWNYSDFLLTGKLYCGLCGSEMIGTSGYGKLGTKYNYYNCLSQRKKTGCKKKPIRADLLEPLVLKEAQDLLADDAILEFIADRTLEFYAKSNFTGEKIDGLKNKIAEVESGIKNLIKTIERGIVSDTILDRVQELEAQKTALEKALASTELERGFDLTKNEIQFFLKSLRSEDIEDRNFQKRLVNIFINSIFVYDDKIDIAFNFKEDLETLTLADIQHAKAGAEFACCASS

SEQ ID NO: 584 - protein, 433 aa, unidentified
  source 1..433: note = Bacteriophage uvig_329173 from the Index of /pub/databases/metagenomics/genome_sets/gut_phage_database (ebi.ac.uk)
MRAALYIRVSTEEQARHGLSLAEQKESLERYAEAHEMEVVGIYEDAGISARKPYKKRPALLRLLEDCKSGKIDTILFIKLDRWFRNVAGYYDVQTQLDKYGVTWQATKEDYETRTASGRLKVNIMLSVAQDEADRTSERIKFINEGKKAKGIPSGSKTPLGITIKDGRYEIDQNTAEIAVDMFSAYIKLKSTLALRRYMFDTWGIYRAYNNYKKAITNRLYIGEVYGIENAFPALINTHDFELAGEIIKQRSQRCCDMRKGNIYLFSGILRCRECGKIMQSNVVKGYKYYRCRTQFRMNAQCDHRQCVREDVLESYMLNSIEQMAAKYHGQYDEAGKKPALSADKIRKKMSKLKDLYLADLIELDEYRKDYEDLKQQLSQMEPQKPKYFDRDALHREIEEYPNLSPQMKKEFWTRTVKRIEADNNGAFFVLPR

SEQ ID NO: 585 - protein, 500 aa, unidentified
  source 1..500: note = Bacteriophage uvig_170733 from the Index of /pub/databases/metagenomics/genome_sets/gut_phage_database (ebi.ac.uk)
MNEKINAVIYARFSSHNQQEQSIEGQLRYCSDYANKNGMTVINSYIDRAISGTSDNRPSFQQMIKDSNNRKFDIVLVWKLDRFARNKYDSVVYKNKLKKNGVKVISVTEYLGEGTESVLLESLLEAMAETYSRQLSENVQRGMRESAMKGLSTGGNIPLGYKIIDKKYVIDEAEAEIIRYIFNNYADGKPKKQIIDEINAKGWRTKKGCKFKYNSFNTILKNRKYIGEYIYQDLAVKDVIPAIVDVDIFNQVQSQMTQNKRTAGTQSAKREYLLSTKLFCGQCGGAMTGETSTGRHGGKYGYYMCRNKKFHKNNCEKKRERQEELEEFVVQKTVAMYSDKQFMQLIAKKVVKLYNDEFGSNHIATLEENKHKLETRFDELSNALVKTTNARMLDKFNKEIEQIDIELQELEIEIARENSIAHAQMTVDDVIDFINEVMKGNIKDKEFQKQIIDTFVNAIYVFDDKLVIYYNGSSEAEKVNYSDMLKDMRKDATSNTFAPP

SEQ ID NO: 586 - protein, 573 aa, unidentified
  source 1..573: note = Bacteriophage uvig_400465 from the Index of /pub/databases/metagenomics/genome_sets/gut_phage_database (ebi.ac.uk)
MAIIEQIRKQKAAIYVRVSTQWQVDKDSLLVQKRELIAYCQLVFGIQDYEVFEDPGYSAKNTDRPAYQEMLSRIRTGEFSHLMVWKIDRISRNLLDFTQMYTELKNLGIIFVSKNEQFDTSTAIGEAMLKIILVFAELERKMTAERVTAVMLSRANNGQWNGGRIPYGYNYDKGTKEFTVNPKEAKVYNLVCDLYEEKQSLIYVARYLNETGYRSRQGSLWTPATIRKLLTNVFYTGAYRYNVHKEGSGYKRREEDEWITIENHHPALIDDVRYDRFCFLLSRNVRGGVRPGDTYIRKNVHIFGGLLRCGICGANMSATLDRIRANGWRPSIYGCSTRRKSSNGCSNKYITDVYLGPFVFNFLANILRTSNSVTEGTTPDSLEKRLLSGPAFADVSHIHPDDLNSLLAQLRSGMTGMEYKSAATKAADVDTQANERQILEDRRRHDENALNRLKSLYLFGEDTISEKDYIIERQKIIDDMNRIDAKLFKFVEASADALKSDLAFLEQASYLVMVDQLLSNRTIDFEKYIRSIDPTIPRAFLHSVISKIEVADGRVTSIQFTNELIVRFIYDRR

SEQ ID NO: 587 - protein, 449 aa, unidentified
  source 1..449: note = Bacteriophage uvig_393882 from the Index of /pub/databases/metagenomics/genome_sets/gut_phage_database (ebi.ac.uk)
MLKRAALYIRVSTDQQAKHGDSLDAQIATLKDYVSTQDNLTIIDTYIDDGISGQKLYRDEFQRLLEDIKKNRIDIILFTKLDRWFRNLRHYLNIQEILDNSGVTWLAVSQPFFNTDTAYGRSFVNQSMSFAELEAQMASERIKAVFENKIRKGEVVTGSVPFGYKICDKKLIPNENAPIAKDIFKHYSIHNSIRLTVEYLFNEYDITRSSRTIKHMLRNRKYIGEVSGNKNYCPPIVDKETFEKVQNLLDKNISSIAKRTYIFSGLVVCSCCGKKMTGRYRKRKYIKKDGTVMYYTKKVYRCNGNTYKRNKCPNKINIAEEILEEYLLNNIKADAENFEAKQKKIAVSAPEKNNNSKILKKIERLKKAYLNEVISLDEYKKDRKELEQMMIQVKPKETIVFKSNWFNKNIESTYRDFDEEEKRFVWRSVLKNLIVDPHSKITINFLTKN

SEQ ID NO: 588 - protein, 445 aa, unidentified
  source 1..445: note = Bacteriophage uvig_587924 from the Index of /pub/databases/metagenomics/genome_sets/gut_phage_database (ebi.ac.uk)
MRAALYIRVSTEEQARHGLSLSDQRVALESYAKSHDMAVVGLYEDAGISARKPYKKRPALLRLLDDVKAKKIDIVLFIKLDRWFRNVGNYYAVQEILEQNNVVWQATNEDYETQTAAGRLKVNIMLSVAQDEADRTSERIKFTFEGKRLRGEAISGMVSIGYKIENKRIVKDPETEEAVTAFFQKYLACGSVFQAQDHLRLEYGIALEYQRVSDMLRRPVYYGCCYGIEGYCPSYITKEEFERIQSMRHRVTRRSPKNRIYLFSGLMRCGECGASLGARTETTGGVRFYNCPVRYNRNGFCANSRSISERKVERYLLDTVEAKMESIRHEVSKLQTIETAKDYSSEIQLLRAKISRLKDLYLNDLISIDEYKADKSSMEARIIDLEKKQEPLAFPNFPALQHILSDGWRQLYSELSVEDKREFWRIIIKEIRWYPDRHLEYDLSL

SEQ ID NO: 589 - protein, 473 aa, unidentified
  source 1..473: note = Bacteriophage uvig_151182 from the Index of /pub/databases/metagenomics/genome_sets/gut_phage_database (ebi.ac.uk)
MKNDVAIYLRKSREDDELKEETLARHETMLLDYCKRNNLNIVKIYKEVVSGESIANRPQMQRLLDDVSRGLYAGVVCIEIERLSRGNQIDQVEILEIFKSSGTKIYTLNKIYDLSKEDIDEEFLEFALFMSRREYKIINRRLQRGRNQSRQEGYYIGSILPFGFDKIRGERGYILVPNDNAKVVEFIFNQYLDGVNVATITNYLNDNGIKPQNHNKIWTPPTVRNVLKNKLYIGMINTNNRGGTVKGKHEPIIDELTFNRVQEQLAKTPKVTNRRKLSNPLAGLVYCSECGRTMIRKINALKFEYITCPSLKCNTRSLKLETLESILLDELKKELKGFNYFLDNYGEQIKTEKEKVAVELAILETELEKKLNMIETACEMLEAGIYTKELFTRRISVLEDDIKAMKENISNIKNTPLEDDTRAYKAIPILEKVLENYNVLDAKEKNLLLKSIVERIDFTRLEDDTSLNITLLL

SEQ ID NO: 590 - protein, 453 aa, unidentified
  source 1..453: note = Bacteriophage uvig_383745 from the Index of /pub/databases/metagenomics/genome_sets/gut_phage_database (ebi.ac.uk)
MQKVTRAVFYIRVSHKEQVLHGLSLSAQKKHLQDYAKAHNLKVVNTYVDEGVSGRKPIRLRPALQEMLADAQENQFDLILFIKIDRYFRSVAEYHECQKILDKHKVKWNAINEDYDITTASGRAFVNMKLTVAEMEADQTGERIRDVNDYKVKQGQMITGAYPFGFKIEKRDGRSYLIHDPDTEHIVIDMIEHYLTYNSLRGVTLYINKKYNLNLLQDSVKRLLKNPYLCGQYRDNPNFCEPYISKETFDKMQEIRKKNIKVQRNHNTFLFSSLIRCDNCNALLSGFANRFNSNRVYNYYRCRNRFNQKTCNCPNVSERKLEKYLLENISTEFQNYFKKIELEEMKNNQKNTKTEMAKIRAEMDRLNFMFQKNRITSAVYNAEYEELESRLSDLHTVKTSKKRDLEPIKELLESDFVSVYSTLSQQNKQAFWRGIIKEIRQLGEPDHYAIIFL

SEQ ID NO: 591 - protein, 540 aa, unidentified
  source 1..540: note = Bacteriophage uvig_64089 from the Index of /pub/databases/metagenomics/genome_sets/gut_phage_database (ebi.ac.uk)
MKKAVAYARFSSDMQREESIDAQVRAIKYFASQYGYDLAHVYADRAQSGRSDARVEFKRMIADSSSGAFDTVIVHKLDRFSRSSSDAIYYERILNHNGVQLVSVIERLDSSPEGQLMKMVILGMNQMYSQNLAREVMKGLKENAYQCRHTGGIPPLGYDVVDGKYVINELEAQAVRMIFQMYAAGAGYGEIIQAMYENGFKTKRGNRFGKNSLYDLLRNEKYTGVYIFNKSASADIRGKYNRHAMKPADEIIRVENGIPQIVDKNLFWQVQKKMNDNKHKNARHKAKVSYLLSGKLFCGHCGRAMTGEMHRYREREYGYYVCSSQKNKKGCNKKSVRKEWIEQAVVDDINNILFKPERLQSIAENIYKASHSEKPDERLVELKKQVTEIDRKIGNLTRVLADGLDSDSVRAAVVELENERRTLSAKIYELDLVPDAQRMSVAEIKNSISKMADFSKMDDSGKKRFIELFVQRIYLYDSDDGFRIRTVLSVTNPVDSLDISDFPDFSNITGSVPSPPFISENNIRYFPLGIVCLDSKRPFH

SEQ ID NO: 592 - protein, 445 aa, unidentified
  source 1..445: note = Bacteriophage uvig_563074 from the Index of /pub/databases/metagenomics/genome_sets/gut_phage_database (ebi.ac.uk)
MKRVALYMRVSTEEQALHGYSLPAQKDALHQYAKDHSMTVVGEYVDEGISGRKSASKRPALARMLRDVEAGKIDQILFIKLDRWFRSVKEYYRVQEVLDRNKVTWRTILEDYNTESADGILKVNIMLSVAQNEAERTGERIKFVLDNKVQKKQVVGKQPYGYKIAIVEGEKKSVIDEETAPVVHDIFNTFDRTNSASLTTKYINEKHGTDFSAVFIRRLLHRSAYAGEYMGISGYRPQYISRERFDKNQEIFRGSHIKRTPTGRVYIFTGILFCAHCGHRMKGKYTTVKYYCCPRATDDYSCENHKHISELKIEKYLTSHIRRLMSEYILAAETKESVTKRSDAASEVMSLRQKIERLNDIYLEGNMNKETYRRRTEQLKQNLVQAEEQYQRSQPKNVSHLKEILNTDFLSDYDLLTDENKRSLWRRIITRIEMDDQQNLKVFFS

SEQ ID NO: 593 - protein, 481 aa, unidentified
  source 1..481: note = Bacteriophage uvig_256936 from the Index of /pub/databases/metagenomics/genome_sets/gut_phage_database (ebi.ac.uk)
MKKGAIYVRVSSEEQARDGYSIDAQIKALKDYAIKNDIFLEEQYIYKDEGISGRVAKKRPAFMEMIKTAKSKPKKFDVILVHKFDRFSRNREDSIVYKSLLKKECGINVISITEHLDPDDKMSIILEAFLEAMAEYYSINLSEEVKKGQLEKHSQGGLQTNPSFGYNVENNKLIINEQEEKIVKLIFESYAIENKSMMDIAKKVNSLGILTKRGNKFENRTIYYILNNPTYIGKLRYTPGRKNTYDFNDPNTILVDGKHTPIITNELWDLTQLKLSKNNIWKKPKSRIDYSIKHWSKGIIRCKECNCTLVTSGVGKYRCNGYNKGKCSNHTTININEAENLILVQIKKDFNEGTINNIVSNKKEKKSINEYDIITSSITSLEEKEERIKQSYINGIDTLEEYKQNKEMLLKEKEKLTTKLLTLEKPSIEKYKKEIIENGKKVYEILTNDKISLEEKNDIVNKLINKVEYDGEINNLTIFYN

SEQ ID NO: 594 - protein, 502 aa, unidentified
  source 1..502: note = Bacteriophage uvig_110275 from the Index of /pub/databases/metagenomics/genome_sets/gut_phage_database (ebi.ac.uk)
MNNKICMYLRKSRADEELEKTLGEGETLSKHRNALLKFAKEKKLNIVEIKEEIVSGESLFFRPKMLELLKEVEAKKYDGVLVMDMQRLGRGDMKDQGIILETFKNSNTKIITPQKTYDLNNDFDEEYTEFEAFMSRKELKMINRRMQGGRVRSVEEGNYIATNPPYGYDIGFINKNRVLKINEYESNAIKLIFKLYLNGNGASFIANELNNLGYKTKLGNNFSNSSVLTIIKNPVYIGKIAWKRKDIKKSRTPGKVKDTKTRDKSEWIIADGKHEAIIDMNTWDKTQEILKGKYHIPYQLTNSPANPFAGLITCGVCGKKMVMRKARGINRLMCIYKCGNKSTRFDLVESDCFEALKEHLKNYTAEVENELIEENTNIYTYQVSQLKKELTTLNNQRLKLFDLLERNLYDEDTFLERSKNINDRIDTVSSTLKSIEKLLKKKTKSSYQEDIQFFQSVLDAYNETEDIAKKNSLLKTILYKIEYTKLNRSKEHVIKVFPKLRK

SEQ ID NO: 595 - protein, 503 aa, unidentified
  source 1..503: note = Bacteriophage uvig_239325 from the Index of /pub/databases/metagenomics/genome_sets/gut_phage_database (ebi.ac.uk)
MLAYGYCRYSSDMQNEKSIEQQKNELEDYAQKNNIKIKKYYIDEAKSGKYDTRDSFQELINDACKTKEIQAVLVWKTDRFARKAMDSLYYRNKLEKFGIKLISITQPIDTETPEGKLMSTLLAGMDEYFSQNLASNVKRALKSNAQNCQFNGGIAPLGYNIINKHYIINEQESKIVQEIFNMYIDGMSYIDIALNLNMKGYKTKKNKPFAKTSVLSILENEKYTGKYIFNKGTKNSHRGMRKDAIVYEDAIPQIISKEIFKKAMERRKTKPHAENTAKRVYLLSGLIKCQCGGSYTGYLSTKVKNGNIFKYGYYKCNRRDKLNKCTMPFLKQELLENYIIELLTKKLLAEDNMQKLVDQVIQQYKNLQNEATEDVLSLKSRIKEIKTQMDNIVDLICRGMGTDVLACKLKDLEQKKYNLEDELNFKNSNFNFDIKSEDVIKILKRDVDELQDSSKSELKKLIRKWVKKIEVTNDFLDVYFYSEDFLPHQMVARNGFEPSTCRV

SEQ ID NO: 596 - protein, 503 aa, unidentified
  source 1..503: note = Bacteriophage uvig_578984 from the Index of /pub/databases/metagenomics/genome_sets/gut_phage_database (ebi.ac.uk)
MNNICIYLRKSRADEELEKTLGNGETLIKHRKALLKFAKQKNLNIVEIKEELVSADSIFHRPKMVELLQEVENNQYSGVLVMDIQRLGRGDTEDQGVITRIFKESHTKVITPNKTYDLDDDYDEDYFEFESFMGRKEYKMIKKRMQGGRIRSIEDGNYIATNPPLGYDIHFINRSRTLKINENEAEIIKTIFNMYINGNGASSISNYLNSLGYKTKIGNSFSPSSVLMIIKNPVYIGKVTWKKKEIKKSKDPNKVKDTRTRDKSEWLVADGKHEAIIDIDIWNRTQEILNNRYHIPYQLTNAPVNPFAGLITCGICGKKMTMRKLRGIDRLMCTYKCGNRSIRFEHVEKEVLKSLRSYLEEYKMEVNRKPKKNDIDLYVKQITLLNKELNTLNNQKLKLFDFLERGIYSEDVFLERSKNIESRITTLSNEIENLEKLIKKEEKTISQNSIVVFENIIDAYEKTNDISLKNRLLKQIVYKIEYFKRPDQRNNDFKVVISPKLLR

SEQ ID NO: 597 - protein, 502 aa, unidentified
  source 1..502: note = Bacteriophage uvig_316826 from the Index of /pub/databases/metagenomics/genome_sets/gut_phage_database (ebi.ac.uk)
MSETTQIGVIYARYSSDKQRDESIDGQIRECMAYAEREGITITNTYIDRALSAKTDDRPEFRQMILDSNKQAFDYVLVYQLDRFSRNRYDSAIYKAKLRKNGIRVISVKENIKDDPSGIILESVLEGMAEYYSAELSQKVMRGMTDNVLQGKWVGTVVPYGYKLSNNRQLEINEHEANVVRKLFDMYLQRHTLSEMASYMNANGHLTHKGKPFNTNSIKAIISNEKYIGVYSWGSERIENAIPPIIDKNIFEKAQHKRNLRAKKKGNRSELYQLCGKLECGRCGGNYVGSTGTSKTGAMHHYYVCSNRRRKNACKAQNIRRDALDDIVISQTLAILNKPNVVNKIAEYAASSGKNLQSETVAQIDIIDAHIRDLKKSLDNYMTAIANGFISDVLKHRIETTEQELKDHIEIKTSLENTIIPVELTEDHIRFFLLKMAKENPSTLRGRARIIEAFVHHVTIYEDHIEIVFNYKNELSEFHDKTLESSLLNDLVTQKGFEPLAF

SEQ ID NO: 598 - protein, 452 aa, unidentified
  source 1..452: note = Bacteriophage uvig_86231 from the Index of /pub/databases/metagenomics/genome_sets/gut_phage_database (ebi.ac.uk)
MERCVIYARVSTHEQAENDSLKHQIERCRAYATARGYEIVSTLSDVESGSNNEREQYLILKDMIKESVFDVLVVWEFSRISRNAKEFITITEELQNQDIGLVCIQQNIDTSTITGKAVAHLIAVISELEKDTIRMRVKDRMIQLIKSGRYVSHQPFGYKYNNKLLELVEEEALIIKDIFSRFLKGESRFIIAKHYNVDFIKIDRWLRSPLYIGKLAYKGTGKNKLKDEYILYDGLHTPIIDEDTFYNVQAILNKNKRHRINNNPNYIFSGILYCECGDKMYGTKQRTTTYYICTKKRIESKKSCNSKTIKSEEIEKVVKEELRARLKNKDIAYQKNDKESEMKIKSNEKQIKEMENRINKAKDLYYANLLTLDDYSKDISKFNQIIEQLKKDTSILEKKINKQYDSRKIKEIVMSKIDSIESDKIKFKKICNVAIDKIVIDKEGKIQVYFNF

SEQ ID NO: 599 - protein, 497 aa, unidentified
  source 1..497: note = Bacteriophage uvig_125074 from the Index of /pub/databases/metagenomics/genome_sets/gut_phage_database (ebi.ac.uk)
MKYLIYARVSERGSGFEGQTTIPMQIKICEDYIRIMGGEVFDSRSDEFISGKNIEDRPAFRSIMEELRSGTAEWDAIIVYKFSRISRSLRDSLNIVAELQEHDKGFVSATEHFDCTTTTGQLFFNMLQSFNEFERKRTADTIRDKMMSIAEAGLWPAGRTPYGYKRGGRKDNNLYVDERAAEVIRDIFNQYLSDTPVWSIVRKYRNIMSRSRIFLTLKNPVYVGAIPYGGKIFPGKHQAIINKDVFERVQAKLPTKNGNIRPKAHRYPYLLGGIIFCRCGHRMTPETAKSGRYAYYRCVDAEYCKRRISAEKVEKSVIDFFRNTMRSERIIEKTLAQIDADAAKQAENNQPEITRLKSVITTVKAERERIFRMLLSSELSQSLVNMANTKIADLDEELSGLTERLVLLENQKKIGSEAHNLAKTLLLRTRNFAEALETAGSISKEELRQILLVYIQKVVSIDDKTCDVIVKLGKSSTKDMEWYTQSVEPTTRSLSSK

SEQ ID NO: 600 - protein, 556 aa, unidentified
  source 1..556: note = Bacteriophage uvig_337673 from the Index of /pub/databases/metagenomics/genome_sets/gut_phage_database (ebi.ac.uk)
MEKFACMYLRLSREDGDSTESNSISNQRQIIKSYARDNDFKIVAEYVDDGFSGSNFDRPKFKKMIQDLEEKKFKIIIVKDLSRFGRDYIESGKYLQKIFPEKGIRFISVNDNYDSENADVSDTHLILPIRNFINDSYCRDISMKVKSSKEIKRKNGEFIGAFAPFGYKKDSKNKHKLVVDTEVSHIIERIFNMKIDGYSSKAIADFLNSIGCVTPSKHKENSGDNHTTGFIVKDSKWDAKMVNRIITNKVYIGVLEQGKTRKLNYKSKREVEVNEEDWIVINDSHRPIISKSIYALANKMMLRDVKQSADIPHILSGMLYCKDCGSSMVRRKVKSKNGYNIFYICSHYNNKGDCTRHSIKEDYLLDMTLFALKDYLKKYNELLSQVNKLDVSKITFNIDFESLNSEKRKYERLRQSLYMDLENELITSEEFERFRKNYLIKIREIEKQIATKKNILANLQEKMKNKDSLVSEIVPTDLSSLNRLTIVSFIDRIEIGENNEINFVFNNLETVNLLKTLIKEESESKSEVKKNLISINKVFGNALENKTPMQLAGGVL

SEQ ID NO: 601 - protein, 432 aa, unidentified
  source 1..432: note = Bacteriophage uvig_595969 from the Index of /pub/databases/metagenomics/genome_sets/gut_phage_database (ebi.ac.uk)
MRVALYIRVSTEEQAVHGLSVDDQKDSLKKWAEENKHKVVDYYIDAGVSGRKSVSKRPELQRLLSDVEAGKIDLVAFTKLDRWFRNIGEFYKAQEVLDAHGVVWQATYEDYETATAAGRLKVNIMLSVAQDEADRTSERVKRIMQHKRELGLCPAGKTPIGLKSVESRLCIEEETAHIARRMFEDYIATGSVNHVKKMLISEFGIMRANHHIKGALSNERYVGLNNGIKVCDALIPPEDFALVQRMLTARSIRNNGSKHTWLFSGLVWCAECGHRLVTHSTRQRGTDYFYYRCKNYELGICRHKKRINEAALEKYLLAKLPIEVQAHNAKLKAGKTKPPVDTAAIKRKMDKLTDLYLADLISREKYEVEYTALKEKLNVPPEPKPINEELVMSLLDAYDKLPPSGKKEVWNRFIRRIVVSENGDIFFELVWL

SEQ ID NO: 602 - protein, 423 aa, unidentified
  source 1..423: note = Bacteriophage uvig_177087 from the Index of /pub/databases/metagenomics/genome_sets/gut_phage_database (ebi.ac.uk)
MRAALYERVSTDEQRIHGLSLDAQREVLEEYAKNHGMVVAGHYTDAGVSGQKPLSKRPALRRLLEDVDAGKIDIVLFTKLDRWSRKVKEYYKAQDILDRHKIPWRAVLEDYETETPSGEFKVNIMLSVNQNEAQRTSERIKTVFDAKRSRGEVCSGKVPFGVRISADKCLEAVEPEASIVRDVFREYLAVRSSYIAQRYMANNYGVVRNTTAFRRMLRNQRYRGLVVDEAVFDAVQEVLAVRSQRNAPIGRVYLFKGLVVCGNCGHHAAAYFCKNVCYYRCSYRVNTGQCNFAKHVREDVIERKLLDGFLIAAERLNAELLGRRAAPPIDRAGIKRKMDKLTDLYMSDLISRDKYEVEYRELQAALSVPDPEEQRPIDIGAARSALEMYGQLDRAGQKEFWSRTIKEITLHPDAGISFSLRQL

SEQ ID NO: 603 - protein, 456 aa, unidentified
  source 1..456: note = Bacteriophage uvig_594539 from the Index of /pub/databases/metagenomics/genome_sets/gut_phage_database (ebi.ac.uk)
MDKNKKITVPGLLRTAIYIRVSTDQQAKNGDSIGEQTETLTTYVNGRDDLILSGMYIDDGISGQKINRDGFTRLIGDVCAGRIDLIVFTKLDRWFRSLRHYLNVQATLEEHGVNWISVSQPFFDTSTPQGRAFIANSMAFAELEAQNDSERIRAVFDHKYKHGEVLSGKVPLGFSIVDKHLSPNDDAAKVLAIFQRFSRSGSLNDTVRFIESEYGIVMSISNLKKAILANAKYIGIFRDNTNYCPAIIPQELFDDVQRKLTFNVKISQKHTYIFSGLVRCACCGSAASGFQHRSSHSGVVYRYSAYRCRQAFAVKRCHNKKIFIEKSLETYVLQHIKPELQKAIISYEVAAAPAADQKQKRALITRKIEKLKELYVNDLISLEEYKVDKAAYTAQLDELPAEASPEKDLTALRRFLALDLDAVYTSMTPEEKRYLWRSVIKEIRVDEQRNVTIIFL

SEQ ID NO: 604 - protein, 479 aa, unidentified
  source 1..479: note = Bacteriophage uvig_236070 from the Index of /pub/databases/metagenomics/genome_sets/gut_phage_database (ebi.ac.uk)
MDDLKIAAAYIRVSTDDQTELSPDSQIKVVREFAKQKGYLIPKEYIFRDDGISGRKASKRPEFNHMIAVAKQTPSPFSAIMVWKFSRFARNQEEAIFYKGMLKKRGIDVISTSEPIIDGPFGSLIERIIEWFDEYYSINLSTEVKRGMTEKVSRGGAVSIPAFGYDIVNKKYQVNPINAPIVQRIFIKYLNGVGCRAIANELNDLGIKTTRGNNWENRTIEYILRNPVYIGKIRWNPKRRTMRNYDDKDIMIVDGIHQPIIDTDLFDKVQKKLDENKAKYRPYITDRQNGKEYMLKGLVKCSNCGATMSMSCNGLQCIKYTHGTCKVSHYIQLNKLNEVVINAIDDTLKSGDFQLKPKEQPHEEPQELNVEFMIEKENTKLKRVKEAYEEGVYNLAEFKQRKELIESKIHSLQKQNKPPEPKLDHLLAKKKLMSRRKEIISTLKSKSTPEVEKNALLCTFIDKIIFNRSLSSVELFFCF

SEQ ID NO: 605 - protein, 573 aa, unidentified
  source 1..573: note = Bacteriophage uvig_171405 from the Index of /pub/databases/metagenomics/genome_sets/gut_phage_database (ebi.ac.uk)
MQKNQTKKAALYIRVSTHYQIDKDSLPFQRNELINYAKYALGIDDYAIFEDAGYSGKNTDRPAYQDMMRRIRAKEFSHLCVWKIDRISRNLLDFAAMYEELKKFNCTFVSKNEQFDTSSAIGEAMLRIILVFAELERKLTAERVTSIMYSRANKGLWNGAPIPLGYKWDAKGKYPVIDEDTAVVVRYIYDQYEKIHSTMKLSDKLNRENIKSARGGEWTGTTVKGILRNPFYKGTYRYNYKTQTGRIKPVEEQIIHEDNHPGIIDKEQWDRVNKILDENSTRSVAQLRSNVKYTHIFSKLLRCGQCGHTMGGGLDRARSDGYRPSRYYCTSHTSKSGCTNGVYSDVYLGPFVFNYIANLVRAQRALTDSQKPRDLERMLLRGKFFDNVAGIEQQGLLDTYNTILYGSGEDVMLQPSPEIAAQSASELELLDRDQKKYERALERIEQLYLYSEESMPEKDYVLKRNELKTMLDNIAERRAEVNSRLGLAPASSDFLEKATYFYLTNSLNQKRSLDFRKMVDTFEPKMLQDFLCSVIDHIVVVDGHVASISFKNGLTNKFIYKATKPPKSASTKP

SEQ ID NO: 606 - protein, 571 aa, unidentified
  source 1..571: note = Bacteriophage uvig_578207 from the Index of /pub/databases/metagenomics/genome_sets/gut_phage_database (ebi.ac.uk)
MDNNSNIRVAIYIRVSTLYQIDKDSLPMQREDLTNYCKYIFNTEDYEIFEDAGYSGKNTGRPAYQEMMLKIRKKQFTHLLVWKIDRISRNLLDFSNMYEELKKYNVTFISKNEQFDTSSAMGEAMLKIILVFAELERKLTSERVSSTMISRATKGLWNGANVPLGYKWNEEKKYPSPDEKEAKVVQYIYSTYIQCKSCAKVSKILNEEDIPTKRGGKWTSKTVNDILRNPFYKGTYRYNYKESARGKKKDESEWIIIDNNHEAIIDKAIWQLANETLDTNAGLVGRRYVGKIHTHIFSRKLVCSKCKSGYNASKDTMRENGYTPSKYVCSGKVRKFICDAKLVSDVVLGPFVLTLIKNIILAGNMCIDTTDELEDILLDGSPFEDVLSINQEDLEMLYVALYKVPTQKSNITYSHIKDKQPKSLEDQENEYVKKRIEKFKKEKTKYINALERLEELYMFSEEGISKVDYVIKKKEYESKLNNSEENLKQFYRMNDTEKNIQDMTFILNYENIIFNRAMNDNNELDFKMLMTNVNNKVVKDLIDMVIKNIYMKDKAVDIIEFQNGLALHFNY

SEQ ID NO: 607 - protein, 439 aa, unidentified
  source 1..439: note = Bacteriophage uvig_354904 from the Index of /pub/databases/metagenomics/genome_sets/gut_phage_database (ebi.ac.uk)
MDKIKRAALYIRVSTEEQARHGYSLAAQLEDLKAYATKKKYKIVDAYIDEGVSARKKPFNRKEFKRLLEDVKENKIDTILFIKLDRWFRSVSDYYKAQEILDAHKVEWETTQESYNTTTTNGRLMLNIKLSVAQNESDMTSDRIKFVFAQKRALKQVTCGSVLLGFKIENKHLVHSDKAPIAKAIFEYYLLHQSFSSTIKWLKQEYQITMYPASLKRLLRSELYIGKKGDDDEFTDRIIDNETFYAVQDIIKRNVKRAPSGRIYLFTGLIRCPSCGSSMSVSVTEQKNHTYIYYLCPRRYNTFDCNDKIRISESKLEASLLNTLAKQLEGYFLSITAKQEKPIKHNNAAIKKKLERLKDLYLNELIDLDTYKKDYKALQKELIPVIIKPDPIRITKKKEQIYDAIQAYSSLSKELKRSFWRSLIDHIDVSGDMPVIFFK

SEQ ID NO: 608 - protein, 497 aa, unidentified
  source 1..497: note = Bacteriophage uvig_15514 from the Index of /pub/databases/metagenomics/genome_sets/gut_phage_database (ebi.ac.uk)
MSNAIIYTRVSTKNQAEEGYSLAGQEKDCKFFAEMNNYSVLKVFVEKGESAKTQDRTELQNLMKFCIANKKNIDAIIIWKIDRLTRDVKDFYNLQDFFAKLNIKVLFARENNGDSAGDKLTRNLMGVLAQYENDQKAERVTNGMKIAFLQGHWMWRAPIGYIMKNGNIEPDPKTAHHVKKIFKLFSTGMYEQTQLIKIIEADGIKINTNRMCRLLRNPLYMGYMHKNTWAEEPIRGIFEPLISEVEFKKVQDILNGKKPVITAYKRNNPEFPLRQFITCSNCNQPLTGSKSKGRKERYAYYHCHHKDCCINFRIRKEKLEKIFVDYLKFIKPERNLLNLFEATVKDVYNEKLSVRLNSQKQVQDKLVELKNRKSKLIDFRIDGTISEDDYKFKTEQLAEEIQEHEFRLREIDEIDNDLCKCLKYACKIIENIDTLWINGDLDLKQRLQKLIFPKGLMYYSNDFRTAEISSLFIKKDASLTSYNNMVPPSEFESLSTP

SEQ ID NO: 609 - protein, 481 aa, unidentified
  source 1..481: note = Bacteriophage uvig_83898 from the Index of /pub/databases/metagenomics/genome_sets/gut_phage_database (ebi.ac.uk)
MKIAAVYTRVSTDEQAREGYSLDAQLKAIKKYAQNNDILIDSKYIFSDEGISGRKAEKRPAFMEMIKQAKSKPRKFDVILVHKFDRFSRNREDSVVYKSLLKKEYGIPVISISEPLDPDDKMSVIMEAFLEAMAEYYSLNLSGEVKKGQLEKHSKGELQTNPSFGYNVSDNKLIVNEDEANVVKMIFEQYAIDNLPMMQIARNVNALNVKTKRGRHFENRTIYYILNNPVYIGKLRYTPGRRNQYDFDDPNTILVDGQHEPIISMDLWNSVQMKLTKNSIWKKPKQHIDVNPKHWTKGLVRCKECGCTMVTCGKTKLRCNGYNKGKCSNSSTLLIADVYDLIIDNIKQVMKNGRIEHIVQSKKEKKESNQYLILQHQLEQLSDKEQRIKEAYREGVDTIDEYKENKNIILREKNRLLKEIDKVEKPKTENKKKEIIENGKKVYEILTDDKISLKEKNEVAHILINKVEYDPTSNTLELYYN

SEQ ID NO: 610 - protein, 491 aa, unidentified
  source 1..491: note = Bacteriophage uvig_246969 from the Index of /pub/databases/metagenomics/genome_sets/gut_phage_database (ebi.ac.uk)
MIAIYSRQSIDKKDSISIETQIEFCRHEAKGEEYKVYSDKGYSGKNTNRPGFENMMDDIKRGLINKVVVYRLDRISRSIVDFADFIDSLEKYNTSFISATEKFDTAAPMGRAMLYIIIVFAQLERETIAERIKDNYYERIKRGGIGGGPAPYGFDISKITIDGTKMSSYTPNGNIETVKKIFDMYTSAGVSLADIQRYLKEKNIKTASGKPWDNTKLSTLIKSPSYVKADISIYNYYKQKGAVIASPLEDFNGENACLLVGKRNSNTRKYSDITDHILAVSAHKGIVDSGTFLLCQQKLSENRQIKNLHKGKYSWLTGFVKCGYCGYSFSVRKSRTSEGETAYFYDSGKYLYKTCTHNQTHRVKDVEDVVESELIRIIEKIDFKEKEDTPVNNQNINKIKEIDAKISNLILALEDCSGVSSSYINTRIAELDMEKQELLDKISSDALNRKKIALPKIEDYNNMSFEEKRLLAKMLIDKVILTDDKIEISYK

SEQ ID NO: 611 - protein, 460 aa, unidentified
  source 1..460: note = Bacteriophage uvig_187146 from the Index of /pub/databases/metagenomics/genome_sets/gut_phage_database (ebi.ac.uk)
MKNQIVQKKIRCAIYTRKSVAEGLEKEFNTLDAQREAGESYIQSQKHEGWIVVDKHYDDGGFSGGNMERPALRELFDDIENGKIDIVVVYKVDRLSRSLMDFAKIIELFEKHNVSFVSVTQLFNTKDSMGRLTLNILLSFAQFERELISERMRDKMSAARRKGKWVGGIPLLGYDIVPEGGAIEVNHSEAQTVRKIFSYYTENRSLLQTLSYLNENDIRTKQWKTRKGVIRGGNKFSLTTLNHLLKNMAYIGKINSGGKIYDAEFEAILSEDVFVEVQKIMAYNAVEKGPQVRNKYNALLAGKVYCANCKTAMVHTYTKKTGTKVYRYYICSNATKRGWKNCPHPSLSAPELESYIVSELERISGDAKLRDEVIDSFYEKANAELAETVKNENSVKRTLTEIRKKYRRGRIRWSCAKRNRIFRERCRKSASRGKSWKTAYAAGKTDLVKFLPISGFSGGI

SEQ ID NO: 612 - protein, 453 aa, unidentified
  source 1..453: note = Bacteriophage uvig_132785 from the Index of /pub/databases/metagenomics/genome_sets/gut_phage_database (ebi.ac.uk)
MECVAYIRVSTEKQVEEGYGLESQQRDIKEYCQKNNMIISHWYIDAGLTGMEMSKRVALQELISDLKKIDKVVIYKLDRLARDSVDALNMIEKIFVPRNVEVLSVHDFAKYKTPQDKFQTQIMAAVAEYDRNTMLLRMRGGMLERIKEGYWPGGGNTPYCYSYSKETGTLVPIPERKKQANEAIDLFLQGYSDNKIRDMLGFKSEMVVRSLLISPVNIGYILYKGKIYKGKHEPIFEIDKFNLAQEVRKNRRKKKTTCINKEPNLLTGLCYCGVCGCSMRYQKWTHGKHKIYCCSRDKSMSYLPNYDANCDNTLEWAVDIEKQVEEEIIKISLNLSSEKPVAKQSKIEILQSQIKKEENRRKRFFNLYADGNDDVLLSIKEINNTIKSLKEQLETERSNTNLNRKKSVTYKNIKKIADVWDSIDKKDKNIILKSIIDKIVIVNGDIEIQLKNF

SEQ ID NO: 613 - protein, 513 aa, unidentified
  source 1..513: note = Bacteriophage uvig_293930 from the Index of /pub/databases/metagenomics/genome_sets/gut_phage_database (ebi.ac.uk)
MIIGIYPRKSVYRDNSESIKVQIKLCKEYAKIVYKGQQIDFRIYGKDEGFSGKNTNRPSFQELMRDVKSNILNVVMVYRLDRISRNVSEFSEMYDIMHAHNVTFLSVKESFDTSTPIGRTVMYILAAFSQFERESTSERVADNMHSLGASGKWTGGKLPAGMSSIRKTVDGKEHSFLVVNDERIGLVKMLYSMYLEGYTITALERYCRDHGFRTESGKFLSTSQIHCILSNPVYCSNGTAAYDYFKGHGHTVPDKLFFDGTKGLVSYGKTKQSEKRIVNDKYTISVGIHEPVIAAEDWIAVQNRFGANKFYRSNKYKVGILKGVLKCNCGARMDIRTYVKNGNQFSYYYCARMAREGKKVCDTGYIRVDTIDDAFISKLMQIKSNPSMIKVRATELDFVDINKIEAELKSIDQAIENLTGALSENSSSTAASHIIKQIEKLDASKVRLESSLYSAMQNNKIAQSEKETKDIIYNYICCLLEKFESMSYQEKNELIKKAVKKCICSNDGLHIIF

SEQ ID NO: 614 - protein, 535 aa, unidentified
  source 1..535: note = Bacteriophage uvig_306774 from the Index of /pub/databases/metagenomics/genome_sets/gut_phage_database (ebi.ac.uk)
MAKRKKKSIDSSVGVCYARYSSHRQKDVSIEQQVTACQAHAAKRGITLIDSYEDRAVSGRSDKRPAFRRMMADAEKGAFAYVIAWKSNRIGRNMMEAMLNEARLSELGVKVLYVEEDFDNTAAGQFCLRTMMNVNQFYSDNMAEDIRRGMRDNALNCKINGRIPFGYKRGEDGKFCIDEPRAAVVREIYRRIASGESFASIADDLNARGIRTSRGRQWTRTSFCRLVSNEKYRGLYLYEDIRIEEGVPRIVSNELFDQVQHALKTKKNPRGGKRNSACTYLLTGRLFCGYCKSPMIGVCGTGRNGMHYYYACKQHRNEHTCAAKSVRKYELEQSVAQAIKTYVLVPEVIDAIADSAVAYAKKLEAESPVAVLEDQLANVQASIKNLLRAIESGILTETTKSRLLELEAEQAELTRQIRVAQSTLVKVDKPAVVAWLDSLRRGEVEDEKYIETLINTFVAAVYVYDDELKIIFTHSGGSTTVPPEAIKNADTANLDDSYPVRLCRQWWTFAAPGRTAIYMAFGLFILLCPYPSRQG

SEQ ID NO: 615 - protein, 444 aa, unidentified
  source 1..444: note = Bacteriophage uvig_368839 from the Index of /pub/databases/metagenomics/genome_sets/gut_phage_database (ebi.ac.uk)
MMKGACYVRVSTENQLENYSIEEQTERLTAYCKAKDITIVKFYTDGGYSGGNVNRPGLQQMLGDIAAGIIDTVIVYKLDRLSRSQKDTLMLIEDKFLANHVDFVSINENFDTSTPFGRAMIGILSVFAQLEKDQITERFTMGRVGRARNGYFHGGAYAPTGYDYADGNLVVNEYEALQVRELYERFASGHTLHSCWIYMQDKYTTKYGGWKSETLVRNVLKNEVYLGKVKFKGKLYSGNHTPIISQDLYDRVQQMFLNSSKSDAAQTGRTYTRSPFKAKTLLSNLIYCQKCGARFHGEHGNYSCYSRTKGDKRYVIDPDCKNKKWKIEELDALVIHYITNLDFNELQPEPDALQEQQPLKPDYNARITEIDKQVEKLIELYQIGGIPINVISERIQSLAKEKNTLTEILEAPQPEALTLQDLRAAKDRFVNLLESGDLQEKRYC

SEQ ID NO: 616 - protein, 359 aa, unidentified
  source 1..359: note = Bacteriophage uvig_105444 from the Index of /pub/databases/metagenomics/genome_sets/gut_phage_database (ebi.ac.uk)
MLQVSEDYRIALYLRLSRDDKNGSLESMSIDNQRKFLLAYVHEKGWEVAQIYADDGYSGTIFERPNFMRMVEDIEAHKINMVVTKDLSRLGRNYVMTGQYTDFFFPKHHVRYIAVNDNYDSANEDNDIAPFKNILNEMYAKDISEKVRSSRMINAKFGKYMGSQPPYGYLKSPNDKHILIPDPEVCDNVAYIFQEFAKGQSVRHIAQILNNKGGLSPRAYYYQRTGRTNPHPEQRQVWGSMTIMQILKNQVYIGNLVQGKRKALSFKSKQRIVTEPDDWIICEGTHEPLIDKQIWGEAQKAIQKPYCRTVKSTGEISLFSGIVKCADCGGTLSFVTKNSNGHLYELYKCSTYSNYGKGV

SEQ ID NO: 617 - protein, 601 aa, unidentified
  source 1..601: note = Bacteriophage uvig_381374 from the Index of /pub/databases/metagenomics/genome_sets/gut_phage_database (ebi.ac.uk)
MAKRTSVENSIITGVIYARYSSHSQKEESIEQQIEECTAFAVTNGISVVGIYADKAISGRTDRRNEFQRLMRDAEKRKFDVVIAYKSNRISRNMLNALQYESRLDSFGIKTLYAKEEFGNTAAGRFALRTMMNVNQFYSENMAEDIRRGLKDNAAECKVNGSLPYGYKKGEDGKYAIDEPRAAIVREIFSKVVDDVPYADIIRSLNDRGILTKTRKPFNKNSFNRMLRNERYIGIYEHSGVRVVGGVPAIISEEVFYAVQRKLQEGLNSDGAKRKSNSDYLLTGKLYCGECGSPMVGYAGTSRNGTLHYYYTCKSRGNDGCTKHNVRRDFIEQFVVDLTRACLSRADVTDWLVSGYIELKKQAQETSDVPVMEEELSSRKKALDNIMKAIEAGIFNETTSARMRELETEIHDLERSIALGKAMFEEPVDGERMRFYLEKLRNGMPDNQAYRKELLRTMVKAIRLWDDRIEIEYNFTGTDGDGNNYRVVTEFLKGDSGSASGVHTEPPQPHQIKETSMRMSLLFGVKTVVDSNRGRLETCRGKSAMPLLEADKGMALFPQPQLLQGYANADLQKLNAARWFCFNPRRPARRQANVPTPLRET

SEQ ID NO: 618 - protein, 604 aa, unidentified
  source 1..604: note = Bacteriophage uvig_330914 from the Index of /pub/databases/metagenomics/genome_sets/gut_phage_database (ebi.ac.uk)
MCEEEIKNAGIYIRVSTDDQARAGFSLPEQKEKLLSLCEFKGYNVFKVYEDAGISAKDMEHRPKFQEMLNDVKTGKINYIVAYKLDRVTRSVRDLEELINILEKYNCYLVCDRDDVNTSTANGRFFVRMLTVLSQLEIEIVSERTKFGLNGAIKSGHLPGVVPLGYKKDGSKKTIIDETTRHIIERIFNLYLEGNSYQQISNIFNKEKVLNKSWHDTDIEKIINNRIYMGDYEQYKRIAKKIGRDTVIYMNVVEPIITRAMWEECQTQKLANQRTYTRTRTYLFFQKLVCPKCGRIMKCKGSGGKKKKYIYYNCEFCHFNLREDYVEEYMIKAIYEFLEFEQMCNSFFLPILADKKDKNTDLNLDKEIEGYIKQKERIKKAYLTGIVELKDFEEDLKKINEKLEILNNKKQELNELDVHTFTIEKVMARRDIEKISIDNGYKEKEFYKFEWDIKTKEEKQQFISKYIDNIVIDKTDTGSLDIKQINFRSSFIDKAVKLTQVGAYDYKLPFEVNHKQEMVLVSSPMKRKQVNKYLGYLREYFEIEYREDKGDRTENGMAVFDSAIPDNYELLKVIPIIDINLFKGKDITFGLVFRPTIKEIINEK

SEQ ID NO: 619 - protein, 478 aa, unidentified
  source 1..478: note = Bacteriophage uvig_394534 from the Index of /pub/databases/metagenomics/genome_sets/gut_phage_database (ebi.ac.uk)
MPKVKVGIYIRVSTQEQATEGYSIDAQTDRLTNYCKSRDWSIYNTYIDGGFSGSNTNRPALHQLMQDIKDKKLNCVLVYKLDRLSRSQKDTLYLIEDVFLKNKIDFVSLNENFDTSSPFGRAMIGILSVFAQLEREQIKERSLMGRIERAKNGLWHGGGFEPFGYNYINGQLIVNEYEANIVQEAFELFLQKLPIHRINRIISEKYGKDFHETVLRSILSTRLYTGKISYLGGIYDGQHQAIISEDTFKAAEMLLAYRKKKFSNSNPFKATKLLGGILYCAHCGARYLAKGNYSGHGDKKVYRPYYTCYSRAKSTKKYIVDPNCKNPSYAVVVLDEIIINEIRKLFIDKEYLYSAKNATATSNTVNKQKSILKQIDSIQSQISRLLDLYQIDGISIDDIQDRIKKLQHEKDVLEETLSNLKTSQKKKLTTNEVLSMEASFNEIMENGTDMEKQTIVRTLIDKIIVHEELNSFEIIWNF

SEQ ID NO: 620 - protein, 477 aa, unidentified
  source 1..477: note = Bacteriophage uvig_582769 from the Index of /pub/databases/metagenomics/genome_sets/gut_phage_database (ebi.ac.uk)
MNRVAIYVRVSTNEQAAEGYSIAEQTERCRKYCEAMKYTVSRIYTDPGFSGASLDRPAMQQMIEDAKEGRFDTVLVYKLDRLSRSQKDTLYLIEDVLLAHNVSFISMSENFDTSSPFGRAMIGILSVFAQLEREQIKERMEMGRIGAAKEGRWRGGSGVPIGYTYTAGDEGILKIDPYEAMQIKELYDLWLQGISTNEICKRFRAKGYTTKYGGWSYAGSIPCIITNPVYIGMQRYDGKVFPGLQEPIITQEVYDAAVADLERRRSQMSDNQRIAWRGKSLLSGLIFCGQCGARYFVSTCVRTNRQTHEKKTYRYYICYSRDGNSSMKKSDNCTNKRWGKEELEHVVLDQILKMSYDVDKIKPRKPKTDGQKAIASRIKVIDKQISSLLDLYQVGGIPIDQIGTRVKALTDEKDRLELSTAKETGKPVSLSEARKILSAAPQIIECGSDDDRRFLVSKLISKITIDGDDIAITWTFT

SEQ ID NO: 621 - protein, 539 aa, unidentified
  source 1..539: note = Bacteriophage uvig_578663 from the Index of /pub/databases/metagenomics/genome_sets/gut_phage_database (ebi.ac.uk)
MKAAIYSRKSMFTGKGDSVENQVQMCKDYGNRLNIDEYIIYEDEGYSGGNINRPKFQELLQDVKEKKFDVLICYRLDRISRNVADFSSTLELLQDNNISFVSIKEQFDTSTPMGKAMVYIASVFAQLERETIAERVRDNMLELAKSGRWLGGQTPLGFESEKISYFDAEMKERTMYKLSPEPKELELVKLIYNKYLETGSIHLTLKYLLSSNIKGKNGGEFASMSVNDILRNPAYVKSNEMVLDYLENKGMNVCGTANGNGILIYNKRNSKYKKKDISEWIAAVSKHKGIISANTWLEVQKTLDKNSKKDTPRQGTSKKALLSGVLKCSRCGAPMRVAYGRKRKDGTSIYYYTCTMKAHSGKTRCNNPNVRGDYLEKNIITELKNLNSEVVIKELEKCKKQLAATTENSIIKNVSKEIEEKKKEMDSLLSQLSKVESPVASEFIISKVDSLGTEIKDLEISLTKTTDKKKENSNIELNIEIVLQALNEFNDFFNSVESLKNDELTIQRKRYLLERAVDEITIDGETKKIGIDLWGSKKK

SEQ ID NO: 622 - protein, 499 aa, unidentified
  source 1..499: note = Bacteriophage uvig_103894 from the Index of /pub/databases/metagenomics/genome_sets/gut_phage_database (ebi.ac.uk)
MKQSKAKISVDIRFALLCIIRKVNRVKCVIYVRVSTDEQAKHGYSIAAQIEKLEAYCISQGWELVAKFVDDGYSAKDLERPQFQEMMEQIKAGGIDVLLVYRLDRLTRSVSDLYSILNELDQYNCKFKSATEVYDTTNAMGRLFITLVAAIAQWERENTAERVYFGMDKKARLGEWPGGTPPFGYKIEEEKLIIDPEEVKTVREIFKLSKTLGFYTIAKQLTTKGIPTRNGGDWHVDSVRAIANNPIYAGYIRWGDDGRQNKKPPREQKLYDGIHEPIIDRDEFWGLQDILDKRRTFGGKRETSKYYFSSILKCARCGHSMSGHKGGNGKKTYRCSGKKAGKNCTSHIILEDNIVKAVLTEFEGLVRDIYSDVKTSKEPIERLSVLNSELSSVQKLMKKKKTMYENDIIDIDELIATTSELREKEKELIREIKNIQKEDKTDTDELKYIIENIDTLWDHANDYERKQLMTSIFSQLIIDTNDEYRGSKYPRDVIIVAAK

SEQ ID NO: 623 - protein, 482 aa, unidentified
  source 1..482: note = Bacteriophage uvig_263922 from the Index of /pub/databases/metagenomics/genome_sets/gut_phage_database (ebi.ac.uk)
MMNTINKVAIYVRVSTNVQAEEGYSIDEQIDKLKSYCQIKDWTVYDIYKDGGFSGGNINRPALEKMIIDAKKKRFDTVLVYKLDRLSRSQKDTLFLIEDVFSKNDISFLSLQENFDTSTPFGKAMVGLLSVFAQLEREQIKERMQLGMIGRAKSGKPMMFTNVSFGYTYSPKTQQLTINQAEAVIVKQIFNEFLGGMSPLRLMAYLNENNILRNGKEWNYQGIQRILRNPVYIGKIKYNNVIYPGLHEPIIDEESYYKAQKLLDARQDEMRIKGKNRQFKAKYMLSGTAKCGYCGAPLRIKIGNKRLDGTRLKVYQCCNRYPRKYAVVTYNDNKKCNSGNYQKEDLESYVIAEIRKLQLKPEKIDKLFNKVAKIDTVQINKQIASIDNKINRLNDLYLNDMIDIDKLKADAEKFKEQKRVLEKELDKDLKIQEQEKNKEDFKKTIGFKDVTKLDYKEQSFIVKSLIDKILVKKGFIKILWKI

SEQ ID NO: 624 - protein, 533 aa, unidentified
  source 1..533: note = Bacteriophage uvig_156514 from the Index of /pub/databases/metagenomics/genome_sets/gut_phage_database (ebi.ac.uk)
MARKRINTPEATGVIYARFSSHNQREESIEQQVAECNTFALASGIKIVGVYSDSAKTGRTDRRPQFQKLQREAQKGEFDYIIAYKSNRIARNILNALMFENEMEKLGIKVVYAKEEFGNNAAGRFALRTMMNVNQFFSENMAEDIKRNQADNALNCRANGPAPYGYKTGADGKFVIDEMRAPIVQEIFNRTANAEKFVEISEDLNRRGIKTKNGNEWGKSSFFTILHNERYTGVYIFNDVRIEGGMPVIIERSLFDRVQKIMKTKKNPQGRKRADDGIYLLTGKLFCGKCKSHMIGMSGTSKNGDSHYYYICNEKRTNGTCDKKAVRRNFLENEIAKAIRRYILQPNVMEWIVQQVLSFQKGDVRQVEIANMQERHKEVKKAIANVMIAIDQGIITASTKEHLQDLESERAQLDARILVAQSEAGKAVTRESLLAYLEHFRAANVEDKECQKELFDTFVKAVYLYDDHITLIFDINDGTTEDVEISMDEVEQSLCENVRLNSVVGHQTASCRSQILGRASICLASFHDGVIRS

SEQ ID NO: 625 - protein, 475 aa, unidentified
  source 1..475: note = Bacteriophage uvig_454524 from the Index of /pub/databases/metagenomics/genome_sets/gut_phage_database (ebi.ac.uk)
MKTTNKVAIYVRVSTSYQAEEGYSIDEQKDKLEAYCKIKDWKIYDFYIDGGFSGSNTKRPELERLIDDAKRKRFDIVLVYKLDRLSRSQKDTLFLIEDVFLKNDVAFISLQENFDTSTPFGKASIGMLSVFAQLEREQIKERMILGKEGRAKKGKTMAWTTIPFGYDYSKETGILSVNPTQALIVKRIYEEYLNGKSVVKIIRDLNAEGHVGRKRPWGETITKYLLKNETYLGIVKYRGQKYEGQHEPIISQELFDLVQLELKKRQIDALKRNNNPRPFQAKYMLSGLLKCGYCGGSLGLYVTSKNRKGKAYQRYQCRHRFDKDKSKRCNSKWYDKQELEEKVIERLSKIKLEPKYRKETLAKNDETMKVEEIKEQLKKLNNRLEKLTELYLDEIITRKELNAKNEKLKTEKAFLEEQLKSKKKNTINLRQRKLARLLKDFNPEKLSYEDASKIVKSVINEIVVTKEEMTITLDF

SEQ ID NO: 626 - protein, 521 aa, unidentified
  source 1..521: note = Bacteriophage uvig_204816 from the Index of /pub/databases/metagenomics/genome_sets/gut_phage_database (ebi.ac.uk)
MIAIYARQSIEKKDSVSIEAQIEKCKYYCENQDYKIYKDAGYSGKNINRPQFSKLLEDIKSGLITKVIAYRLDRISRSIADFSQLLILFDEHNVDFVSATENFDTNTPMGRAMINIVMTFAQLERETIVERVTDNYYFRANNGYWAGGYAPYGYEIKHIIGNDGKRHSVLVENKDESKIVKEIYDMYINQNISMRKIAQQLNYQNIPTKKQSGNWGINAVNAILSRPIYTEATTKIYDYFNKRGTCITNNIEHFDGTKTANLYGNSKKNNNVKALRNYDEMFLSLINCVPLISNEDWFKVQNIKGTKKNLPPRTNSSKISFLCGLVKCGKCSSNMVTQGCKNRYGIQYYYLICSTKRNLGRIKCDNKMIDISKLEDIVINDIKKHFNSNEIETKIEKYMKNNKKENINLLKQKEEFENKIIKIDIQIQNLINSIAEGNITISKYINQKIEVLEKEKQNISSQLSTIIEKNNITQDNYLIEYVKNINEKINTKDFEQLKLLCHTIIDKIVITDKNIDIHYKI

SEQ ID NO: 627 - protein, 504 aa, unidentified
  source 1..504: note = Bacteriophage uvig_396721 from the Index of /pub/databases/metagenomics/genome_sets/gut_phage_database (ebi.ac.uk)
MKIAIYSRKSKETDTGESIQNQINICKDYFNRQYNNCVFEIFYDEGFSGGNINRPDFQRFMQSIKLKKFDILGVYKIDRVSRNTLEFLTVFEELKQYNIKLVSVTEGFDPSTPGGKMMMDVLASMAEMERANIAQRVKDNMLGLAKMGRWSGGTPPTGYKPKAYINEFGKKEMYLELDEVESDIIYKIFNLSAAGCTTYAIGKEVNKNPKTILNILRNPVYCESNETSKKFLENMGYTIMGELNGNGYMTYNKRPRSNGKKIVSDYMLAVVSKHKAIVTAEMFIKANKNLTDRAPTKRPRKSQGTFLSHLVKCGKCGGGMFVASGNKLKDGSKKLYFRCTNQKYNKTCDAKWIRVDEIERFVLSELYKFSLDKNKLNEYINSNINLDCYDNDIKKLKSQVNKLNIDINNLTEKLLLLDGAAVKIVNDKINQISNERELKKEMLFELESKKIELTVNSINVDELYNNIKKLLVIFDLIPIDEQQILINQLITSIEISDNDKTLIF

SEQ ID NO: 628 - protein, 470 aa, unidentified
  source 1..470: note = Bacteriophage uvig_593897 from the Index of /pub/databases/metagenomics/genome_sets/gut_phage_database (ebi.ac.uk)
MRVGLYTRVSTQEQAQEGYSIDAQLERLTAYCKAKDWHIVHTYTDAGFSGSNLNRPAMQQLINDIDSDTFDTVLVYKLDRISRSQKDTLFLIEDVFLKNNISFISVNENFDTSTAFGRAMIGILSVFAQLEREQIKERTRMGLEERVRKGKHHSFAPFGYRLKDKELVICEPEADVVRIVYDMTLQNKTAKVINDYVVENYPEYKALFTTKNNKVYDIIHNITYGGYVKFGDKISKGSHEAIIDDITYAKVQKLLKKKAEIWETSRTKRTGTRSYYLLTGFVFCGNCGARLRVIKPSSGGKYSCYSRIGNPSYMVKDPNCRLKVYELSELDNIVLDELKKLKSDEEYFNSLCRPNIVENKADKISKELNRIEIQINKLLDLYQMDDIDVSLLTNRMKQLNNKKKKLENEISASKQDSLPKLTYRQALDILSDLDSYIEKGATDQLRELLQMLIDRITVYDDRVEIKWSFS

SEQ ID NO: 629 - protein, 435 aa, unidentified
  source 1..435: note = Bacteriophage uvig_440207 from the Index of /pub/databases/metagenomics/genome_sets/gut_phage_database (ebi.ac.uk)
MIKGACYVRVSTDNQLENYSIEEQTDRLRAYCKAKDIHIVKFYTDGGYSGGNLNRPALQQMLTDIDYGIIDLVVVYKLDRLSRSQKDTLTLIEDCFLSKNVDFISINENFDTSTPFGRAMIGILSVFAQLEKDQITERFTMGRIGRAKSGYFHGGPTAPTGYDYIDGNLIVNEYEAMQVRDLYARFLKGYSVYDCWQYMQKKYTTKYGGWKSETLVRNVLKNEVYTGKVKFKGTIYHGNHPAIIPEAQFRQVQELFSSSHRSSDTFKRSPFKASTLLASLIYCGKCGARFHGEHGNYSCYSRTKGDKKYIIDPNCRNKKWKIPELDALVTDYIARLNFSDLENKTPSPQPPIDYSARLGEIDRQIGKLIDLYQVGSIPIETISKKIEILSKEKSTLEEAARQKSTPSSSLKEMITARSTFMSIIKTGTLEEKRAC

SEQ ID NO: 630 - protein, 491 aa, unidentified
  source 1..491: note = Bacteriophage uvig_578394 from the Index of /pub/databases/metagenomics/genome_sets/gut_phage_database (ebi.ac.uk)
MNNNLVPLSNSAINELVDLYVRVSTLEQAEEGYSIAEQEAKLRAYCSAMGYTVYNVHIDPGYSGASLDRPGIKKIISDVRAGKVRKVIVWKLDRLSRSQKDTMVMLEDVFLENKCDFVSLLESFDTSTPFGRAIVGLLAVFAQLERENIKERTAMGRQARIKKGYFHGSHAPLGYQFKSGCNDLVIDEYSANMVREVFRLFLSGGSINGIASHMICKYGSNRYEWNNTSVRRILRNPVYIGNVTLGDKIYEGIHESIISESEFYMASAILEHNKSLDKRNYSYSTGKFKADNLLTGLLFCGDCGARMYARKVSKSKKKYICHSVARTSKPMIKSDNCTNRLHPFTVGQVDNMIIDEIKKLSLDRDYFKSILADVPPKLDDLQTYRERIEEIEKQINRMLNLYQTGIIDMDEVMDRVNPLKDEKDKLETHVKKHEDAPVGISSEEAWDLACTLEDAISAGSNEEVHRIIHTLVDKIVMLNDEITIHWSFCQN

SEQ ID NO: 631 - protein, 475 aa, unidentified
  source 1..475: note = Bacteriophage uvig_370045 from the Index of /pub/databases/metagenomics/genome_sets/gut_phage_database (ebi.ac.uk)
MKIAVYVRVSTLEQAESGYSIGEQTEKLKSYCKIKDWQVAKIYTDPGFSGSSLDRPAMQQLISDCKLGVFDAVLVYKLDRLSRSQKDTLYLIEDVFNAYNIHFMSLSENFDTSTPFGKAMIGLLSVFAQLEREQIKERMQMGKLGRVKAGKISAWSNVPFGYTKVKDSYDVDPLRAGIVKRIYADYLAGKSITKIMKELNREGHIGKGVAWSYRTVRQVLGNVTYTGRIIFKGQVYDGLHTGIISKADWDEVQRVLKIRQLDQAKKSNNPRPFQAQYMLSGLLKCHYCGATLAIAKSHTKNGPLWRYVCPTRHAGKYHRNNAARYRIPPVNCELTYKYKDDLEKEVLREVKKVALNPDAVVASQDDGQQTIDKQAIKAQLAKIKRQQAKLVDLYLLSDDLNVDQLHDRAEKLKVQADALQAQLIHDTKKADAFKKTATDAKQIDQLDYDHQTAIVRMLIDHINVSNTDLDIYWQI

SEQ ID NO: 632 - protein, 442 aa, unidentified
  source 1..442: note = Bacteriophage uvig_93245 from the Index of /pub/databases/metagenomics/genome_sets/gut_phage_database (ebi.ac.uk)
MNKVIRCACYVRVSTDNQLENYSIKEQTERLTAFCKAKDYLIVKFYTDGAFSGGSINRPALQQMLGDIEKGLIDAVIVYKLDRLSREQKDTLMLIEDKFLANHVDFISLCENFDTSTPFGLAMIGILSAFSQLEKNQITERFTMGRIGRAKNGLFHGGSVAPTGYDYIDGQLVINEYEALQVRDLYTRFSKGYSLHNCWQYMQKHYYTKYGGWKSETLVRNVLKNDVYIGKVKFNGQSYPGIHEPIIPEELFQTVQDIFEHSRRDMPSFKRSPFKANTLLSGLIYCGKCGARCHGEHGNYTCYSRSKGDKRQIKDPDCKNKKWKIEELDVLVIKYVSELDFEETESVEVPVQTKVDYGKRISEIEKQLSKLIDLYQISDISFETISEKIEKLSKEKNALIEESEKELPEQTSNADRLKFQERFLALLDNGPLPEKRACLTQL

SEQ ID NO: 633 - protein, 459 aa, unidentified
  source 1..459: note = Bacteriophage uvig_151615 from the Index of /pub/databases/metagenomics/genome_sets/gut_phage_database (ebi.ac.uk)
MEQVTAGYSLEAQQEKLNGYAAYQKYTLLPPYADEGFSGASLSRPALQKLIGDVKDGKIDIVLIYKLDRLSRRVRDVIDLVELFAEHNVTLYSLTENLDVSSPFGRAALKMSATFSELERETIRDRMMMGKDQRVKQGKALPTRVAPFGYRYDIQKKRFEIVPEEAEIVQKLFELYISGSYNFRQLHDYARAHWNHPYFGERNPLSCKPIIHRIMYAGYIIYKGELYKGTNFDPIIEYQTYLQAQEVVKRHLTQRQSPNSPYLLTGLLVCARCGNRYVGKLYDRNVLQKNGTKTTKYKYRAYGCAARVKRDKNYHPVKCDNDIFPAEELDEIIEKRLKRLKFTQFVAGGQNLVDPLLEENVELKRRAEKLLDLYLDNGLTKEEYLSRRDKLEKKIVQNEKLIQEETSRPSRPNTTIDNLKERIAAYDTLDRVEKQNLLNSLISQISIDGERIVVKWRVK

SEQ ID NO: 634 - protein, 491 aa, unidentified
  source 1..491: note = Bacteriophage uvig_327878 from the Index of /pub/databases/metagenomics/genome_sets/gut_phage_database (ebi.ac.uk)
MIAIYTRQSIDKKDSISIETQVEMCQKEIKTQGLEFKIYKDKGFSGKNTDRPAFQNLMADVKQGNIDTIVVYRLDRISRSVLDFANIIDVLQKHNVSFISASEKFDTSTPVGKAMLYIVMVFAQLERETIAERVKDNYYQRGETGAWGGGIAPFGYSNTKITIGGKKVATIQQNDDIELVKQIFYEYANTDKSLGNIASDLTEKLNVMWNNIKLSRMLHSPAYVQADVDIYNYYIAKGCVVESDISLFNGVNGLNVYGKRDRGANKYNNLKDHHIAVGFHEGVISSDLWLKCQYKLDKNVQIKNNGKGKHTWLTGLIKCGYCGRAMTVKTYKETKYFNCSGRAIKMCDAEVVTHYVSDIEELVHQKMINYVENFSDCKIKDIENDNRQEINSLKAELVQIEKDIENIVNNLTVANTTLMEYANKKIEELDNKKKQTLDKINKLNVTKDVELKIPNLDGWNNWDIEAKRDVAKTLIEKVYVYKDRIHIKWAY

SEQ ID NO: 635 - protein, 525 aa, unidentified
  source 1..525: note = Bacteriophage uvig_176611 from the Index of /pub/databases/metagenomics/genome_sets/gut_phage_database (ebi.ac.uk)
MQKRRTKYASSQGDNAVIYARYSSHNQKDTSIEQQIEVCTKYARDNGYRITNIYADRAISGKTDARPQFRLMMQDAREHKFDVVISWKSSRLGRDMLDAMTNDIILRNLGIKCFYTEENFDDTAAGRFALRNMMNVNQFYIENMAEDILRGMRDNAKKCRVNNGSPPLGYRRGDDGKYEIVPEEAETVREIFTKVLAGMAFVDIANELNARGIKTKKGAPWGRSSFSRLLSNERYIGTYKWSDIVIENGMPAIIDREVFEMAQKKIKGERPLRRRHNENGDYLLTGKLFCGKCDSPMTGMSGTSKSGAKHHYYACYSARKDGSCDKKAVKRDWVEKTVALFIKEHVLRDEVIEWMVDQYMVYQKATFESQRIMEMRNQLKDVQSQLDNLVDAIARGIYTDSTKDKLLKLEADKKEIEQDIRLATYNLKEYDREHVRCYFLSFKEGSVESKDYLKRLFDQFVTKIYLYDDEIRIAFSGTKDDSPVSFKIIDEAEELAVSSVRLSSASSHQNNIIRTLCRLVMGSDL

SEQ ID NO: 636 - protein, 535 aa, unidentified
  source 1..535: note = Bacteriophage uvig_154256 from the Index of /pub/databases/metagenomics/genome_sets/gut_phage_database (ebi.ac.uk)
MLTVFLSNGKGGSMIAIYTRQSIEKKDSLSIDAQVKACADYCKAQGWEYEIYTQDHGFSGKSLDRPGFQAMMSAVRSGQVNKIVCYKLDRISRSVSDFAQLLQELEQYKCDFISVTENFDTSSPIGRAMVYICMVFAQMERENIQERVKSNYYYRSGLGFWGGGPAPYGYQLKRQQIAGKVHTVLEPDPNEAPWVQKMYEWYLEPGGSAMKILRLLTENQVPTKRGYKWTSRVLMDVLSKPLYTQNSMDVYNYLTQSGAVISNPPEDFDGTLSVDLYGKKDSSQSKHKRCRKGSDMYCNISLHEAIIDSDTWLQVQYKILARPKIGGRTGTSKNSWFTGLMICGVCGRHVSFTHSARTAGYYICSSRKNCGWNSCSSKPASKKKFDPIIVKFIRDHYDSPKTKAAIQQAKLAAKTPQVSIERNNLQMELATINNQIDNLLTSLASGNAVMSKYINDKITELDAKRTPLQAKLLQLDATSSVNDELKRLERIEWAMEQLPLVYTEDTFDLSVQVSQALVNNIVFNADGEVTISFAI

SEQ ID NO: 637 - protein, 511 aa, unidentified
  source 1..511: note = Bacteriophage uvig_596302 from the Index of /pub/databases/metagenomics/genome_sets/gut_phage_database (ebi.ac.uk)
MPKYNPEELLPAVAYYRYSPGGGQTEQSIEGQRRDCMAYAKSHGYVIVKEYIDRHLTGRNDKRPAFQLMMQDAEMHCFDTLIAWKNDRISRNRRDALNYKDQLRKCGVQICYAEMDIPHGPEGILMESLMDGLAEYYSAELAQKIRRGMTESAHKCRALGSIPPFGLRVNKEHRYEPDPTTAPYVRWIFQQYAQGVQITEICYALNAKGVRTSRGNEFNKNSLRTVLSNEKYIGVYEAKGIRTENAITPIVSQELFDMVQQRIPQNAHYGRKLNGPRQFPLSGIAYCAICGAPLIGDSGTGKNGKLHTYYACTAHKHKHGCTKKNIRQAKLEEMVYDATANMVLCPSITRAIAKQVEASAAADTSHAEEMQAVQAHLKDIEKRINNILAAMEEGSFSKAVSSRLTTLETEQSRLEKQLKNLRRVKPNITASRVEYMLSTMCRNPAEQQPDHLKRLLQVFVERIDLSEETMSITYAITKKSAVPTSTADNPTVKTLHYIDIKQCSTIACYGG

SEQ ID NO: 638 - protein, 477 aa, unidentified
  source 1..477: note = Bacteriophage uvig_118876 from the Index of /pub/databases/metagenomics/genome_sets/gut_phage_database (ebi.ac.uk)
MIRAGIYARVSTREQAEEGYSIGSQIDKLTAYCQLHDYELVDQYIDPGFSGASLERPAMQRLLKNVKEKKLDVVIVRKLDRLSRSQKDILTLIEDVFLPNNCNFVSTTESFDTQTPMGRAMIGILSVFAQLERETIRERNQDGKNERAKTGKAMAWSNPPLGYNYVDKHYEVSEYEAAIVRTAYNLCLQGLSMNKIKKYIDEKFDYSLTKYKTKDGKIHLATIKRILRNPLYYGVITWKGNLYLGEHEALITEEMFNAVQKQLQLNAKNALGHSKNPFRSTRLLTGLLWCGDCGARMHAQSRKRVNNDRWYYMCYSVSKKSAKYITGECHSGNFDGETLDQIVYDQIRALSDNTKLLEQTMLSKESSVSEEFFEAKLTSIESKQQKLVDLYLDDKLDKAMLESKNKALEEEKQKILDTMERNKQNQNKPTKREVRKNLKQFIDIYETGELDTKKAILRTLIDRITVTGDDVRIDWTF

SEQ ID NO: 639 - protein, 461 aa, unidentified
  source 1..461: note = Bacteriophage uvig_375705 from the Index of /pub/databases/metagenomics/genome_sets/gut_phage_database (ebi.ac.uk)
MDKKKMRCAIYIRVSTTEQAMEGYSIGEQKERLEQYSSAMQWTIMGEYIDPGYSGSNMNRPELNRLISEVKNYDVILVYKLDRLSRSQKDTMFLIEDVFLKNDIAFVSMNESFDTGTPFGRAAIGLLATFAQLERENIKERMSMGMKGRARKGYWKGTSRPPIGYDYSDGNLIINDYEAMQIRELFSITANGIPGMTYNVRNIGRYLSGKYSNKYGGWTDSSGITYTIQNKVYIGMVKFNDEYFPGQHQPIIDDLLFEKANDRLNTYLSTFGAHATYNKYMLSGITYCKLCGRPYYRRNSQVKKHGSKKEYGYYSCQGRKADVEIKCPSKIFRQDELEQAVIEQIESLKSTNWTAQEKHEDTAALLQQLKQIDSRQERLIDLYSFGSIQKNQIDDKVRELNLEREKVKALLSSRNTLDTDEIINMASKIHDSDYVVKCDIVSILIKKVEVDGENIRVYWNF

SEQ ID NO: 640 - protein, 521 aa, unidentified
MKKVITIEPAKQVSHKVDLPSFTKRRVAGYARVSTDHEDQTTSYEAQMKYYTDYINNRSDWEFVKMYSDEGISGTNTKARIGFQRMVEDALDGKIDLILTKSVSRFARNTVDSLSTVRKLKEAGVEIYFEKENIWTFDSKGELLITIMSSLAQEESRSISENVTWGRRRQLAEGQVTFSYSQVLGFKKSDTGGFEIDHEEAKIVRYIFHQVLLGNNPNKIARELTAQGIPTPQGKRQWSYGTVKRMLRNEKYKGDALLQKSFTTDFLTKSTKPNEGELPQYYVENNHEAIIKREVFDLVQVELDKLEKKRQTSNIFTGRLFCGDCGSAFGSKVWHSTSKYKRTIYQCNAKYKGEHKCRTPHVTEEEIKGWFLSAINQLLSNRDEIIANTELLIDMAKDTSPLESRIDDLEHHLETIRQDIEDLVDRNARKAQNQDLYQEQYDTLVTAYQEIQKELQEATSSLEEQKSRSISLDGFIQELKQQDSLITDFNQELWQTSVERLDIKVDKHISLTFKNGVRIDL

SEQ ID NO: 641 - protein, 484 aa, unidentified
MTATLERHLDTPQQEALRVGVYLRMSTDKELGIDRQREDCLALAERLGWVPVEYIDNDRSATKENVKREGFDALSDDIRDGRIDSIITWRSDRLYRKMKDLLPLIDLIQGVNKTGKRIPIETCQTGLIDLTTDAGRMTAKILAAVSENEGEVRTARQMRAYEQIADSGRRLGAPAFGWTRDPRDPQIVPEEAAAIREGYADVLAGCTLYSIAKKWSDAGLRTTRGNAFVGSVVGKILRSPRNAGLLTFRDEIVGEGTWEPIVDRETWEAACAVLDQKNTGQKGPRVRSTLLSGIVRCGACGNKMAAGKNSNGEPIYKCKRYEVCKHGVTRVRKKVDKYVEMSMVAKLEQRKWIVGTQVDAEQAKGLHAEAEALRARKASFGEALADGTLTPAQVKDATDRVNVKLEEIDAKLARLTRSRVFDGLLGHDDLEKVWLGLDLERKRAIIESLCDKIVIQHVGQTGRSAAKLPLGHAIKIHWHDPSND

SEQ ID NO: 642 - protein, 413 aa, unidentified
MSVKKIRVNNQKHKQRICAYIRVSTTNGSQLESLENQKQYFENLYSNRDDIDFVGVYHDKGISGSKDNRPNFQAMIENCRKGMIDVIHTKSIARFARNTVTVLEITRELKAIGVDIFFEEQNIHTLSSEGEVMLSVLASIAEDELRSMSGNQRWAFQKKFQRGELVINTKRFLGYDLDENGELIINPEEALIVRQIFALYLEGYGTHRIAKLLNEKGVATVTGAKWHDTTIRQMLSNEKYNGSVLLQKYFHDGVNGPKKLNQGELEQYFIEDNHEAIISMEDWQAVQGKLNSRRWQQGRNKTYKFTGLLKCQHCGSTLKRQVSYKKKIVWCCSKYIKEGKAACKGMRVPEVDISNWTVTSPVTVIERDRDGEKYYSNTGQESADQRSSSGQEENQSSRILSSVHRPRRTAIKL

SEQ ID NO: 643 - protein, 563 aa, unidentified
  source 1..563: note = Bacteriophage uvig_582533 from the Index of /pub/databases/metagenomics/genome_sets/gut_phage_database (ebi.ac.uk)
MEGKPDMNIIPIDLSALTDAEKALFFEYRDVLSASWTEVVCFYLRYSSDRQTEQSIEGQLRDLLMYCRLHAYRVAAIYVDRAISAHASMEKRPAFQMMLADSATSVWKTVLVYKLDRFARNREDSMVARIRLRKNGCRVESAKENISKNPEGIILESVLEGINEYYSEELRQKVMRGNRESAMKGQTLGGVTPFGYKTENKRLVPDPMTAPVVQEIFTRYAAGDRLVSIARDLNQRGYRTTKGHPFGKSSFKTIFRNTRYIGVYKYMDITKEDPSLRIVSDEQWEAVQSKLSDTASAPGRGKARNPYLLSGKLFCGHCGAPMVGECGRGRHGQTYYYYSCANRKGKKSCDKKPVPKEWIEHIVAEDAAALLTDDFIEDVAEKAAQQSEADFRANTRIPALESQIADIDSRIRNLTKAIETSGSALDVLVSRLQELTTQKSALEAELRSESAGVIHLTKEMVIFFLEGVRDKIIQPENRDAILIRMFVNSVMLYDDGPGFFKFETAYNLTGIPQKTYKIPINSASAELQKCSDFGRSGVPLDANSNQIQVVGLIFIQTKRHALP

SEQ ID NO: 644 - protein, 370 aa, unidentified
MVRRNSKTTHQQKKIRDAFVSERTVEIIPAKREFTDVKTKKLRVAAYCRVSTFDESQSGSFELQKQTYTERINSNPDWIMAGIYADQGASGTSIKRREQFQQMLHDCRSGKIDLIIVKSVSRFARNQLDFISIYRELKALSPPVGIYIEDINLNTLDTNSEFILGIMAIVAQGESEQKSASITWSVIERFKRGIPMIPTHNLLGYTKDQYGRVVIDETEAKIVRLIYDSYIEGMTASEIASTLMTNHIPTVTGLERWTSLAVYNILRNEKYKGEIIMQKTFTVDCFSHKTRKNNGEKPKYRLKNGIPSIIPESRWDLVQELLKQPRRKSKSTSEIFVPKLYIKKLKSGKLRDFVVLDPSWKSEDIHEVFK

SEQ ID NO: 645 - protein, 502 aa, unidentified
MRVLGRLRLSRSTEESTSIERQREIVTAWAQSNGHTVVGWAEDVDVSGSVDPFDTPSLGPWLDERRGEWDILCAWKLDRLGRDAIRLNKLFGWCLEHGKTVASCSEGIDLSTPVGRLIANVIAFLAEGEREAIRERVTSSKQKLREVGRWGGGKPPFGYMGIPNPDGHGHILVVDPVAKPVVRRIVDDILDGKPLTRLCTELTEERYLTPAEYYNTLRAGSPRQQAEDGEVTAKWRPTAVRNLLRSKALRGYAHHKGQTVRDAKGMPVQLAEPLVDADEWELLQEILDRVQANWSGRRVEGVSPLSGVAVCITCDRPLHHDRYLVKRPYGDYPYRYYRCRDRHGKNLPAEMVEELMEESFLARVGDYPVRERVWVQGDTNWADLKEAVAAYDELMQAAGRAKSATAKERLQKQLDALDERIAELESAPNTEAHWEYRPTGGTYREAWAAADADERREILRRSGITLAVGVDGVEGRRSKHNPGALHFDFRVPEELTQRLGVA

SEQ ID NO: 646 - protein, 472 aa, unidentified
MRVLGRVRLSRLTEESTSVDRQRELIEKWSEMNDHTIVGWAEDVDVSGSIDPFEAPQLGPWFQEDKRGDWDILVAWKLDRIGRRAIPLNKVFGWMLEHEKTLVCVSDNIDLSTWVGRLVANVIAGVAEGELEAIRERTKASRKKLLESGRWTGGPVPYWLIPEKLPEGGWVLSLNTETAPILRRAIDEVLDGTAVHTVAERLNDQGVPSPGGKKWTSQTLWRILQHKYLKGHSTDRGKTVRDSSGVPISNCEALLTPSEWDRLQAVLTQWKLPETSNRVKNTSPLLGVVVCYICDKPLYYRSYTRNYGKGLYRSYYCRNHRTPGIKADMLDEYLEENLMREVGDKNVLERYFVPAENHQIELDEAIRATEELTALLGTMTSATMRSSLTAQLAALDSRIASLEKLPTSESRWEYRELPRTYREMWESDDDPQFRRELLLKSGITLAATMTGGQKLHLHIPDDILERMALKGE

SEQ ID NO: 647 - protein, 553 aa, unidentified
MTCFKAVVEVTCVTTEGGFILKKVTAIKAKNTVVNKELLKKPRVCAYCRVSTDNSKQLESLETQVSYYENYIKNKSGWEYAGVFKDEGISGTGIAKRADFNKMLKACELGKIDLIITKSISRFSRNTADCLETVRYLKKLKVAVYFERENINTLGAGSELILSVLSSLAQDESKNISENIKWAFQKKFKQGRIQINTKRFLGYDVENGMLIINKEEAKIVKRIYKEYLSGSSLSEIKKGLEKDKIKTVTGLDTWQNSTIKKILSNEKYYGDLIQQKTITVDYLTHKRKKNNGEAPKYEIKNHHKGIISKEDFLKVQDIMKKRAAEFGNLPENRNKYTRRYAFSGKIICGNCGAVFKRRTWNNKSKYKKIVWQCSTYINEGKNKCDMKAIDDNTLKAVFVEMFNRLYENKNNFFKAFIDNIDKVLKESAKCENVSKLDKEIDNANEEIKKLIRQQIKGQLQDEVFDIKHKSLNEKLQELKASKNTVAFNGNKYKEILKRSKEIERIIEMRKSTLIEFDDDIFKNLIEKIVVVTPTHLEFHLKNGMKVKEEFTKK

SEQ ID NO: 648 - protein, 486 aa, unidentified
  source 1..486: note = Bacteriophage uvig_364726 from the Index of /pub/databases/metagenomics/genome_sets/gut_phage_database (ebi.ac.uk)
MRRVVIYVRVSTQEQATEGYSIGEQLERLRLYCQAHGWILVEEYVDPGYSGANLDRPAISKLISDIGSGTFDTVLVYKLDRLSRSQKDTMHLIEDVFMANNIDFISMSENFDTSTPLGRAMIGILSVFAQLERDQIKERMGMGKEARAKEGKWQGGSTVPVGYEYDVSTGELIVNEYEAMQVREVFNLVLSGMPYKTIANKLTAKGYTYNAISGHVGIWDANRIKYVLTNKLYIGYIRYKDTWFPGTHEPIIDTETFEKAQLLFKERSASNVMHIKKRQGQISYLGGLLYCKKCGARYARNSGRKWKNNEPPLYYSCYSRSHKVPKMIKDPNCKNKTWRMAELDNIVFAEIKKLALEPEYITTIKEREKTKQDTSNKADILRKEIRKIEEQVSRFLDLYGLGAFTIEQVTAKVQPLNQRKQDIEQELTELVTDETILSEDETREIVRNFEEVLERSDFNEIRMTIDSLVRYIELNDDTVYIHWKFT

SEQ ID NO: 649 - protein, 480 aa, unidentified
  source 1..480: note = Bacteriophage uvig_118757 from the Index of /pub/databases/metagenomics/genome_sets/gut_phage_database (ebi.ac.uk)
MRTAIYVRVSTLEQAQEGYSIDEQIDKLKKYCAAKDWNVYQIYKDPGFTGSNTNRPGLNALISAAKRNLFDTVLVYKLDRLSRSQKDTLYLIEDVFGKMGISFVSLNENFDTSTPFGKAMIGILAVFAQLEREQIKERMSMGKLGRAKSGKAMAWNKSPFGYRYENGNYVIEPIEAQIVKRIFDEYLSGTSITKIRDHLNEEGHIGKKAEWPYRSIRSILDNATYAGFSKFKEELFEGNHEAIVTKEAYFTTQKELEIRQKEAYKKNNNPRPFQAKYMLSGLMRCGICGSTFEVNLRNVRKDGTRLKKYRCASHSSKRHNYTIKRNPNGCTSPTYDMEELENAILAQIEKLRINTDIIQEKSLTQSDVDTNSYEIKLKQLNSQLEKLIDLYLDMEIPKKTLEIRKKSIIHEIDSIETKLESLKENNNNQVSVKELMRELSNIKSSVYTLPYDQQKNLVRKLIKNIVVYPERMEVHWVFEK

SEQ ID NO: 650 - protein, 463 aa, unidentified
  source 1..463: note = Bacteriophage uvig_442496 from the Index of /pub/databases/metagenomics/genome_sets/gut_phage_database (ebi.ac.uk)
MKRVALYMRVSTQEQAENGNSLEFQKEKLEAYCKLHEYKIVGEYVDAGVSGAKFNRPALDRLKDDVEKIDVVLIYKLDRLSRSIKDTMLLIEDFFKPNKIDLISLSENFDTTQAIGMATVGMLSTFAQLERDTIKQRMMAGRVQAVKSGKYVCKVPYGYIKVEDKLIKDETTRECVEFIFKKALEGQSLYEIMYSLEKNGYGQYRKWSTSLIHKLLKRPVYRGHTTINNVLMKNTHEPYISEEEFVFMNKLFSDRKCHSSKSRRNKLPAIFRGLIHCPTCYRKLYPFTRTFKSGKCTTFYRCNFCGREKNIHFSFSEQTFEKKLLNYLKFDFSIDIKKAKTTKVDYSKKLSVLEHKKNKLQRAWLNDLLSDNELKNLQKEIDNQIQLINLKQKEYHDSLVNAKKQKNISGIVANFENIYSSLDIDKKTEFLNTIIQDIKTTITIEKRGKVHRSNISITNIIFK

SEQ ID NO: 651 - protein, 482 aa, unidentified
  source 1..482: note = Bacteriophage uvig_425122 from the Index of /pub/databases/metagenomics/genome_sets/gut_phage_database (ebi.ac.uk)
MKAAIYVRVSTMEQAEEGYSLDEQVDKLKKYCEIKGWNIYKIYRDGGFSGANTDRPGLSEMINDAKLRAFDTVLVYKLDRLSRSQKDTLYLIEDILAANDIAFVSLNENFDTSTAFGKAMIGILAVFAQLEREQIRDRLLMGKIGRAKSGKAMAWGVPPFGYVLPESNREKYEIVPVEAEIVKKIYHDYIAGKLVAKICDELNAEGHIGKREPWVHANMKRTLTNPVYAGFIRYRGEVFEANHEPIVSKETFDLVQEQIELRQTRAYQKFNNPRPFQAKYLLSGLIKCGICGARFEVIQYKPRADGSRIRYYKCVSYSPKNHAPSMWKNSDGCTSPKYYLDDLEKELLSELEKLRDDPSLITSYVSKTNQIDVSGLKKRLKTLNNQLKKLVTLFIDNDFPKDVIESKKKIIMDEKKLILDKINEAESIKPEVSTNEVIDELGQIKISMFDLDYEEQKRIARKLIKEIILYPDKMEIHWAFAI

SEQ ID NO: 652 - protein, 477 aa, unidentified
  source 1..477: note = Bacteriophage uvig_151019 from the Index of /pub/databases/metagenomics/genome_sets/gut_phage_database (ebi.ac.uk)
MRIALYPRVSTQEQALNGHSIDEQIERMNKYCEAMGWQVYKTYTDAGYSGANTDRPALKRMIKDIEAGKIDKVLVYKLDRLSRSQLDTLYLIEKVFLANNTDFVSMSENFDTSTPFGRAMIGILAVFAQLEREQIKERMMMGKEARAKKGLYHGSNCYPIGYDYIDGHLVPLEFEAIQIKMIFEMYAEGKAPLTIAEYLNNNGYKTRYGRWNDITVRKILRRKTYLGYIKYHDDWYKGEHEALISEDLFNTVQKIFDQRTEDYSYYKRREGRVNSYLGGMLFCDCCGGKYSKIISNSTKNGKKYRNTYYKCNSRTFKKRTLVRDPNCKNKTWKMDVLDNLVFDEIKKLALDPDYLKKIKTPQENDNRQSVIENQIESIKIQINKLMDLYTIGGMPVDLLQEKIHDLNNQQKKLEAEIEKIEDEKKEKITNADAMKMITSFSDVLERGDYSEIRASLTALIEKIVIKGEDIKIYWRFV

SEQ ID NO: 653 - protein, 468 aa, unidentified
  source 1..468: note = Bacteriophage uvig_570177 from the Index of /pub/databases/metagenomics/genome_sets/gut_phage_database (ebi.ac.uk)
MYQDITTVCGYVRVSTENQLENYSIEEQTVRIRSYCQAKGWHLVQIYTDGGYSGGNTNRPALQRMLSDIRQGKMQAVVVYKLDRLSRSQKDTLTLIEDHMLSAGVDFISINENFDTSSPFGRAMIGILSVFAQLEKDQITERFTMGRIGRSKAGYYHGGPNAPRGYQYVDGTLIVDEFKASQVKEIFRLFLDGKSINRIARQMEQKYGGRWNAAGVRVILLNSTYIGKVKFAGVEYDGRHQPLISKEDFETAQKLLFSPARDAKKNSAQKNPFRAETLLSGLILCSRCGARYSGCHGHYKCYSRAKGNPRYVKDPNCKNDNWIISELDSLTISSIRELLDNNDLLDAAIENARPSLEDSANEIEITTHLKEIEAQINRLLDLYQIGSIPTETLSSRIQTLDQEKTALTTLLENKEDSFEERKQAFLENIQNFRDHFDDSDLDTQRLLIRSIIESISVDGRNISIQWRI

SEQ ID NO: 654 - protein, 543 aa, unidentified
MTTVSLYARVSSRQQAQENTIESQIVELERRIGSDGHELLDEHKFVDNGYSGSNLERPGLENLRDRVAEGKIDKIYIHSPDRLSRKFSYQMILLEEFKKAGSEIVFLNHKFDDNPDSHLFLQIQGAIAEYERAKIMERNRRGKLHAAKAGCISVMGRAPYGYRYIAKHVGEGSAQFEVDEEEANIVRKIFSRVGQERASIGEVVHELNKIPVITRTGKRYWKRSTIWNMLKNPAYIGQAAYGKTRTCSKPQVKKSKKGTCGKLKSGRFNSDKENWTYIPVPKIINEHLFDSVQAQLTENRQRARVRQRRETYLLQGLMVCQRCQYTYCGTNHVHKKSTYYYYRCSGTNSSKFNGNKICDNKSIRTDILDGVIWEEVKSILKEPDRIANEYQRRLSENKKPLHNQTREKQESKLRLSIKKFIDSYAKGFISQEEFEPRITTMKQHLKEIEEEKERTLDQKKLQQELSLVTDSLKNFSSSVESKLDQVDWQTKQNIIRMLIHQIEINHNHLYIVFRIKSLANFDQNSHNRIMQCCTSSQYCWLAG

SEQ ID NO: 655 - protein, 438 aa, unidentified
MRIGIYARVSTKDQQSTPMQIANLKEYARLREWDVVRVYAEKESGASDRRPKHSELMREARQRKFDAVLVWKLDRWGRDLRNIVNSLHELQQLGVSFISFKESIDMTTSHGRAMASMIAVFAAFEREQLTERVKAGVAEAKRKGIQIGRPTKIDEKIVKKAHKLHESGYTYAKIMEELKIGRGTVYKILGNSSAKKGRPVRFEAQKYFASSFKNILSNLIQKKINLVQEIPRVFEEKYLDNRYRNSLIAKDKPKKKRTIKKENTVIDDKIVTIKLVLRDIRPQIWREIKAKASTTLHELHYYIQASLGWEAFHLHKFYTYDEDEDITLMQLIHRNNKEFLYEYDFGDNWQIDIKIGFSKEQKRLLKPVCTAGARAAPPEDCGGIYGYYQILRTMRQRKTKSYKGQLTCGVKFEPNKFDKRKVNKDLQEWVKSLKESEQ

SEQ ID NO: 656 - protein, 485 aa, unidentified
MTKKVAIYTRVSTTNQAEEGFSIDEQIDRLTKYAEAMGWQVSDTYTDAGFSGAKLERPAMQRLINDIENKAFDTVLVYKLDRLSRSVRDTLYLVKDVFTKNKIDFISLNESIDTSSAMGSLFLTILSAINEFERENIKERMTMGKLGRAKSGKSMMWAKTAFGYYHNKDTGILEIVPLQATIVEQIFTDYLSGVSLTKLRDKLNEAGHIGKDIPWSYRTLRQTLDNPVYCGYIKFKDSLFEGMHKPIIPYETYLKVQKELEKRQQQTYERNNNPRPFQAKYMLSGMARCGYCGAPLKIVLGHKRKDGSRTMKYHCANRFPRKTKGITVYNDNKKCDSGNYDLSNLENTVIDNLIGFQENNDSLLKIINGNNQPILDTSSFKKQISQIDKKIQKNSDLYLNDFITMDELKDRTDSLQAEKKLLKAKISENKFNDSTDVFELVKTQLGSIPINELSYDNKKKIVNNLVSKVDVTADNVDIIFKFQLA

SEQ ID NO: 657 - protein, 520 aa, unidentified
MGITKLQVRALVGARVSHVQGEEKTSHLTQRTKGESYAESQGWTVVGGFEDLDVSAIKLSPWDRPDLKQWLDEKADDWDALIFSKTDRVFRSANDCVKLAEWCKDHRKILVLVDDGIKLDYFNPEDSKDAFAGAMSKVFLILASVFAEIEGQRFVQRARDRVAYLRPTDRWGYGNPPYGFVVVDHPTGVGKALGHDEGDQAVLHRIADEVLSGNSLVSICVKLNDEGVLSPSDRTRVRAKKEPEGSKWRPLTMKRLLTSPSTQGIKMAKERPVLDAQGEPVRVGPESFDAETWKQLGIELADRATEPSKRRHSTNPLLGVAKCAICGLNMRQHGKTTKYGSYRYYNCIGHPIACPKVSIVAETAEDAVYSIFLNSHSGRRVKERVWQAGSDHSAELDQTLRTIESLREDRAAGLFNDPEDAKMYQQQMAALLSKRTALSDAPIIKAGWVEMETDRTYGEVWESSTEEEKRKMLVDAGVVLWVTNRNDYYVGDLDKLLGEGDGGEEFLASTVLAKAGITSR

SEQ ID NO: 658 - protein, 474 aa, unidentified
  source 1..474: note = Bacteriophage uvig_323824 from the Index of /pub/databases/metagenomics/genome_sets/gut_phage_database (ebi.ac.uk)
MKVGIYSRVSTQEQAREGYSIGEQVERLKNYCAAKGWILYKTYTDAGFSGANTDRPGMQQLISDVADGKIDMVLVYKLDRLSRSQKDTLFLIEDVFIKNNVNFASITENFDTSTPFGRAMIGILSVFAQLEREQFRERSIMGKDARAKEGLHHGGGAPTGYDYIDGQLIINKEEAELIKEAYRLFLEDDMTMMGIAAKLSVFSEKFKYDHRIRKMLTNPLYAGWTHCRDELYKGQHEAIISQKVFDKVQTKLKIRAENNPHYRNAFNRTSLLAGILWCKKCGARYFKRVRRCEKGSKVYYYNKYQCYSRSSYKNMVRDKSCKNKIWTMEVLDKAVIGEIKALVANPAEVDNIIKLNQSNNNITEKKEFYKKRIKEIEKQMNKLTDLYSIDGIDIDFVAKKITALNTDKKRIESEMNAINEHKPLISAEDAKKRLSGISNILDNGEFTEKVKVITSLINRIEVDDDDIYIYWNFV

SEQ ID NO: 659 - protein, 517 aa, unidentified
  source 1..517: note = Bacteriophage uvig_314864 from the Index of /pub/databases/metagenomics/genome_sets/gut_phage_database (ebi.ac.uk)
MTRKVAIYLRMSLDMDGKGAGIERQREDCRTLAANRGWEVVDEYVDNSISASKSNVRRPAYDRMEADYEAGRFDTIVCWHFDRLTRQPMQMEQWLNRAEQGNLQVVTCTGDYNLTDHTGRLMVRVLAAVARNEIENKSARQKRATIQKAHKGGPSAGIPPYGYDDEYNVIEDRAETVRGIFKAIQAGVSMADIVRALNGEAGRDHEVPWLKPCPSPGVVRWQRDNAKRAERGLEPKAKLKKTRWTHHMVLRIAINPSYAAYRMHMPQDIRDKPEHRGAGSETAPGKRACIVRDDDGEPVQGQWEPIVDKDLWWSVSEILCDPKRDKRRHNRSGRAGLGSGTYICGECGHYMTTLGQSYRCRQCGITRRSAKIDQLVCRVIERRLSREDAVEALTARSKPTEESKAIEEQIRDQEAKIKRAEADYDDGVITGRDLKRNRDKATAEIENLRQQQVATLPEATQSVLVGMSDPAEGFKKSSMVTKRSIIEALLEVKVYKAVRGRKQFDPGTVDIVWKTDA

SEQ ID NO: 660 - protein, 532 aa, unidentified
  source 1..532: note = Bacteriophage uvig_31244 from the Index of /pub/databases/metagenomics/genome_sets/gut_phage_database (ebi.ac.uk)
MIATKPTQEKTVKTVYCLYRVSTKGQVDKNDIPMQKQSCREFAEHQPGWVIKKEFQEKGVSGFKVSANDRDAVQELKTAAENKEFDILLVFMFDRIGRIDNETPFVVEWFIQHGIEVWSVNEGEQRMDSHVDKLMNYIRFWQANGESQKTSMRVKTRLHQLVEDGIYTGGCAPFGYRLVKSGVVNKRGKELLTLEIDPIEKEMVKTIFEKTVKDGYGSYVMAQYVNDRKMLTHNGAKFQSNTIKRILQNPIYCGYYNRGGVTSKRVKELQIIDDAVFDEAQKILEQRKYTNEEKTQLSRTAKSSTMLGGNIYCAHCGKKLCANSFVDRYTTKDGTTHDGGRRFRYLCSGKAMKRNECDGQSVYSAAKVDEIVLDALHKCFDKIKATPKDAAIEKKYRTQISQIKTEIKRLNKETETLKRKLGELTEEIANSLLGDSKFTPDVLSMAIETTKTKIADNVQRIAEKQNQLNDKETDMNKIDYYYEEFVSWADEFDNAPAERQRMIICKLFKEILVGRGYSVQILMDSSYEQFLI

SEQ ID NO: 661 - protein, 508 aa, unidentified
  source 1..508: note = Bacteriophage uvig_328850 from the Index of /pub/databases/metagenomics/genome_sets/gut_phage_database (ebi.ac.uk)
MICAMYLRKSRADLTAEARGEGETLARHRETLMRVAVQQNLIVTDVYAEVVSGDTIAERPEMQRLLRAIERGDYDAVLCMDIDRLGRGDGGDQSIILKALKYSGTIVITPYKNYDTRREMDEEFFEYSQFLARGEYKRIKRRMWAGRVAAAKEGKWLSPKAPFGYRRVRLEHTKGWTLVPDPAEADAVRSMFEWYGSGEVGKNIIANRINAMGFRTLSGVNFTSSTIANILNNPVYLGKIRWCNRRKRVDMVNGMEVVTRPRSDECMIIDGLHPALIDNDAWDAVQARLATHQDSHVKKSANIVNPLASIMVCGICGKSMLFTPEYTRNDIVATYRCRTAGCPTSGINVQCVYDALLYTLKSWSAYVKEDEPSASKSPKNQSAIVAATAQLAQLNKQLTRLQDLLETGVYSAETYLARSKVLNDRINDTISEIDRLKQLQATDERAAIIRLKPKIDHVLDVWDISTAEDQNTLLRQVLRKVVYHKTHRCFRNDNPADFLSLDFFPVLE

SEQ ID NO: 662 - protein, 506 aa, unidentified
  source 1..506: note = Bacteriophage uvig_323858 from the Index of /pub/databases/metagenomics/genome_sets/gut_phage_database (ebi.ac.uk)
MPKKETTAPVKAVLYVRYSSDRQREESIEGQIRVCEDYARRNNMVIVHTYADRAMTGRSDQRPEFQMMIQAAATQAFDVVLVYKLNRFARNRYDSAKYKHKLKKYGVHVVSAMENIADDPSGILLESVIEGMAEYYSAELAENVMRGMTENALECKWSGGLVPLGYKLDADHHLVIDEAGAPIVRRIYQMVLDGRTPTGIINELNAANCRTSTGRPFGKSSLTTILRNEKYIGTYTWNHIRKENAIPAIIDRKTFEAVQKTLQYRKNNHVKVCSENFLLTGKLFCGQCGSNMVGTSGTSKYKNTYYYYACTKHLKKDGCTARNIRADKLEELVCSVTTRILSSKEAVHAIARQAVEAQKKQKESLTVQSLKNQAAEINKKLKNCVQAVESGLISVTITNHIKEYEKRLTELNEAISREELLSGKSKLTEKHIEFFFYSIAQKIKTADKYKSILLSSLVRCVIVCDDYIEIQYNYKNELPLLQNPVRVKSSNLNGMVTQERFELPTP

SEQ ID NO: 663 - protein, 553 aa, unidentified
  source 1..553: note = Bacteriophage uvig_520818 from the Index of /pub/databases/metagenomics/genome_sets/gut_phage_database (ebi.ac.uk)
MARKKAEKAEGNICVVYARYSSAVQNDASIEQQVGECREYAAAHDLKISEIYADRAISGRSDRRPEFQKMIRHAEAGRFQIVLTYKSNRIARNMLDALRYEERLEKAGVKVVYCKENFGDNAAGRMALRMMMSLNEFYSENMAEDITRGMKDRAKQCKVMGTIPFGYKRGEDGCYAIDESKAEIVREIFRRYAENETQASIAEDLNNRRIFTQQNRPWGKNSFHTVLTNERYIGVYKFADIRIENGMPAIIDRSLFEIVQEKVGRRREVAGRRRESTEYLLTGKAFCAKCGAPMVGVSGTGKGGSLYYYYVCKNRQEHHNCKKENVRKAAAERQIAFRLKTIVLKPEVMEWMIQNVLRFQEEAKKQSDLASYQNRLVEVRRSLDNLIKAIEAGVFSQSTKARLDELEAEQRELQGIISVERSKLNTVTREQIEYYLESFRDGDVNDPAYQKRLFKAFLVKVFLDDDKCRIVYNYADGLDTLEFPLTLDDIESADVSAECSYNACSGVPHTESQSRFGIFVSGKRHARQIFFPKGAENPCRTGRKYGIIHWLCL

SEQ ID NO: 664 - protein, 571 aa, unidentified
  source 1..571: note = Bacteriophage uvig_199031 from the Index of /pub/databases/metagenomics/genome_sets/gut_phage_database (ebi.ac.uk)
MKTTDQPQVKQYVIYSRKSKFTGKGESIENQIELCRQYIAMHFGEDEAEHALVYEDEGFSGGNLERPQFKQMMKDSQKIEFAAIVVYRLDRISRNIGDFAKLIEDLGDRHIDFISIREQFDTSSPMGRAMMYIASVFSQLERETIAERIRDNMHELSKTGRWLGGTTPTGYASESLSSVTVDGKVKKACKLKPIPEEIQLVKTIFSVFTESGSLSKTDQYLLEHRCVTKRGKQFTRFAIRGILTNPVYMIADDTAYQYLKENNVDLFAEPSEFDGEHGIMAYNRTLQRPGKATQIRPMEDWIVAVGKHPGIISGANWVRVQSMLDVNKSKSYRRPRSNVALLSGLLRCGECGDYMRPKLTGRTNANGELIYTYMCSTKERSHGAVCSMKNCNGNTLDAKIVEEIRKVATDKKDFGQLLSKTKKVINDNKASYEAELTLLVKNHAETEARIKRLVESLSVASETSAKYVMEQIDELHRQSEQEQTRIAELEKLARQSNALSQNLFFYRDMIESFADTVDSTTIEERRRLLRTIVKKVVWDGKNVYVYLFAEDGELNLPPIGQLMCPSGEDSE

SEQ ID NO: 665 - protein, 540 aa, unidentified
  source 1..540: note = Bacteriophage uvig_17362 from the Index of /pub/databases/metagenomics/genome_sets/gut_phage_database (ebi.ac.uk)
MDNVVIYARYSSDKQTEQSIEGQLRYCYQYAEQHDYRVVGEYIDRAISGTSDRRPQFQQMISDAEKKQFKYVLVWKLDRFARNRYDSAIYKTKLKKSGVKVLSVTEGIGDGDESIILEAVLEAMAETYSRQLSQNVKRGMHESALKGLSTGGTVPYGYKLRDGRLVIDEPAAKNVKFIFEQYAAGVGKKAIADALNAKGCKTATGRDFSVVSLAHIFKNKKYIGIYHYNDEIEIEGGCPAIVDKALFDRCTLRAEQNRRAPAKGKGEVDYLLTGKLFCGLCGSPMVGDSGKGKTGAVYYYYTCANRKKNGGVKACPKKREDKGFIEWYVVEQTLKYVLDPERIALIAERVVAAYNKDFSADAVADLERQLAAAGREMDKLADSLINAASPRLVESINKKAEQLDAQIAELENELSKLRICAAARLTVEQVTAWLKSFCNGDPLDLEFRRRIIDVLVNAVYLYDDKVFIFFNVKNGKQISYIDFCADFADDPPEGESSTFNACGSPKAAFRGCFFLCVFIAEVLFTAAILCKFRQITVYIY

SEQ ID NO: 666 - protein, 514 aa, unidentified
  source 1..514: note = Bacteriophage uvig_135797 from the Index of /pub/databases/metagenomics/genome_sets/gut_phage_database (ebi.ac.uk)
MSMNAVIYARYSSHNQTEQSIEGQLRDCYDYAKRNDLTVIGEYIDRAISGKTDDRPDFQRMIEDAPKRQFERVLVWKFDRFARNMFDSVTYKHELKKHGVKVISAMENIGEGDESVLLEAMLEASAEYYSLDLKKKIARGMRESALKGKFVGGAVPWWCSVNAEHKLIVIDERAAIVKEAFARYDSGEGSKSIVDDFAKRGLRSNRGMPVTLSWLLSILKNRKTIGEYTYNGIEIPGGLPAVVDKPLFDRVQERIARKRRTGGGEATSKTEYLLQGKLFCGLCGSPITAECGQNRKGVVYNYYACSLKKKKHQCKKANERKDFLEWYVVEQTLDYVLTPDRTDYIAEAIVAEYERQFDKSGIKALEQKIALTEGEIQKTMDLCIQATTDAMRKRFMKRCEELDAKKADMEIDLSKLRVAASITYTKEEVRAWLRQFCAGDSFNPAFRRRIIDVFINTVYLYDDKLIIYYNLRDSRQVSYIEAIGASSEIENLRPVPDNKKTAVECSTADKNGGA

SEQ ID NO: 667 - protein, 570 aa, unidentified
  source 1..570: note = Bacteriophage uvig_240645 from the Index of /pub/databases/metagenomics/genome_sets/gut_phage_database (ebi.ac.uk)
MRKKITKKQAEDKVAIYVRVSTHWQIDKDSLPMQKTDLANYCAYVLNINNYEIFEDAGYSAKNTDRPDFQKMMSRIRSGEFSHLLVWKIDRISRNLLDFIDMYEELKRLGVAFVSRNEQFDTTTAMGEAMLKIILVFAELERNTTSERVSNVMISRAETGKWNGGRVPYGYVSPGRGKMPVVDKIEAAVVKQIFNNYESSRSTTMVARDLSDKGILTKAGNKWSATTISKILGNRWYIGSYIYNMRDSTDDYNLKDESEWVVVDNHHEPIISRDQFNRVQETLSMNTKDKTRGAITRQRKNAHIFSCLLECGQCGGNMAATIDRPRKDGTRPSIYGCYSRRSTSKCTNKYVSDVTLLPFMLSYIKAMMLMKKKVSSIENVKSAENFLIANAGMTDVKAIEGVGETYKLLKSGSVGIEYEPGISSYKDAPETKASMERLRTEYGKNVRALNRMKSLFLYGDDDIDKASFLKEQHDLEDEIKRQETILARYESTDGSLDEMDEDEFEAKASYVIMAKMLTGEFDPSYDIVCKTLDPMVLQRFFKSIIDKVGIVDGKVCWIRFRNGITHKFMY

SEQ ID NO: 668 - protein, 522 aa, unidentified
  source 1..522: note = Bacteriophage uvig_358290 from the Index of /pub/databases/metagenomics/genome_sets/gut_phage_database (ebi.ac.uk)
MLTDSMNQKSNAVIYARFSSDKQREESIDGQIRECKAFAQANQLNVIAIYIDRAMSARTDHRPDFLRMIKDSRSGAFDYVLVYQLDRFSRSRYDSAIYKHELKKNGVKVLSAKENITDSPTGIMLEAMLEGYAEYYSAELSQKVKRGMTENLLEHKWNGSPVPLGYALDANHRLVIDPDMAPHVKALFEMFLAGKSYAELARYLDEKHIRTVTGRKYTGPTVHNLMSRQLYTGTYTWGGQVIEDFCPAIISKSDFSRASLRMANRKRTAKDGIPMSVRRSPEYALTGIIYCGECGRTMTGYSGRGQNGDRYYYYRCNSNNNRCRQTEKIKCKNHPIRRNRLEDLVLQTTVNILSDKEAVAAIAEQVSRIKLENPYASELSSIKSRLADLKKRHDNSVKAIEAGVMSQAIMDNVCKYEAEMDNLKARQEKIKLATPSLQIDPVAVEYFLKSLLLNKKQHDKYRLDLFEAFIHRVVVYHDKVEIQYNYLPGHKLENPITTPLPGCSNFNKVVGPLGFEPRTNRL

SEQ ID NO: 669 - protein, 479 aa, unidentified
  source 1..479: note = Bacteriophage uvig_357839 from the Index of /pub/databases/metagenomics/genome_sets/gut_phage_database (ebi.ac.uk)
MKVAVYIRVSTLEQAEEGYSIGEQKDKLRKYCEIKDWTVVKEYVDPGRSGSNLNRPSMQQLIKDAPKGLYDAVLVYKLDRLSRSQKDTLYLIEDVFQKNDIHFVSLSENFDTSTAFGKAMIGILSVFAQLEREQIKERMTMGRIGRVKSGKIMEFNNPPFGYEVEDDNYKVKPLQGAIVKKIYDMYLSGKSISKIKETLNEEGHVGNPYPWSDTRVRYILSNPTYIGKIPYRGKLYDGRFTPLVNDATFSKVQQELKERQVSTAKRFNMQLRPFQSKYMLSGILKCGYCGATLFVNSYVQPNGHRRLRYNCPSTYASMRKAKKYAVKDPNCPFKLVYAEKLEPVVINEVKKLALHPESIHKPKVAHHKGINVDAVKKELASIKKQQQKLIDLYVISDDINIENISKKSADLKIQEEALTKKLSQAVEPDNGKLINFQNLLAKSSDIDQLSYDEQKFIVKKLIKSIDVYNNDRIKIHWNI

SEQ ID NO: 670 - protein, 617 aa, unidentified
  source 1..617: note = Bacteriophage uvig_263250 from the Index of /pub/databases/metagenomics/genome_sets/gut_phage_database (ebi.ac.uk)
MAKTADTIAIYSRKSRYTGKGESIGNQIDLCREYIRTHYGDAAAEHTVVFEDEGFSGGNLNRPDFKKMMTAAKDRKFKAIVVYRLDRISRNISDFSSLIEELGRLGIDFVSIRESFDTSSPMGRAMMYIASVFSQLERETIAERIRDNMHELAKTGRWLGGTTPTGYASESVKSITVDGKTKKACKLKLLPDEAEIIYKIFDLYEQYDSLTMTETELLRQGIKTKTGRSFTRFSIKSILQNPVYLIADKDAYQYFVDNEAELFAPESDFDGVRGVLAYNRSDQEKGRATVYNPISEWIVSVGEHPGIISSNRWIRVQESLERNKSKSYHKSRGNEALLTGLLWCSCGSRMYPKVTGRKTADGQVVFPYMCKLKERSRRELCNVRNANGNLLDAAICEQVKHLADHSSDFMKQLEKAKSAHAGNRSEFETKLSTLRKEQAETQRKINALIDSLADFSDSTAAVHLKKRIEELNTQDATLSSRIRELESLTDSGVLGGIEFDVMRQLLTVFHDNIDDMTVTQKRAAIRTVVRKVVWDGKVAHVVLFGSPEDEIDWTTFPVDPEEDDNDPEGGGDGSDSPSGVRSGEDSILNASAGIGRKPRLAGGIKGIHGLHQPNGSN

SEQ ID NO: 671 - protein, 485 aa, unidentified
  source 1..485: note = Bacteriophage uvig_148588 from the Index of /pub/databases/metagenomics/genome_sets/gut_phage_database (ebi.ac.uk)
MGETYGVVNRNAMRVALYPRVSTLEQAKDGYSINEQTERMIKYCEAKGWVVHKIYTDAGYSGADTDRPGLQSLIKDAESNKVNAVLVYKLDRLSRSQKDTLTLIEDVFLPNNVDFISMTENLDTSTPFGRAMIGILSVFAQLEREQIKERMEVGKIGRAKEGKWCGSRYVPIGYRVENDELVVHEYEAMQIREMFRLFNMRISQRRVAEMLQSKGYRTTYDGNWNRHNIRPLLENKHYIGMVSYKGEWYEGIHKPIIDKETFEKTQAILAERDEDANSRISRINAPLAGMIRCGHCGNKFFFRRAKTKNSAKLYCNCYKRSCRAGKWKDIPKEERCKNKIWKAEELEKEVFDEVRKLALHPESFDIGSTESDENAMKIKVISKRIEEIDSQLDKLIDLYTLGTLDINVIKSRTDALLAEKEKLEVNMRSLENKEKMSKEEAVEIASSLCDVIDSGDIDEIKALVQELIKEIVVDEEDLHVYWKFA

SEQ ID NO: 672 - protein, 523 aa, unidentified
  source 1..523: note = Bacteriophage uvig_171237 from the Index of /pub/databases/metagenomics/genome_sets/gut_phage_database (ebi.ac.uk)
MREFKQEELLPAVAYYRYSPGGGQTEQSIEGQRRDCMAYAKSHGYVIVKEYIDRHLTGRNDKRPAFQMMMQDAQLHRFTTLIAWKNDRISRNRRDALNYKDQLKKCGVQICYAEMDIPKGPEGILMESLMDGLAEYYSAELSQKIRRGMTESAYKCHALGSYPPFGLMVREKKFVPDPQTAPYVRWIYEQYAQGTQIKTICDALNAKGLRTRRGGEFNKNSLRRILSNKKYIGIYEAKGIRTENAIEPIIDRDLFDAVQARIPLNNHQGGRTGAKRIYPLSGIAYCAICGAPLIGDQGTGRAGRTYSYYACTGKKHRRHCNKKNVRQEVLDDAVLHTTLDYVLAPSVLPQIAAQAAAASASNDTTRAELNAAQAALDDTNRRINNILTAMEDGSFSKAAASRLTVLESEQSRLEAQIKALKRKRPTLSPNRIEFFLESMSQRTGELPQDYLNRIIKIFVSRVDLSNEDLKITYALTKKTAIPHGTAVNSATNKERTIELNPCSTVALSGGADGSRTHVRKEIS

SEQ ID NO: 673 - protein, 501 aa, unidentified
  source 1..501: note = Bacteriophage ivig_3933 from the Index of /pub/databases/metagenomics/genome_sets/gut_phage_database (ebi.ac.uk)
MTAVIYARYSSDSQREASIEGQLRDCKDYAEKNGITVVGTYIDRAYSAKTDDRPDFQRMIKDSAKKIFDVVLVWKLDRFARNRFDAVNYKYQLEKNSVHLVSAMEPISQGPEGIMVESMLIGMAEYYSAELALKVARGERENALQCKYNGGVVPLGFTIGKEDRLYHIDPETAPIVQEIFTRYADGEPAEKIAASLNERGLRTRTGKPFVKNSFFQIFRNRRYIGEYRYKDIVTPGGIPAIVDQDLFDRVQQRFEQNRIAHGRPAKEDVSYLLTTKLFCGKCGTLMGGESGTSHMGNTYYYYKCGNAKRHGKAHCDLKAIRKEPLERFVVDTAIKVIFSDEIIERLIDLVIEAQQKENTRLPVLKDQLRDTEKRLANLLEAIEQGILTPTTKQRLDELEARKEALNTSILEEELKKPVLTREWIRFWLEKFRKGDVGSMEHQRQIIDTFVNSVYVFDDRVVLNFNFTDDAKTVTREEVLGSSAVDNAPPKKRAQLCYFVAK

SEQ ID NO: 674 - protein, 453 aa, unidentified
  source 1..453: note = Bacteriophage uvig_584312 from the Index of /pub/databases/metagenomics/genome_sets/gut_phage_database (ebi.ac.uk)
MECVAYLRVSTEKQAEEGHGLDSQKRDVECYCRKNDLIVSEWYVDDGYTGANMDRPALQRLIFACSKRRVKCVVAFKLDRLSRSMVDGLYLIERVFIPNGVDFRCVHDSVNYGTPMEQAYTQIMAAFAQLDKNTMMLRMRGGMLERVKRGYWYGGGNLPYCYDYDRKKGILVPIPEKARRANMALDLYIDGWSDNRICNELGFRSEQVVRSVITGVVNIGLIKYKGNIYQGRHEPVFDRDRFYLAQNLRKNRKKARSYVQPDVNILTGLCYCGECGCKMRYQKWTKSQTRMIWCCSHDKALNYLPNFNPDCKNKAQRADEIERQVEEQMIRISLDLSNYMPKEKESRLDILISQLEKEKKKLRRLYDLYAEGNDMVLDMIRNEEEEVQRMEDNVRECEQSQNPTRETIAYKNVKRLADVWDQIDKPEKNKILKSIIDKVVIVNGDVEIQLQRF

SEQ ID NO: 675 - protein, 469 aa, unidentified
  source 1..469: note = Bacteriophage uvig_80961 from the Index of /pub/databases/metagenomics/genome_sets/gut_phage_database (ebi.ac.uk)
MRAGLQIRVSTLEQAIDGYSLAAQEKKLKEYAQFKGYEIVGIYRDDGYSGASLNRPGLRRMMSDIEADKLDIVLIYKQDRLTRSVKDLLNLLDIFDRHNVALYSITENIDLSSPFGRAALKMSATFSELERETIIERSKMGKDQKARQGELMGNGKSPFGYKYDKSIKRFEIVPEEAEIVRNIYSLYIKGMSIRQLNAHCRETYNHPYFGNPMSCKAILHRPMYAGYFQWKGELIKGVNFEPIISYEDYLKVQNILKQNTFRRNRLTSPYLLTGLLLCGECGNRYVGKYKKSCQTNSEGQRIQYGNKYYGCTARIKRDKNYHPAKCTNKLWRVDILDEIIVNAVKNIDFEDIKTVKSPEGLFDSLRAEIADAKNKIDKLLDLYMSDLITREAYEQRLYEYEKKIRQAETVIEQEQIKLGDSPDIPTNYLKEQQLRLDDMTLDEKRLYLKMLIKHIILKQDEIYIEWRIK

SEQ ID NO: 676 - protein, 477 aa, unidentified
  source 1..477: note = Bacteriophage uvig_10984 from the Index of /pub/databases/metagenomics/genome_sets/gut_phage_database (ebi.ac.uk)
MSIIKAALYVRVSTMEQVTDGYSIGEQKDKLLHYASAQGYAVVDTYSDEGFSGKDLLRPNMERMLNDIQHGRINTVLVYKLDRLSRHVKDVLELVETFDKCNVTLYSLSENFDLASPFGRAALKMMATFAELERETIVERMEMGKIARAKEGKYTCPGTRCPFGYRHDKKNDRLLIEESEAEIIRKIFDLYVNHGYTFRKLYDYCREAYPDVKYFNNQMCCKPIIERPLYAGYFRYRGGELTKGTNFEAIISYELFLQAQAQVDRNRTKRLSDSSPYLLTGLLICGRCGNRYVGKMYERYTKKPDGTHTKHYRYRDYGCAARLKRDKNYHPAKCDNDIYRAEELEKIVEDYVLNLNIDDYNKADFSPGLIDKMMSEIGAIKRSQSKLLDLYLSGDIDKDTFLIRKIEYDSKIAELQNLIEKETESVQSAPTNAEAIKKSIAEYSMLNRRQKRTLLEYLIKNIIVDGSRITVNLRLKK

SEQ ID NO: 677 - protein, 444 aa, unidentified
  source 1..444: note = Bacteriophage uvig_226352 from the Index of /pub/databases/metagenomics/genome_sets/gut_phage_database (ebi.ac.uk)
MEKNKHINKIAAIYIRVSTDAQAEDGYSIDAQKEQLAAYCVSKGIKNYEFYIDGGWSGSNINRPEIQRLIKNAQDGKISHCIVYKLDRLSRSQKDTLYLIEDVFIPNEVSFVSLNETLDTSTPMGKLMIGILSAFAQLERENIRLRTRMGMKERVKDGYWMGGGRIPFGYDYDKNQGILVPNNDADKVRKIYSLYIDGKSPQAIADILDLKYDKLVMQILTRKSNYGVIEYNGEEYKGRHEAIISKEIYDKAIKCMNERSINKVAFSKHLLTGLVYCGHCGAKMRYQKWGKNGCKLVCYSQQTSKKYLIKDENCVQERVWAHEVEEAVLNYLFSLKEDENGDIIDTSNIEETDIIKELQENYDLCQKKIKRLYNLYAESENDLLLETIQEQREKLKEIEDKIKEEQIKRKNLDQKINTAELVTNLRETWKYMSIEEQQTTLRML

SEQ ID NO: 678 - protein, 446 aa, unidentified
  source 1..446: note = Bacteriophage uvig_143228 from the Index of /pub/databases/metagenomics/genome_sets/gut_phage_database (ebi.ac.uk)
MVTALYARVSTDAQAEEGYSIDIQGERLEAYCKLKGYKSFEHYVDGGYTGSNLNRPAMTRLIEDCKCGEVERVVVFKLDRLSRSQKDTLYLIEEVFLPHNVDFVSISESFDTATPFGRAMIGILSVFAQLERENIKERTKAGMLGRVREGYWPGGGRTPFGYDYDPKLKTLVPNKDAETVRKIYDLYIGGCSTYEIQRILGMKYDRLAEQILARKTNTGVIVYNGVEYQGKHEPIISLETYERAMACMKKRSAAPTPRNNVYLLTGLLVCGVCGAKMRYQGGHIYCYSRQKSKAYLVKDPNCDNESHNVQDIENAVLTIFFQNTSRFNKAEAYDIKTNVLDELVQQKKTLEQKIRRLYGLYGDGGDDYLIEAIEESKQQLVRIADKIVNEEDREKEETKRRRLVEKVGNIRDRWDTMAPEEQREVLHEAIKQITITHDKINIDFNL

SEQ ID NO: 679 - protein, 480 aa, unidentified
  source 1..480: note = Bacteriophage uvig_579072 from the Index of /pub/databases/metagenomics/genome_sets/gut_phage_database (ebi.ac.uk)
MKFAIYVRVSTLEQAEEGYSIEEQIDKLIKYCEVKNWDIFKVYKDGGFSGSTTDRPGLSSLITDSKRKKFQGVLVYKLDRLSRSQKDTLYLIEDIFTANDISFVSLNENFDTSSAFGKAMIGILAVFAQLEREQIKERMVMGKVGRAKSGKAMSWSKVPFGYIYENDTYVAHPIQAPIVKQIFDDYMSGISITKLKEKLNDEGHIGKEISWSYRTIRQTLANPIYAGINRYNGELFEGNHEGIITKDYFEKVQSELKVRQVAAYEKNNNPRPFQSKYMLSGIIRCGLCGASLSVGMRAKRKDGSRHRYYRCYSKSKKKNLTMTKDPNGCSSPNYSMDELEKHILSQIEKIRLNPELIDVLSSNDSVVDLSSYDKRIDELDLSLEKIVNLFIDDAIPKDILEARMEKIKQEKDSLENKIDSLKLKRPILEPIDAKDILSKLTDNIWNLSYEDQKSIVMELISKILVYPDKLEIHWKFAINQ

SEQ ID NO: 680 - protein, 478 aa, unidentified
  source 1..478: note = Bacteriophage uvig_596872 from the Index of /pub/databases/metagenomics/genome_sets/gut_phage_database (ebi.ac.uk)
MQKRCFIYIRVSTQRQAEEGYSIPEQKERLEKYADAMDWKIMHTYIDGGYSGGNTDRPALQDMLREVERGNTDIILVDKIDRFARNLVDTVNILENVLNPHGVAFVSRAEAFDSSSQIGKFCLYILAMFAEMERTRIKERMADGKTGRAKEGKYKGGGHIPIGYDYDQESGALVPNEYEAAQVREIFDLFNSRTAIHTIMVQMNKKGYRTKYGEWGEGTIRYMVSNRVYLGEISHKGEWYAGLHKPIIERAVFDHAQQVLKEREKTWERYRPGKRYRSPLGGLIWCERCMAKYQLRNNGHNKDGAMRAYYMCYSRAKSDPKMVKDPNCKNKTYRDRDLEKIVYEEIRKLKTDPSYYPTITQSRDNAPQRKMLEKRVAQIDGQISRLMDLYMLGTIDVQAIQSKTTPLNNEKNALLAQIENLKDAAPKMSLERVLELVNMFETELAANDRTSGKLHDTIAEIIEHIGIDGEEVHIHWAF

SEQ ID NO: 681 - protein, 484 aa, unidentified
  source 1..484: note = Bacteriophage uvig_381385 from the Index of /pub/databases/metagenomics/genome_sets/gut_phage_database (ebi.ac.uk)
MKNKRKEILPGLSDMVDLYIRVSTTEQAMEGYSVAEQEKRLRQYSEAMGYRIYRVHIDAGYSGASLDRPAIREVIRDVKAGMVGKVIVWKLDRLSRSQKDVLIMLEDVFLANGCDFISMMESFDTTTAFGRAIVGILAAFSQLERENIKERTTMGKQARLAQGHYNGCRPPLGYEFLPGCNDLRVVPYEAAIVREIFSLFLSGTTAHAIAGKMAQKYPTLRTWEYNTVRRILQNYTYAGKVQDVDVVRDGIHESIISEADFSTAQTILQRNKEQRKQGRVSFGLLTGLIYCGDCGARMQIRRVSKTPNTRRKYICYSVSRVAKNMIRSDHCTNRKHPYSQEDLEGIVINEIKKLSFDSKYLDSLLHAEPETKTDTSDLYLDRLAEIEKQTDKLLNLYQIGVVEFPQIEERLSDLRKERDALKASMESQTPAAPPMESSQILDYIESFQEALDSGDKESVRNIIQLLIDKIVVLNENVEIHWTFC

SEQ ID NO: 682 - protein, 473 aa, unidentified
  source 1..473: note = Bacteriophage uvig_146439 from the Index of /pub/databases/metagenomics/genome_sets/gut_phage_database (ebi.ac.uk)
MSQDMIVVGYVRVSTEHQLDNYSIDEQTERLKAYCRAKGWILAKIYTDGGFSGGNTNRPALQQMLLDIRNNNINSVIVYKLDRLSRSQKDTLRLIEDEFLANDTDFISISENFDTSTPFGRAMIGILSVFAQLEKDQITERLSMGRTARSKSGLFHGGGQAPFGYDYVDSRLQVNSYQSLQVQEVYQRFLSGQSINSIHLQMKALYGGFWSAAKVLNMLRNSIYIGKVKFAQQEYNGVHEPIISETVFQDVQRLLTAPERDAQKSAAQKTPYRAGYLLSSMIYCGQCGSRYSANHGYYRCYSRSKSNKKYITDPNCQNDHWSIEELDQYVIQSIEDLLSNETLLADIMNSCQQNPVLPVIDRQALENRISEINKQMSNVIDLYQLVHQDGNDIPIEDIVSRIKQLSIEKSRLEAELKNDHTTPDNKRTSFLSTLQNFQEHFHNAPLETQRLIVSGLLESITVDGRKISLKWRI

SEQ ID NO: 683 - protein, 463 aa, unidentified
  source 1..463: note = Bacteriophage uvig_423324 from the Index of /pub/databases/metagenomics/genome_sets/gut_phage_database (ebi.ac.uk)
MKHVGLYIRVSTEEQTENYSIPEQRERLENFCKAKDWLVVDEYIDGGYSGAKLDRPAVQKMITDAGTGTIDTVLVWKLDRLSRSQKDMLYLIEDVFIPNSVDFVSLNESLDTGTAFGRAMIGILSAFAQLEREQIKERTMMGRIARAKSGLVMGPTAPYGYRYVDGQLIVDEYEASIVREIYDLYLQGYGMEKVSNMLYEKMQLTSASGYAAVRRILSRPTYAGLVHYSGEVYPGQHEKIIDVDMWKRVQEKREHSRNYQRGKRQKHLLTGMIYCKRCGAKYAYHVHSGNNYYDRYMCYSVCRSRKELIKDPHCDNTKYLAAELEQLIIAQIKELALDESKFNKVIQKRIEAPDPTQAMQKQIKEIDKQINNFMDLYQYGKVPVETINERIEKLTQEKSAIEKSIRELNIKPIPKREDYEPTLSRVDSIFETGSADEQRAAVRNLIDHIDIDGENVVIHWVFE

SEQ ID NO: 684 - protein, 458 aa, unidentified
  source 1..458: note = Bacteriophage uvig_441018 from the Index of /pub/databases/metagenomics/genome_sets/gut_phage_database (ebi.ac.uk)
MKKAGIYIRVSTPEQEKNGYSLNAQEEKLKSFALAKDYEVKKVYRDGGFSGAKLERPAMLEMIDDIENNRLDLVLVYKLDRLSRSQKNTMYLIEDVFLKNNVDFISMQESFDTTTSFGRAMIGILSVFAQLERDNIRERMTLGRMERIKRGFYMGGGKVSFGYRYNQESNVLEIDEGEATAVRRMFELFLGGNSIYSLINTLKKEFPHYEKTFYDASVRRRLANEHYIGNSQYDGKIYVNTHEPIIDDLTFNQAQLMLSTRSHGNAFKHKYLFSGMITCKKCGKSYNGFESVCGKYSNKYYRCSSTTYKFKKKNGWECSGKRFRCEDVDKYILDKIKSIATDQVVSKKSKSTSLPIKKEIDKLKAQQAKLLDLYLDDRIDTNVLDEKSKHIKDLLEKLNKQLKEKPAIEKKVFDESVDKLANNFESLSFEQQRILIGNVIEKIEVVGGDMNVYFFDTK

SEQ ID NO: 685 - protein, 466 aa, unidentified
  source 1..466: note = Bacteriophage uvig_426061 from the Index of /pub/databases/metagenomics/genome_sets/gut_phage_database (ebi.ac.uk)
MKKAGLYIRVSTPQQEKEGYSIEAQTEKLNAYAVAKDYKVFKTYTDAAFSGAKLERPALNEMIEDIENNKIDVVIVYKLDRLSRSQKNTMYLIEDVFLKNNVDFISMQESFDTTTSFGRAMIGILSVFAQLERDNITERMSMGKLERVKRGYYMGGGNVPFGYEYNQITGELEIQETQALAVKRMFELFLSGQAINKIVSILKKEFPVFEDSFMDSTVRRRLQSHYYCGKQKYQNKVYDAKHEPIVSIKEFNKVQRLISNRPHSNAFNHSYLFSGLIMCHKCGKPYNGYESVRTANGKKYKHKYYRCSCRTYKHKQKYGWACSGKSYRCDFLDAAIMSEIKKRAENSKFALKENNNEIDNKPIIREIARLNAQQSKLLDLYLSDKISTIILDSKTDELKDKIEKLELQLNQTVSKKDKEEFEKSLEELVDHFEEMDFSTRRSLIENIIEKIEVIDNEITIYFYVSI

SEQ ID NO: 686 - protein, 526 aa, unidentified
  source 1..526: note = Bacteriophage uvig_287690 from the Index of /pub/databases/metagenomics/genome_sets/gut_phage_database (ebi.ac.uk)
MDEYCLYLRKSRIDLEAEANGQGDTLARHRAALLKLAQKRGFNITGCYEEVRSGESIAARPEMQRLLNDVEDGRWAGVLVMEVERLARGNTTDQGIVADTFKYSDTKIVTPNKIYDPGDEFDEEYFEFGLFMSRREYKTINRRLQRGRRASLSEGKYIAGKATYGYERYKLSGEKGYSLRIIPEQAEIVRQIYNWYVNGELLPDGPLRPLGSYTIAKRLDARGIPSPTGGKWPPCTVKDILTNPTYIGKLRWSYRPTVKRMVDGELVKTRPVDRSVHLSDGRHEPILDEVLWHRAQLMLKNRSHAPVPKSTNIRNPLAGLLICSKCGRSMERRKFKHGRDTVACPNKDCTCKSSVLEEVEAGMLDSLRIWLSDYKVKLAQSQENISHTGPTAEQEITSLQRTLGTLQAQMENLYNLVEQGVYSTDLFLQRSQALTARMAEVNQQIESTQAALTASRRIARNRFEIIPRIERVLALYPTLTDPREKNTILKEVLEKILYTKTTGSRWEASDMNLYVFPRVETDGEQL

SEQ ID NO: 687 - protein, 515 aa, unidentified
  source 1..515: note = Bacteriophage uvig_61588 from the Index of /pub/databases/metagenomics/genome_sets/gut_phage_database (ebi.ac.uk)
MPEIRYIPAVGAPENAKLPVAAYCRVSSDSDDQLNSLSAQVREYTKQITAEPDWEFAGIYADEGITGTSTKKRNEFKRLMRDCEAGKVKRVLVKSVSRFARNTTDCLQYLRQLSALGVTVYFEKEGIDTAKMSSDVILTMTGAFAQEESNALSTNMRWSYQKRMQAGMFVGNIAPYGYDWKNGTLIINEAEARIVRWIFHSYLDGLNRAEIAAQLNAMQNEPSNRPIWYKTTVNYILANERYIGDALLQKKYTVQGTIGLEKRNHGEMPQYYVEDTHPAIISEDTFRRAQAMRIRQTTYLGPHIGSHIFQKRIRCAECGRTLRRKPRKSGLVSWVCLSHDENKALCPTPPIFESNIEKAAIMMYRILRFGIKDILHPMLYQLEQLQGRTVSDSTAINELNQSIASLSEQRHMLNRLLSKGFMEPDTCQAQVNAISQQLADLNRRRRSLIEAQVEDDAIENTQLLIDILEDAPENLVSLEDGGVFDMIVDKVIIDKDKNITFRLINGLELGGDFDG

SEQ ID NO: 688 - protein, 476 aa, unidentified
  source 1..476: note = Bacteriophage ivig_3872 from the Index of /pub/databases/metagenomics/genome_sets/gut_phage_database (ebi.ac.uk)
MIKKRVGLYIRVSTEEQAMEGYSISGQRERLKAFCVAQSWETIKFYVDEGISGRSTERPALKKMMKDIEDGLIDVLLVYRLDRLTRSVRDLHDILDFLEKHNCQFRSATEVYDTSTAMGRMFITIVAAIAEWESANLGERVRLGQIEKARQGEWSAPAPYGFRKNDQKRLEVNPDEIEAVKLMVRKVKEGYSFRQLSMYMQNTSYKPRRGYKWHIASLLDLLHNPVLYGAMQWNDEVYEGTHKGIMSKEDFMQLQNIIKSRQIQKKRETNYNFIYQTKIVCPSCGNRLSSECSRWKNKNGMERSANRYRCQSCALDGREPVSISEYKLTLQLIQHMNALTFDENDHEELEAEKDNLQLIENEMRRIEREREKYQRAWASDLISDTEFKNRMDDTRKRYSDLERQLNASQDETTFGNVNPEYIKQLSNEFNQNYEYLTDEEKRTFVQQFIESIELVEASSPTASVKKVYDVKLVRFF

SEQ ID NO: 689 - protein, 516 aa, unidentified
  source 1..516: note = Bacteriophage uvig_541020 from the Index of /pub/databases/metagenomics/genome_sets/gut_phage_database (ebi.ac.uk)
MQKNTTVETTTKAVIYARYSSDRQREESIEGQLRVCEDFAKRNGMTILHVYADRALSGRSDQRPEFQMMIQAAATQTFDTVLVYKLNRFARNRYDSAKYKHKLKKYGVKVVSAMENIADDPSGILLESVIEGMAEYYSAELAENVMRGMTENALEGKWPGGIVPLGYKLDTEHRLIIDEPAAKTVRWIYQQYLDGKQPTRIIRELNAAGCLTALGKPFRKNSLRTILKNERYIGTFIWNGIKKPNVIPAIIDSADWHKVQEIMKVKKKCVSKAKDNDYYLTGRLFCGHCGENMVGTSGTSKLQRIYRYYICSGHQKKKGCTAKAVRMDKLEDIVCNATTRLLSNRDAIRAIAKQAISAQETQGPSLVLQSLQNQKADISRKLQNCVKAVEEGLISQTVTNHIHDYEKQLQTLTDAIQKEELMNQIPHLTEKHIEFFFWSISQQIKKADKYKSILLSSIVRSVIVYEDFIEIQYNYKKELPILQNPVRIGGSDMPVMVEHRGIEPLTSRLRTLRSPS

SEQ ID NO: 690 - protein, 507 aa, unidentified
  source 1..507: note = Bacteriophage uvig_396371 from the Index of /pub/databases/metagenomics/genome_sets/gut_phage_database (ebi.ac.uk)
MSRIAIYSRKSKDTDTGESIKNQIQMCKDYFLRKDANHTFEIFQDEGFSGGNTNRPEFKRMMLLAKNGQFDIIACYKVDRIGRNIVDFMNTFSELEKNNITLVSVTEGFDPSTPAGRMMMTMIAGFAEMERMNIAQRIKDNMESLAKMGRWSGGTCPTGYRSIKISNSGKYAMYLELIPEWKEKLLDIFKYAADGKTCSSIGKLVSMSSKSIANIISNPVYCKSDLPSKKFLESLGYDVYGDCNGNGYIAYNRRPKAKNGKKLFNSKNMFVAVSTHEAPIHSSEWIKANLNIKSRAQEKRPRISQYSWLAHLVKCKCGSGMYLTPGRFRKDGSRYYYFCCSARKYNKSCSAKRINANHLEEDILEILEAVSKNKTLLKSYISPPSNNEIKSKIIKIKNEIKKNNKIMESLASKLALLEDYAASVIIEKMNSISLSIENLNTELLQLQREDLLNNLDELNEDVLFNSIQEMLTNWDFLDMEEKQDCVKNIINEIHLLDNSKFKIKFNL

SEQ ID NO: 691 - protein, 547 aa, unidentified
  source 1..547: note = Bacteriophage uvig_301458 from the Index of /pub/databases/metagenomics/genome_sets/gut_phage_database (ebi.ac.uk)
MKAVIYARYSSDSQREESIEGQLRECTEYAERNGITILRSYIDRALSARTADRPEFQNMIKDSEQKLFDVVLIWKLDRFSRDRYDSAHYKRILKKNGVKVVSVKENISDGPEGIILESMLEGYAEYYSAELSEKIHRGQKENALKGRNNGGGIPLGYLLDKKEQKLVLDPVTAPLVREIFQRYADGEIVRTIVEDFNRRGLKTKSGKPFSPNSFNRILKNRKYIGEYRYQDVIIPSGVPAILSDDVFYQVQARLEKNKRAPATAKADVDYLLTTKLFCGLCERMMIGESGTSHTGDKHYYYKCAGAKRKLGCKKKSVKKDFIERAAVILTVNRVLRDEEISRIADSILALQNSEDTTIPALKKQLADTERGIENMLNAIQKGVLTSSTKERLEALEKQRDNLKIAVLQAELQKPKYTKEQIVSWIGQFKYGDVNSREYQKRIIDTFVNSLYLFDDRLVITYNFKGGTEIITLKDVEAVYGSDLKAMSPPKRKTRSHVGFWSFLLSMRVFGLYDFAKCHRILQFVCIICRKNAHGNAHENRTTCPGEG

SEQ ID NO: 692 - protein, 475 aa, unidentified
  source 1..475: note = Bacteriophage uvig_430479 from the Index of /pub/databases/metagenomics/genome_sets/gut_phage_database (ebi.ac.uk)
MKVALYVRVSTLEQAEEGYSISEQKDKLKKYCEIKDWKITRIYSDPGFSGSNLNRPSMQQLIKDAGTGLYDAVLVYKLDRLSRSQKDTLHLIEDIFQKNNIHFISLSENFDTSTAFGKAMIGILSVFAQLEREQIKERMMMGKAGRAKAGKIMAWSNIPFGYVKDNDTYKIDPLRANIVKKIYSMYLAGDSITRIFNRLNEEGHVGKDIKWSYRTVRQILGNASYTGVVTYHGKSYPGKHQPIIAKDIFDEVQRQLKVRQIEAEKKFYAHPFQSKYMLSGLLKCGYCGATLVINKSHRKNKPPRWRYNCPNTLSRKHVRTYAHKDIDCLFKFIYRDEIEELVISEVKKLALNPQSITEDYEQHDEEQIDVEAIKKELASIKRKQDKLVDLYLIADTLNIDELNNRSTKLKEQQKALETKLRPTQKDDNKIIDFQKNLAKAKDIENLDYDKQKFIINQLVSSIDVTNENVTINWDF

SEQ ID NO: 693 - protein, 470 aa, unidentified
  source 1..470: note = Bacteriophage uvig_425764 from the Index of /pub/databases/metagenomics/genome_sets/gut_phage_database (ebi.ac.uk)
MKGESELDKKAAIYIRVSTQEQATEGYSIQAQTDRLIKYVEAKDFILYKKYIDAGYSASKLERPAMQELIQDVQSKKVDVVIVYKLDRLSRSQKDTMYLIEDIFRPNDVELISMQESFDTSTAFGSATVGMLSVFAQLERKSISERMITGRVERAKKGFYHTGGQDRPPAGYQFNSDNQLIINEYEAAAIKDLFRLYNDGLGKSSISEYLKKNYPGKNKWLPSSIDRMLKNSLYIGKVKFSGVEYDGIHEPIIDEVTFYKTQKEIARRKQTNTKRYNYVALLGGLCECGICGAKMANRRSVGRKGKVYRYYRCYSKKGSPKHMMKTDGCSSKAQQQFIIDEAVINNLKNIDVEAELKRRSAPQTNTSLISSQIESIDKQINKLIDLFQVDSMPLDVISEKIDKLNKEKQSMEKLLERKNKLDKTELQHRFDVLKSFDWDNSSIESKRVVIEMLVQKVIIHDNSIEIILVE

SEQ ID NO: 694 - protein, 617 aa, unidentified
  source 1..617: note = Bacteriophage uvig_128102 from the Index of /pub/databases/metagenomics/genome_sets/gut_phage_database (ebi.ac.uk)
MDNEKKVAGLYIRVSTEDQAREGFSLPEQEKRLRAMCEYKGYEIYKLYKDAGISAKTGNYRPAFEELLQDIREKKCNTIVVLKLDRLTRSVFDLEGIMRFLEENNAYLDCANEEINTTNSSGKLVARMLTSVSQNEIERTSERTKFGLVGAIKEGHIPGKNPLGYKRDGKKLVIDPLTKDIVKRIYDLYFEGKSYSNIATLFNNEEVLGKTNWRDTGILRIISNEIYKGDFVSGKTFNKPVYYENVVEPIVSRELWENCQVQKKKNQKSYMRTQTYIFLQKLKCTKCGRILAGGASHKLKSDKWYFYYRCEDCKNNIKEEVIENSVKTLLADILEYDNVVNEFFLPVLKSKLNDPKVELEKELKSLNNKKERIRKAYIDSVFTEEEYKQESKTIDRQIEFVNSKLLENSQAEQLNFTTEDILLKRDMDFINKVKLPISYYAFNENWDLLDRETKADIVMRYIDDIELEIKNKKYHVKQINFRSTFYNDYEDLYKKGYIDKKRPLTYDFNGVCVDTNIRYSEYLPIKDVMQHLYRLNEYYEVNLYKGTYYKETEKLDIGPLQRNEVPIRVFPLQKDNNGDKNWLSMGMLATKNNLNDIKVNIRDVFETIPDNVTKEDF

SEQ ID NO: 695 - protein, 525 aa, unidentified
  source 1..525: note = Bacteriophage uvig_294201 from the Index of /pub/databases/metagenomics/genome_sets/gut_phage_database (ebi.ac.uk)
MATKKKTATQRADGVYNRAVIYARYSPGPNQRDESIEGQVRECKEIAQKHGLMVIHEYIDKRLSGTNDERPDFQRMLRDADRGLFDVVITWKNDRFARNRYDSAIYKQRLKRNGIKIIYAKEHIPEGPEGIILESMLEGMAEYYSANLSQNIRRGQRENALEGKFIGGTIPLGYKLDAEKRYILDPDSASIVREIFERYVAGESVTDICNDLNARGYLTARKKKFNRSSLHRIFTNEKYIGVYKFEDIECPGAVPRIVSDELFKAASIRAARNKKSRRTMPEARVEYMLTGKIFCGHCGEPMGGSWGTSKRGTRYNYYVCNGHKNKKSSCHKKPERKEKLEKLVINIVINNILRNQNVVNYIVDRCMVIQEREIDKSPAEGLRRELAENEKALKNIMAAIEAGIFTATTKDRLVELEERCAVLKQGIAAAEIQPPKLSREQLLFIFEKYQNRSLKDPEFIRDVIDTFVHAVYVYDDKMIITFNYSENNTLEISKKEIEEAATGAASPVFDFCGVNSTKINNNFLT

SEQ ID NO: 696 - protein, 546 aa, unidentified
  source 1..546: note = Bacteriophage uvig_174822 from the Index of /pub/databases/metagenomics/genome_sets/gut_phage_database (ebi.ac.uk)
MSFFGNKLPERNEIAVVYCRVSTDGQAERGTIESQITYAKDYAKFKGFEIKDFYCDDGVTGMMPLAERPEGKRLTEDAKAGKFNVVYVYKIDRLGRSARETLNAIYSLKESGVILRSLTETFDLETPMGQFFMQLLANIADLDRNNFLERSRLGTERLVKAGKWVGGIVPYGYEINDAKELVLNTRPFPDSDLCEAEVVRMIFDMVGKHNKSSVEVARLLNALGVPTSYSRSTGKRRKKTIGIWRSNTVLRIIRNTTYKGIHYYGKRSGYYSTPIAREVTPIVDEKIWEQANAEIDKNRKSSFRVPASEYMLAGLIKCGVCGANYSGTRNNRDGAYYRCSSRMRKHKIEKNKCNSRYVNSDLLESIVWNELIDLLGNKKTLRAAVKNSLTEMEKKQRNIEPDIEKAEKALQDKELEKARLIQLYTKGTLSEEDVIAPLDALKNELEGLTEHLSALMKEKENIDKAQIIEKEDIDLYVDKIREFLSECDDPKTKKRLIQTLVKKITVISPTDRKKPIEFDIEFRLKVPAHKVYSDGAKKRTDTDSSH

SEQ ID NO: 697 - protein, 478 aa, unidentified
  source 1..478: note = Bacteriophage ivig_1533 from the Index of /pub/databases/metagenomics/genome_sets/gut_phage_database (ebi.ac.uk)
MKTAIYVRVSTNEQAEEGYSIDEQIDKLKKFCEVKDWQVANIYKDPGFTGSNIDRPGLKKLINDVENKKIETVLVYKLDRLSRSQKDTLFLIEDVFGINNTNFVSLNENFDTSTPFGKAMIGILAVFAQLEREQIKERMTMGKIGRAKAGKAMSWHWAPFGYTHKDDSYEVVDLEAQIVKQIFHDYLSGISITKLRDKMNDEGHIGKDIAWSYRTIRQTLDNPTYAGYTKYKDQIFPGNHEAIVSKEVYDEVQKQLEIRQKEAYKKNNNPRPFQAKYLVSGLVRCGHCGAALGLHQYAKKKDGTRTKIYKCHSRTGKKKNVTMVKADNCPSCDYPKEELENVVLSEIEKIRINPQLIQKSSHSAQEIDDTPLIKRLEELDRKLEKLVSLYLDETLSLEMLNDKKELIQKEKTAIEGKLNKTNKQKPELKISEAADILKNLKGSILKLDYEKQKIIVRKLIKQITLKDDEMVIQWRFAV

SEQ ID NO: 698 - protein, 469 aa, unidentified
  source 1..469: note = Bacteriophage uvig_317982 from the Index of /pub/databases/metagenomics/genome_sets/gut_phage_database (ebi.ac.uk)
MYYERSYLRSCQVSSYEQATEGYSIHEQERKLKAFCEVQNWHEFKVFTDAGVSGGSMNRPALKRIMDNLEYYDLVLVYKLDRLTRNVKDLLEMLETFEKYNVAFKSATEVFDTTTAIGKLFITMVGAMAEWERATIRERALFGSRAAVREGNYIREAPFCYDNVDGKLVPNKHKWVIDYLVEQFKHGVSGNEIARQMNLKKVNVPKVKKWNRTSIIRLMKNPVLRGHTKYGDMYIENTHEPVLSESDYKRIIDVIENKTHRSKVKHHAIFRGVLTCPQCHNKLHLYAGKITDKKGYSYEVRRYKCDTCSKDKNVQTISFNESEVEDKFIELLKTYDMNKFKVDIVEESTPKLDYDIDKIMKQREKLTRSWSLGYIEDNEYFSLMDETKEILDKVEHSNSEVESTQTVTNEQLNMIDDILIKGWSKLNVEQKEELILSTVKEIVFDFVPRKYNENGKVNTLNISEITFKF

SEQ ID NO: 699 - protein, 465 aa, unidentified
  source 1..465: note = Bacteriophage uvig_598484 from the Index of /pub/databases/metagenomics/genome_sets/gut_phage_database (ebi.ac.uk)
MTSYRKLRVATYTRVSTLEQAEEGYSIQEQQDKLEKYCELKDWTITHRYSDPGFSGSNIKRPGIRELIAAAKQGDFDLVLVYKLDRLSRSQKDTLYLIEDVFQANQVDFVSLSENFDTSTPFGKAMIGILSVFAQLEREQIKERMTMGKIGRAKSGKAMGWSNVPFGYNLAGDVYEVDEFQATIVKRIFAEYLSGDSPVTIAKRLNDEGHLGKGTRWSWKTVRDILMNVVYTGYISFKGELYPGMHKPIIDMETYKNAQTQLEIRRVNADNPRPFRAKYMLSGLLKCHYCGSTLVIGVSINQRTKARSYRYNCPSSHPRKNSTYKQKASCPSKFIYKETVEKQVIEEIEKLPKNFKHKKAPTVDVDAVKKQIKTIKSKQSKLMDLYLIDGIDMEELNRRNDEFNKQIEALNKNLSTVPTEPDVTEALNQAKNISELSYDEQKKLVRLLISEIEVANDSIKIHWRF

SEQ ID NO: 700 - protein, 545 aa, unidentified
  source 1..545: note = Bacteriophage uvig_434341 from the Index of /pub/databases/metagenomics/genome_sets/gut_phage_database (ebi.ac.uk)
MGADSCMAASAKKVSANIMIRAVIYARYSSSAQKDESIEQQIEACKEYAQRNGIHIVSVYADRAVSGRTDRRPEFQKMMRHAENGEFTMVLAYKSNRIARNMLNALAYEEKLAKVGVNVSYVKEEFGDNAAGRFALRTMMNLNQFFSESLAEDVKRGMDDNARQCRVNGSIPLGYKKGADGKFAIDENTAPIVREVFQRIAKGETQASIADDLNARQIRTAAGKPWGKGSFHNLLKNERYTGVYIYGDIRIPGGMPAIIDRDLFENAQRRIEIMKTLVKSRRRREDVEYLLTGKLFCGHCNSAMTGSSGTSKTGTVHYYYRCHNQAVAKTCNKKAVRKDSIERLVVGIIRDYVLRDDTIERLADLLMEYRKKVEDSSELGYLEERLKESKATSKNIMKAIEAGIFNKTTNERMQELEQEQAELTEQIAEELRHIPNYTRKQAIYYLESFRHGDLDDKKHQKHLIANFLRAVYLYDDHIKITFDFDDDETGLDVPLETAESEALDSESSCVLINTPRVYHNVLIRTPVKIQMVGRVFVLVFYFDFL

SEQ ID NO: 701 - protein, 468 aa, unidentified
  source 1..468: note = Bacteriophage uvig_323835 from the Index of /pub/databases/metagenomics/genome_sets/gut_phage_database (ebi.ac.uk)
MKKVAIYVRVSTQEQAVEGYSISEQIDRLTKFCEAHSWKIYKVYTDPGFSGGNMNRPSLQKLFADCTQKRFDTVLVYKLDRLSRSQKDTLYIIEDLFLTNHVDFISMSENFDTSTPFGRAMIGILSVFAQLEREQIKERMAMGREGRAKQGKWHGGGNVPIGYDFINDYLIPNEYEAAQVKQIFDLAIRGYSYSDIARSMSGYTTKYGPYKVGYNTISLILQNPIYIGKIKTNTGYINGIHEPLIDETTFNEVQKKVTQIAEYYKKEHTGHYGQYLLSGLCRCASCGATYSAHYVGTKKHRYKYYKCRNRAYNWRDGSPKCMSPNIRVEVLDNAVLNEIRHLQLDPDYFDEVSNSPAADSSSLVETLNKRLENIQKQIARTIRLYSLGSVEEKDIENQLQILYSERDTLSLEIENATADQKDTADVKSILSMSNIDELDDTEKHNLVCLLINHIMINSNGDFEIHWTF

SEQ ID NO: 702 - protein, 504 aa, unidentified
  source 1..504: note = Bacteriophage uvig_400028 from the Index of /pub/databases/metagenomics/genome_sets/gut_phage_database (ebi.ac.uk)
MYKASNGSGELMENKVIRVGGYIRVSTQEQAKEGYSIPAQTKCLKSYCSARNWILHELYIDPGYSGAKMERPALQKMLSDIKKGFVDLVLVYKLDRLSRSQKDTLYLIEDVFLKNEVAFVSINENFDTSSAFGRAMIGILSVFAQLEREQIKERTQMGLAERAKNGMWHGSGITPIGYDYDPASNQLVVNEYEAMQIREAFDLFVNQNYAFTKIVKTFRNKGYSHKHGVWAHSSKLRYILSNKTYIGRINWNGEDYPGKHDPIIPSSLFEAAQKKLAEKDWKLTDKPAKSPFDATQLLSGVLFCGNCGGRYYGAGCYRGSHDPNSPKRRYEHIYSCYSRTKTKLEMIKDPSCKNKNWKTETLDNYVITRIKNLRLEGEIENLIAKERPKNPGIDQRKALEKQIDDIDRQISRLLTLYQLEDVPTAEIGLRLSDLTRKKKTVEEAIENIPLYEPELSVAKAKSLLADAEEIFNCGTTEEKRSLIHALIRKIILTGNDVVIEWAFI

SEQ ID NO: 703 - protein, 502 aa, unidentified
  source 1..502: note = Bacteriophage uvig_100684 from the Index of /pub/databases/metagenomics/genome_sets/gut_phage_database (ebi.ac.uk)
MIAIYARQSVEKKDSISIESQIEYAKREVFTEDFKIYQDSGYSGKNTNRPAFHEMMADVQSGRIEKVVVYRLDRISRSILDFADFINILESNRISFVSATEKFDTSTPMGRAMLYIIVVFAQLERETIAERVRDNYYARVKKGAWGGGPAAFGFDLVKTTIDGKKATICQPNEQISVVQRIFELYALPYSSLADVQRQLIQDGSVSSGGVNFDNAKLSSILKNPAYVRADTAVYNFYKAKGAILANLPEEFDGVHGCILVGKRDANERKYKDVSDHLLAMGHHEGIVDSTTFLFCQQKLSRNRQIKNTYKGKHSWLTGLVKCAHCGYAFSIRFSRTKEGQVPYFCCSGKYLHKVCTAKQTHRVREIEAEVQASLIQHAASYNLIHRQNTAAAAKEFQSRISEIDAKIENLILSLESVSHVSAQYINQRIEALHHEKQLLLHRYNETISEYNINEVTPFSATDWEQMDIEQKRQLARSLIRTVYLSENGLSVSFNIKNGGHKP

SEQ ID NO: 704 - protein, 390 aa, unidentified
  source 1..390: note = Bacteriophage uvig_95947 from the Index of /pub/databases/metagenomics/genome_sets/gut_phage_database (ebi.ac.uk)
MKETKRAAIYTRVSTARQDQDGYSIPLQTERLESYCTAMGWSIAGEYSDPGYSGASINRPGLSALIEDSKSHRFDVVLVYKLDRLSRSQRDTLFLIEDVFEASGVSFVSLQESFDTSSIYGRAMLGIISVFGQMERETITERTLMGRVGRAESGLWHGGGTPPIGYDYIDGHLVINEGEAAQVQRIYKMFDLGFSLREISDAMAGAKTKHGDWSHSATIGNVLDSQLYAGYIKFCDSMVMGTHDPIVDQALNDRVKRLREKSREFRSRPDSNYLLTGLIYCASCGARYFPNRRPNGSVVYSCYSRAKKNKSMVMDPDCKAPHIPMQELDDAVEGEFLFRLKKHDIPITDVTQGFLLEMWPQLMVGAKRTILVQHTKKIEIKRDGSFNLVI

SEQ ID NO: 705 - protein, 569 aa, unidentified
  source 1..569: note = Bacteriophage uvig_392101 from the Index of /pub/databases/metagenomics/genome_sets/gut_phage_database (ebi.ac.uk)
MKGAIYSRVSTEGQDYSKQTNELKEYASKNGIDIVYVFEEKESGFNNDRPEFEKVRKLTKLDIDIILVWEISRISRRAIYLQQQVQEFTDKGICIYAKKEGFSTLNGDGTVNASTKMLIGFASIIAEQEAATLKERTISSKRNKILREGKSYTGVAPYGYDYSKDTKKLSINKEEAEVVKRIFQLSIDGYSAYRIPIILNAEGILSKKGNSWTVASIRTLLSNPVYMGKANYTLKSEKPKEGKTYRKAIEVASVDVPPIIDAELFNLSLEKITGRTNRSKSTGTKYNPLLRGLIICPNCGRRYTYKNRNQTYTCNNLIDNKLCKAKTITTKLDSIIWNVVKIFFYKELAAGKAQEQIEPLQVEIESYKQQLLLLDGKQSELTSKANIIINAAIEIKIQFPNMPDLYTNKLKEADVINKEAGRYLKERERLEKLIHSNESRIKNINKASKESSLVDSITDETEKYDLVHRAVECIMIFGEDKTSIIVVTFTTGQTIYIGYFSKRNSKYYTIFYPSVDIYFDIHKEKGYINHLKEEVAGIMPISQLNKQTVEYCITDFVNYLDIEDNRRYY

SEQ ID NO: 706 - protein, 519 aa, unidentified
  source 1..519: note = Bacteriophage uvig_208975 from the Index of /pub/databases/metagenomics/genome_sets/gut_phage_database (ebi.ac.uk)
MKNKHDIKDIRAAVYIRYSSENQRDGYSVEYQLDECKKYIEQQGFIFEKSYIDEAVSGKSADKRTAFFELLADVKNGLYDVVIVYKYSRFARNLLEATLYRQQIEKNGAKLISAMERIDDSTPEGRMMRNIIMTMDEYYSDNLSTFVQSSMYTAAKSGKYLGGILPYGFSVNENGEFIENKAEADIVRRVFELRASGAMPADILRIFRNEGIRGRNGKPFTQQLLNKIVRSEKYIGVYKYAVKGYEPIRIENAFAPIVPRDLWDKVQHVVDNLNVKRAAKGRSRKNIYPLTGKIFCACCGEPFTGNSKGNGLAYYTCRGQDKLQICKNGSVKKDILENYVFGKIKELILCENHVEDIAQIVFDMLNKSTSGDIDAEISDLKKEKADIERKLENLLDLMLDGTISKDILQKKSAALQDELKIVESALKSKEYTAAETVTYDGIHAFLVDMIKQLENADDHVKKAIASQFIDKITINSDDINVRLTVSPFFVGDKLNDGWALFTISPKRSKSRSGGLTRLK

SEQ ID NO: 707 - protein, 510 aa, unidentified
  source 1..510: note = Bacteriophage uvig_586184 from the Index of /pub/databases/metagenomics/genome_sets/gut_phage_database (ebi.ac.uk)
MPKAVIYARFSSHNQREESIEQQVAECQAFAKANDLTVVDVYADAAVSGRSDRRPQFQRLRRDAAKKAFEVVIAYKSSRIARNMLNALTFEVEMNKSGVTVLYAKEEFGNTAAGRFALRTMMSVNQFYSENLGEDIKRTQADNARQCKANGPAPYGYRSGVDGRFEIDETAAAIVREIYTRTAAGESNVSIMRDLNARHLKTRLGHEWGKNSFQGILGNERYLGIYIFDGVRVPSGMPRIIDDKLFKEAMIAMSAKKKKNPEADYQLTGKLYCGECGEMMIGMSGTGKSGTVYNYYACSGRRTGSGCKKASVGRDQTEIAVASALLAKIMDDAVVDQIADEIIDFQQKHKNNPEIKALEAAKADNKKAIDNIMNAIEAGIFTDTTKDRLLALEAESKEITERLEELTASQLNVSRDQVVGYLKSYRGGEVRDRKYRMKLFQTFLVRAYVYDDRLKIVFDPIGEQTGEVNMTLDEVDGESGDGVRLMEDKGHHISATRTLYLVYSVPFTAK

SEQ ID NO: 708 - protein, 354 aa, unidentified
  source 1..354: note = Bacteriophage uvig_22576 from the Index of /pub/databases/metagenomics/genome_sets/gut_phage_database (ebi.ac.uk)
MNVVIYARFSSHSQTEQSIEGQLKVCYEYAESNHYTVVGEYIDRAISGTTDNRAEFQRMISDSDRHTFEGVLVYQLDRFARNRYDSAINKAKLKKNGVRVLSAKENIADDASGILVEGVLESMAEYYSVELSQKIHRGMAINAEKCLSNGSNPGLGFKVDAERRFYVDEEEAAIVREIYERYASGETKAEIIRDLKRRRVKTSLGKEFSPNSLSRLLSNKRYIGVYLYKGKETPGGMPRILDDDLFYRVQSMMNKNKSAPARTHGEGEYLLTTKLFCGHCKEMMVGYGGTSKTGKQYHYYMCKNARRKKCGKKIVSKSYIEDRVVNECLKMLTEEKIASLPRKWLRSAPKARIT

SEQ ID NO: 709 - protein, 511 aa, unidentified
  source 1..511: note = Bacteriophage uvig_581097 from the Index of /pub/databases/metagenomics/genome_sets/gut_phage_database (ebi.ac.uk)
MSRAVIYARFSSHNQREESIEQQVAECRAFAAANGLTVIDVYADAAISGRSDRRPQFQRLRRDAGKKIFDTIIAYKSSRIARNMLNALNFEVEMTKCGVNVLYAKEEFGNTAAGRFALRTMMSVNQFYSENLGEDIKRTQADNAQSCKSNGPAPFGYKSGADGRFEIDEPRAQIIREIYARVAAGETLASISADFNARGLKTRTGGKWGRSSYGAILGNERYLGIYIFDGVRTEGGMPQIIDRQLFVEAMAAMKRKKISPSADYQLTGKLYCGKCGRAMTGICGTGRAGTVYHYYACTGRKSGTGCDKEHVGRDQIEDAVARALAERIMSDKIIDQMADEVMEFQRRHKDNPEIKMLEEQKAENAKAIKNILSAIEAGIFTESTKARLMELEAENTRITEQLAMLTTSQIDVTRDQVIGYLKSFRGGDIEDKKYRAQLFQTFLVKVFVFDDRLKVIFDPLGSGKNEIDVTLDDLGEIESEGDGVRLSSDLPHHIGLRRTPYIIFMVSLVTK

SEQ ID NO: 710 - protein, 455 aa, unidentified
  source 1..455: note = Bacteriophage uvig_483710 from the Index of /pub/databases/metagenomics/genome_sets/gut_phage_database (ebi.ac.uk)
MTKDNRKTALYIRVSTDFQAEEGYSIDAQKEKLEQFCKLKDIKNYEFYIDGGWSGSNIDRPQMKQMMSDIKEGMIDSVIVYKLDRLSRSQKDTVFLLEDIFIPNNCNFISLNENFDTTTPYGKAMIGILSVFAQLERENIRERTRMGMYERVKAGLWMGGGKVPYGYSYDANKNILVTNADADNVRKIFDLYIQGYSACYIAKLFNLCNDSQVRNILKRKTYLGKIEYNGEVFDGKHTPLISQETYDKAQEELSKRTSKDQQKNVYLLTGLIKCGVCGASMRYQKWGKHVKIYCYSQQSSKPKLIRNPNCDNYKNDSDEIEKAVIDDLLRRTENIVGVKDVKDTSISAISILNNKKKTIEEKIKKLYNLCLTMDDDLLKETISECKTELDEINKQIEREKVIGDTINKINEKHNTINNLKSNWDNMTYMERRMAIKICIKEIIINKDAIDIVYNF

SEQ ID NO: 711 - protein, 520 aa, unidentified
  source 1..520: note = Bacteriophage uvig_255651 from the Index of /pub/databases/metagenomics/genome_sets/gut_phage_database (ebi.ac.uk)
MNKIAIYTRKSKFTGKGESIENQIEKCKKFIEFKFNIDSKSVNIFIDEGFSGKNEDRPEYQRMMNQIKSKQINSIVIYQLNRLGRNARDIHNTMQLCDDLGTIIYSATEGFDSSTIFGRAVIGILASLAQLEREQLAERVKDNMYTLAKMGRWLGGQSPLGFDGTREYYIDENGKERSVTELKPNKEELNIVKLIYQKYIEEKSLSQVAKWSLTNHLKGKNGGNITKSAINVILKNPVYVKSTDKVLEYLEKENYEVCGSANGNGLLRYGKDNEQIIAVSKHKGIINADDWMKVQNILKENTDKAPRRGKTNTALLTGILKCNCGSSMNIAHGKLKNGTKTFYYQCAMKVASGGTRCKSKNLNGPLLEEKLIDYLKNYSEIQIIADLENILNKSNELNLKLTAESIDNAIEQCDKSIKVLVNKLKVIEDLEVSKIIIDELTKEKDKKKDLEKQKENLLEDEASKSLSEAEILEVLNLVEHFKNNIDSLDFESKKKLLNEMIESIVIDTDEFIINFNIKKN

SEQ ID NO: 712 - protein, 501 aa, unidentified
  source 1..501: note = Bacteriophage uvig_453602 from the Index of /pub/databases/metagenomics/genome_sets/gut_phage_database (ebi.ac.uk)
MNAVIYARFSSHNQREESIEGQVRECRKYAEQYDLHVVEVYADRAVSGKTDQRPEFQRMIRDSAKRRFQIVIMYTLDRFARNRRDSATYKYELRKNGVRVVYAKQEIPDSPEGIILESVLEGYAEYYSENLARNITRGLMENALQGKSVGGTTPLGYKREDDRLVIDPVNAQAVRTIFDMYLSGKSSQEIIRWLNEKGYFTALGNPFGKNSLRTILTNEKYIGIYRYRDVVIEDCVPKIIDKDIFDRVQERVKVVSKAKAHYKGDTDYLLCTKAFCGYCGAPLIGECGTGKSGQVYHYYKCASRKRGKTCNKHIENKDALEEAVVRETVNHILQKNVIESIAARAMASLDKLTADDALLKSLQSRLKETEIALANMTKAIEMGIITPTTKSRLLELEADKGDLLDKIKREQESYPDMSKEGIIYWLSSFMQGDPKDENFRRRIFESLLNRVDVFDNDDGTRRIVLTYNLSENRVSAVTCSCSDSALTPPPSSRNESFRLFF

SEQ ID NO: 713 - protein, 473 aa, unidentified
  source 1..473: note = Bacteriophage uvig_370654 from the Index of /pub/databases/metagenomics/genome_sets/gut_phage_database (ebi.ac.uk)
MRIAIYVRKSVAGDDRSISLESQKELCTNYFKGENTFEVFQDRGISGKNTDRPAFQELSRRVSNGEFDIVVCYKFDRIARNTLDFLTTLELFKSYNTDLVSITEGYDPSTPAGKMMVTLLASLAEMERENIKARVIDSMNQLAREGRYSGGPTPFGYEIDKTPYGSYLKLIDGETISYIFNSFLKGKSANDLGRELKMTSKGIKLILRNPLYMKSSQLANEYLGNIGYEVISYEDRMGNGYLTYGKKGSSNSNKIAVISKHEAVISDSDWIQVQVRLKTYDGHRAPRISSKTWLAQMVKCTHCNKYMKVRTTNTGVYLMCPNNCMKKYINVSKAENLILDELKKFTLDEDTINDNSKENNLLSEINVITKQIDEKDKLIIGLVDKLALANESLANRLVKTIEAYETELNNLKNIKTQKLIAMENKKSNHLFNNEKEFNDFIDSFNKLDMKEKQQSIRNIIDYIEFDGDYFTIY

SEQ ID NO: 714 - protein, 503 aa, unidentified
  source 1..503: note = Bacteriophage uvig_208980 from the Index of /pub/databases/metagenomics/genome_sets/gut_phage_database (ebi.ac.uk)
MNAVYTRQSLDVKDSLSIESQLDACLNENGSAEYQHYNDKGYSGKNTERPAFRQLMADVRKGTIERVIVYRLDRLSRSLLDFAEMIDVFKKKDVEFVSCREKFDTSTPIGNAMLSIIMVFAQLERETIQMRVKDNYATRMERGAYDGVAPYGFDKAITKVGDKQVHTLDVNEVSDTVRSMFNEYAYTGDSLGAIAKKLNAQGIPSPGEAPWDGGKISRILSNPIYVRANADIYAYYNALGMTITNPIEDFLAVNGCITYGGWERSRRKFSQYDRLKLSIGLHPGLVDSDTFLRCQTKLKANRQICNAGKGKHSWLTGMVKCGYCGHSLKVMVDQKGRGIKRFVCSGNTNCGICSQFGSQRVDELEAGVEHELMQMVERRKYIEAKIEMERDTEESRIKIEQTKISEKLNRLVDALAEGEPSSASAVMKKIAELEEKKKLLEVELRSHRAKLPSQQELLQFRDTARLWPHMTIQQKHDVAKLLIDKIEVKCGEIQIYWKYNFEL

SEQ ID NO: 715 - protein, 529 aa, unidentified
  source 1..529: note = Bacteriophage uvig_127373 from the Index of /pub/databases/metagenomics/genome_sets/gut_phage_database (ebi.ac.uk)
MTIQKDNTALRAAVYVRYSSENQRDGYSIEYQLDECKKYIKEQQYEFLKAYVDEAVSGKSTNNRTAFFDLLADVKNGLYDVVVVYKYSRFARNLLEATLYRQQIEKNGAKLISAMERIDDSTPEGRMMRNIIMTMDEYYSDNLSTFVLSSMYTAAKSGKFLGGKYPYGYTVNDENKFIENKAEADIVRRVFDLRLAGMSPIDIVRTLHADGLRSRTGKRFTRSFISKMLTNERYIGTYKYEVSGYEPIIIENAFEGLISLDKWQAVQEIIKREKRAPYVKSRLRHRVYPLVGKIYCGKCGEPFRGNGRRIKDPETGELNREIVYYTCRGQHVHNNCDIGSVRKEVIEDFVFGKIKELILNENVINDIAEVVYKSVDNGENDLTEDISKLKKEKAQIERKLENLLDLFLDGEISKAILNKKSDELQTDLKDLNSRLQTMEFTAANEITVDRIHGFLLDMINQLETADDTVKKAIASQFIDKIIVYDTEVTVKLTVTPHFMTDKRSNGGALYSLSAIRKPSRQGTRPAPLR

SEQ ID NO: 716 - protein, 511 aa, unidentified
  source 1..511: note = Bacteriophage uvig_311977 from the Index of /pub/databases/metagenomics/genome_sets/gut_phage_database (ebi.ac.uk)
MNNVQKKYFIGLTHFLGNVLGPKYEVVFHSFDKNKAHMEAIANSHVSGRTLSSPLSSFASSLLQDKVYLDKDFIFNYKAVADSEKVIRGQTENALKGKCTGGTGTIGYKIDDDKFYHLDPLTAPLVLEAFQRYDNGDKMVEIVNFLNDKGVRNMLGGKMTHSSVNTMLKNRRYIGELSFRDIVVPDAIPVIVPKDLFDRVQKRLDKNKRAPACGKADEEYLLTTKLFCGKCGALMFGESGTSATGRTYYYYKCANVKRRKGCNKKTVQKDWLEDLVVRETMKLIQDDAVIDKIVQLVMDVQNQENTTIPLLEKQLREVNKKLDNLMKAIEDGLYTRTTKERLEALEIQKDELTAKIADEKLKKPSFNEDFIRFWLMKFRKFDISQKKQRKALIEIFVNAIFLYDDRMLLTFNYKDGTQTVRFEDTLTADCGEKSLRLRSNESPSGAFEQQNGLAQARWRGLAPTSSDLSSSAGTGSCGIAWNTKSITSIRSIRCCLNTIRNSWVRDLSPAR

SEQ ID NO: 717 - protein, 523 aa, unidentified
  source 1..523: note = Bacteriophage uvig_349522 from the Index of /pub/databases/metagenomics/genome_sets/gut_phage_database (ebi.ac.uk)
MKKKQRVVIYIRYSSHKQAESFSIEYQVAECTRFIEMNDYELVDTYIDEAKTGQKIAGRDAFDKMMFEAGQDKFDKIIVFSFSRSFRNTRDALNCNHDLQEKYGIMIESVIERIDLSDPHGKFSGTNLFAMHELQAAIIAAHVRSGMYYAAQQGYYLGGFVPFGYELYETGELSRGKERKKYSPNPEEAELVREMFDLYADGFSLNFIQTAMKLKNVRGRRGDIIGQQTIARILKNPMYIGTVEAKFKGHDPLSIPNAVPAIIDMDTWGRVQARHKGNKLVQPRRTKRLYSLTGKITCAKCGGHMFGTYKGDKRSNNWHYAYYHCANKKIKGTCNALNVRKDQIDAYCLQEIKKHILNEEAMRSISEQIATAVGNSADDMAKAKAKAEKRMEQIVDILAKIKEDYYEGKITEAVERRMAAKYEAEQLELESSLRGLKTALKSAITSETVYSYLQELLSLYGSNNDELQKMLFDKLIDKILVHDDRIEVTLVVSPFGHIGDNSPSGQPKYEQSLMVGRKEIRHI

SEQ ID NO: 718 - protein, 482 aa, unidentified
  source 1..482: note = Bacteriophage uvig_53024 from the Index of /pub/databases/metagenomics/genome_sets/gut_phage_database (ebi.ac.uk)
MRAVIYARFSTDKQREESIEAQERACREYAVAHGYSVSAVYADRAASGKTDRRPDFQRMMRDAKSQRFDVVLVHKYNRFARRMSDHVRYEDKLNSYGVQLIAVAEDFGTGKEAVIMKALMRSLSEYYIIDLSDEVKKGHRENAMKALHNGGLAPFGYDIVDQKYVINEFEAAYVRRMYNCASDCIGFTALVDEMAAAGVRGKRGKPIKYQQIYDILRNEKYTGVYLYCPEQESSKMLQRSKPSAIRIEGAIPPIISKEQFEEVQKIMSSRKMTGRKNSYLCSRLVFCGECGAAMHAITTGKYQYYYCKNHCGNPNVRMETIDNAAKLYLRELLTPENQLTIAEALKRYQASAAYRMEDFYDSVHDQITEREQKYEALLANLSSGALPADVVADVGATMQRLKDEIDVLRDAKPEKDYTVDNITTWLESLRQAPDEKAIRLLISKISVKNRTDVSIDSMLTSVLGNLGCGTTIPLLPKILFEY

SEQ ID NO: 719 - protein, 525 aa, unidentified
  source 1..525: note = Bacteriophage uvig_595447 from the Index of /pub/databases/metagenomics/genome_sets/gut_phage_database (ebi.ac.uk)
MDTVNKFGSYCMYLRRSRADDDAERMGAGETLARHYMMLQELAGRMLGHPIPESAVYREIVSGDTIADRPEMRRLMQDVELGRWNGVFVADIDRLARGDTMDQGLVAQTFLYSQTLIVTPLKVYDPEDPADNEFFEIRLFFARREYQMIKRRMQTGRVNAVKEGYYVSSRPIYGYERYKLPDRRGWSLRIVEDQAAVVRKIYDWYLHGENGETLGCQRIANRLNSMGVKTLQGLPWQSDRVLNVLKNPTYKGCVQWYQRREQVHMQDGQKVKKRPLSDDHIVVPGYHEAIIDEALFDRAQELIVDRRNAPIPGKRKCVNPLTGLIRCGHCGYAVRMSNAGRGLDGAYLKCTYINTCTSFGIRFRPVEQVVLNTLQSWVDYDVSRLPEEQKQQTENNDALRAAQEKQIATLNKQLSRLRDLLEQGVYTVDVYLERERDLRARIEACQNALEQLRPKEKPMEQVLAEFAPLVKNVLEAYAATDDPAEKNALLKTVIDHIVYFKTAKTLRGHSPLESLTLEIYPRLPK

SEQ ID NO: 720 - protein, 514 aa, unidentified
  source 1..514: note = Bacteriophage uvig_231300 from the Index of /pub/databases/metagenomics/genome_sets/gut_phage_database (ebi.ac.uk)
MRIAIYARKSAFSEKSESVNNQDRMCREYAGFHFPGDHTFLNYTDEDFTGANTDRPALKKMLKDIKSGIIDKLIVYQLDRLSRDVRDFSNMYAELEACGVEFVSVKENIDTESPLGKAMMYICVVFAQMERETISNRVTDNMIGLAGAGWWTGGVLPRGYTSRRVSDGGKEHTMLVPDPEKAEELREIFAEFVKLGQSAQRFTTYCKRNNIKIVPGKYLSEGQVHKILRAPYGAPACAETRRFFVDSGATVLGSEKDWDGTCGIMIYGRTRQSKGYSRNPAENWRVCAGKHEPIFSAELWLAAQSQLTSNIYTKKTKYPTQLLKGSLRCPCGRLMKISRYKKRSGGYNAYYTCSRLQSTGKSPDCVSQINANMLDQKALDIFRQIERDPDMINRCSPLLCDADPAAVKKKENEIKRLEDKIGNLSAALAESSGSAAAKYIIAEIEKIDAQIADKKMQLAGLQASALAADRAAAELAAKQKEIAHLVRNLEALDIEEQNKIARSVLKKCVWDGES

SEQ ID NO: 721 - protein, 462 aa, unidentified
  source 1..462: note = Bacteriophage uvig_476161 from the Index of /pub/databases/metagenomics/genome_sets/gut_phage_database (ebi.ac.uk)
MKAEIDRIIRVALYIRVSTEEQALHGYSLQAQEDELLHFAKEKKYKVVGTYRDEGFSARKPALKRKVMQELLDDVRAGKIDRILFIKLDRWFRNVWEYHQVQAVLDENNVTWQATMEDYNTATADGRLKVNIMLSVAENEADRTSERIKFVFNSKVNRGEYPYGRVPIGYKAEIVDGLRKLVKDPELEAAITAFWEYALKYNSVRRAGFLVNAEYGTTRAAKEWLRTGKLEIYCGTFEGIPDFCPAYVSRENWKKIQDRKNLIKKAQAWNVYLFSGLITCPSCGHTLKATYKSYPNDRSIKYNAYRCNHGRDNTGCTYRSSVSEKKTEKYLLEHIREMIEEYISETEVGASSKKKKRIIKFDVAKAKEQLRRLNVAYFAGNMPDDEYTAMAAKLKEDIAKALESEYEAEKAPDIGKLRAFLDTDFEAIYRTLEKDDQRRLWRSIIKEIRVEDNHVVGVTFNV

SEQ ID NO: 722 - protein, 485 aa, unidentified
  source 1..485: note = Bacteriophage uvig_590668 from the Index of /pub/databases/metagenomics/genome_sets/gut_phage_database (ebi.ac.uk)
MKLAACYIRVSTDDQLEYSPDSQLEKIKEYCARNGYILNQDNIFVEEEGVSGRKASRRQEFQHMIARAKSKPKPFDAIIVWKFSRFARNREDSIVYKSMLKKIGIDVISVTENVGDDKMSVITEAIIEAMDEYYSLNLAEEVRRGMTERIKHGNHNSVAPFGYKIVDKELVVFPEQAEIIREVYSRYLNGWGQKQLATWLNTIGVTTNRGGKIENRTVNYWLRNPVYHGYVRWNPAERASTKRYINTPDTMIVKGHHEPIIDEETWEAVQKRCDEVRLKFSKHRRENIPKDYALSGIIKCSCCGASMSTAHKQKYLQCTKYAHGLCSTSHHVSYEMIWLMLLSTIECDLKSGNFQLERVSRPVVADDAEALNAQIERTEMKLRRIREAFEAGIDTLEEYKSGKARISAELEELRERAAQVSPTEVEITPEEKRAFAEKHLKTLAKLRNTEVGELEKNHLLKEFVKEATYRKADNSLSVIYMVVVL

SEQ ID NO: 723 - protein, 492 aa, unidentified
  source 1..492: note = Bacteriophage uvig_150568 from the Index of /pub/databases/metagenomics/genome_sets/gut_phage_database (ebi.ac.uk)
MPKAKDFRTACAYIRVSTDKQEELSPDAQKRLLLEYAKKNDLNIINEHIFTENGISGKKADKRPEFMRMIGMAKSKEHPFDVILVWKFSRFARNQEESIVYKSLLKKANVEVVSVSEPLIDGPFGSLIERIIEWMDEYYSIRLSGEVMRGMTEKALHGGYQSTLPLGYSMDKSTGIPVINNDINIVKLIYSEFENGMTCIEIARKLNSLGYKTQHGNNYEYRTIKYILENPFYVGKVRWNRQHHETHTIKDKSEWITASGKHEAVFSEEYFEHIQELMIKRSRPYKARITGTRHWLSGMVKCSNCGASLGIKRSNGSYTYFNCLNYTKGSCNESHYITLKNLENAVYETFIKSINYGGKLQFALRQRNTDEHPVDTAAIIKEQLKRLEWKESRIKTAYMDGIDTLDEYRENKELLMKERKELEDELNKIPDSSDIDYEAQLKKEMLTVYDIITDKNVDDRKKADALRSIVDKIVYDKAKDEIHIFFYLLDPL

SEQ ID NO: 724 - protein, 588 aa, unidentified
  source 1..588: note = Bacteriophage uvig_76620 from the Index of /pub/databases/metagenomics/genome_sets/gut_phage_database (ebi.ac.uk)
MAKKRLAAALDEKKAAIYKRVSTQYQVDRASLPVQESELINYCKYALGIDNYEIFEDAGYSAKNTDRPDYQRMMARIRTGEFTHLVVWKIDRISRNLLDFAAMYSELKDLGVTFVSKNEQFDTSNAMGEAMLKIILVFAELERNMTSERVTQVLMSRAKDGIWNGGRPPYAYSYDKPSNTFSVVEDEKKVVLFVYDTYEATESLLLTTKAVNEKGIVSRNGKPWSPTTIRNLLANPFYSGTLRYNYRDITRSKTVYIKPEDEWVLVEDHHEAIVSKERQARVMSILESKRRGGGKLGLTYQRKNVHIFGGLLKCGCCGSSMVCTVDTRERKNGVKPSIYACSRRRRFNDCQNKYITDLTIGPFIFNFIANMIKASNSFGKTTSMDTLQKKLLRGEALADVDHIGEAGLSELYNHFRSGFDGSPFEATKVAQVQAATDLSEREILLSERRRLDRALSRLKTLYLYSEEAMAEKDYVLERKELTDRLEETDQRLSELDAQIAAATPMSDEEFMAKASYFILSQELQGKREVDYPKFITNADPQILKNFIKNVTTNFCIKNGRVTSILFKNGIELQFFYKPSKDDKSPETA

SEQ ID NO: 725 - protein, 514 aa, unidentified
  source 1..514: note = Bacteriophage uvig_419578 from the Index of /pub/databases/metagenomics/genome_sets/gut_phage_database (ebi.ac.uk)
MSKIAVIYARYSSDRQREESIEGQIRECKAYAKKNGITVIRVYCDRAMTGKTDKRPEFQAMIKDAKKQDFDYVLVYKLNRFARSRYDSARYKNVLKQHGIRVISAMENIAEDSSGILLESVIEGLAEYYSAELAENVLRGMTENALECKWPGGIVPLGFKLDKNKHLVIDDDKAFIVREIFQSIIDGKRTSTIIDELNARHLKTAAGKPFRKNSLEKILKNERYTGTFVWKDIRKENALPAIITNDMFNAVQKILKNRKKTRSRVCSDNYLISGRLFCGLCHEKMIGMSGRSVTGLPYYYYACSNRRNRIGKCHTKNIRADKLEELVVDTTINILSNDTAIEYIAKQAIAAQEENRAQSSIPAIKEEIKELSKKLKNCIQAVENGIISQTIAENIPMYEKRLVELNSELSDELEKDNDLKVDEDMIRFFFERLVQRTKKETKFKSLLLSTMVRCVVIYDDYIEIQYNYKKELPILTNPVRINSSILFAVVECSGLQSNFIFYPEGFSYIVRRVA

SEQ ID NO: 726 - protein, 493 aa, unidentified
  source 1..493: note = Bacteriophage uvig_282819 from the Index of /pub/databases/metagenomics/genome_sets/gut_phage_database (ebi.ac.uk)
MGQKCVIYTRYSSDRQREESIEGQIRVCEDYAKRNGLEVLHIYADRAMTGRSDQRPEFLTMIRDAASMSFDTVLVYKLNRFARNRYDSAKYKHKLKKYGVKVVSAMENIADDPSGILLESVIEGMAEYYSVELAENVVRGMTENALEGKWPGGIVPLGYKLDADHHLVIDEPNALVVRRIYQMILDGRTPASICRILNAEGKRTATGRAFNHNSITRLLSNERYIGIFSWRDVRRTGVVPRILDDRTFYAVQELRKSRQRHKGVAKRSENYMLTGKIFCGRCGSPMVGKSGTSKGGCIYYYYNCQRHIDGSGCPARPVRTDKLEDRVVQVTTKILSQPDAIKAIARQAIAIQKERRESLEVQSLKAQVSDLSKKLDNCLKAVDNGAFSETLCNHMRGYENRLRDMKAALSRAQLMDRGGKLTEKQIEFFFFAISRQLKQEPRYKEILLSSLVRCVIVNDDSIEIQYNYKKELPTLANPVKVKSSHKVLMVTPE

SEQ ID NO: 727 - protein, 550 aa, unidentified
  source 1..550: note = Bacteriophage uvig_577253 from the Index of /pub/databases/metagenomics/genome_sets/gut_phage_database (ebi.ac.uk)
MKINMRVAIYVRVSTDEQADRGTIESQIEFGNKYCDLHAISEFEFYRDDGITGTLPLEERPEGARLFNDAKEKKFDTLLIYKLDRLGRSARVILNAVYELEQYGIKVKSMTEPFDTGDPAGRFLLTMLAGVADLERSTILERLWHGANRAARDGKWIGGIVPYGYFVNDQRFLEISTEKMPGLDLSEADVVKLIFDLYTKNRLTHVKICDYLNALKIPPSYALAGRKVTKGKRKENTAGIWIPHQIGRMIKNSTYKGIHIYGKRSSKQRELIPREVPAIVSVEQWDLAQVLLKENKLEFFKEKTRNYLLRGLILCEECGHHYTGAPYTQYKTKEKKTFYRCIGKQVYKNKEKERCKVKNIPGTWLENMVWEDCLNFINNPGDVLQSINQKIEETKVETRNYEEELKLITSSIQQVDAERQSILDLYRKKLISSADIETQFSKINMESELLLKKKNEIESLLAANDSSVARANSAEDYLAYLRNKIKDGNPSFQQKREIVKAIVEKIKVRNIDINGKTEIDIKILYRFSPHQTTLSPNTCNTRLQLRLFPQ

SEQ ID NO: 728 - protein, 460 aa, unidentified
  source 1..460: note = Bacteriophage uvig_257578 from the Index of /pub/databases/metagenomics/genome_sets/gut_phage_database (ebi.ac.uk)
MIERCAIYIRVSTAEQSMKGHSLQAQREYLESYAASHDMRVVGIYADEGQTARKELKKRKAIHALLKDVEADKIDVILFWRMDRWFRNVADFYKVQDILDAHGVRWVSASESNINMETRDGRLCLNLILTIGQNEVDTTSERIKFTVNNMIQNGRMVWGATNLPFGYMIVEENGCKRMAKDPETACMVEEFYRFFRQTHKKRATVMHMRDTFGINFSYTMLRTMLSSEFYIGKYRSNNNYCPAYLTLDEWKEIQAISENNIKRPRTGRVYFFSGLVHCPVCGTKMAACAGRSIINRKTGEKREYYYYRCNKAILNKQCSYTSRISQNLIEEYLLNNLDTEYRKYQVRCNKVKEAQAHKKKKRSADSVRSEMERLNILFQKGRIEFDYYEEQYGKLEDELKSFDEVIIREKDHSNVVGMLDSDFKEMYSSLSLENRQAFWQQIIKAIYVTKDRNVDYVDFL

SEQ ID NO: 729 - protein, 462 aa, unidentified
  source 1..462: note = Bacteriophage uvig_437230 from the Index of /pub/databases/metagenomics/genome_sets/gut_phage_database (ebi.ac.uk)
MSNTPKTITRAALYIRVSTEEQALHGYSLEAQEAALKQYAIDHDYKVVHIYHDEGFSARKPVMRRKVMQELLADVQAGKIDLILFTKLDRWFRNVHDYHQVQAVLDKYGVAWKTILEDYQTTTADGRLKVNIMLSVAENEADRTSERIKFVFDNKVRNGEYCFGGPMAPYGYKAEVINGVRKLVKDPETESATAAFWDKMIKYHNTRRAARETNLEYGISRDHQSWRKVVRNKIYTGELRGIKDFCPAYISAADWQDIQYPERRIKSTQGDRHYLFVGLLRCPVCGCTLKATFKTYPSDRSKEYYGYRCSAKSLGRCTYSRQLSERNLEKYLVAHLRESLESYIAKLQLSAAAPKKKRKKADTTKLRDQLRRLNVIYLGGNISDDDYNAQATILRDAIIKAEQEEKQLAQVIDFTALRQLLDSNFELSYKSMDREEKQRFWHSIIAEIQLDDNQVKEIIFKS

SEQ ID NO: 730 - protein, 564 aa, unidentified
  source 1..564: note = Bacteriophage uvig_594175 from the Index of /pub/databases/metagenomics/genome_sets/gut_phage_database (ebi.ac.uk)
MEVIKYVVAYMRYSSEGQRDGYSIEAQKAAIEEFCKRLGYIIVHFYTDEAKTGTLDNREAFQQMIADSASGNFQAVIVHKFDRFSRDKYDNAIYKRELRNNGVRVISVLEPLDDSPESLILETLLEGMAQYYSENLAREVKKGQTQKALLAQHCGGIVPYGYSVNPDTSEYEIVPSEAEVVRKIYELYNNGTPTQEIAGHLNALGLKTRLNKTKGGVPFTSQMVRGIIANEKYNGTFIYRKTKRIRAKGRYKTVKQNDDEVIVCEDKVPRIVDNETWVTANKRLRSRTYNTTRAKVEYLLTGLMFCGECGSPFVGGGSVPRYDKEGNEVARYNYYICSKKRKTHDCKCSQVSKERIEDAVIKGIIDYCYNDKSIKIFADDFSQWLETHNNADKAEIARYKSELKKLEQQKGRLVSLALEGVLTPVETKDRKRELEAKITSLQAKLQSMEKTNLPSKKDIMRFMEDTRRDIVNGTFDDYAGLIRQHLARIDVYNGYQIITLKKVPYLTEPDENDGISAYHSPAKSISDSECKPLHYHSVSLMDLPKELTITLRLEKGSHEAVFVA

SEQ ID NO: 731 - protein, 516 aa, unidentified
  source 1..516: note = Bacteriophage uvig_593397 from the Index of /pub/databases/metagenomics/genome_sets/gut_phage_database (ebi.ac.uk)
MQTAVIYARYSSDKQTEQSIEGQLYDCYNYAKQHGITVVQEYIDRAMTGRNDDRPDFQRMISDSAKHTFELVLVWKLDRFARSTEDAAYNRGKLKRNGVRLLSVKEDFGDSSAGDLMMHVMESFNEFYSADLREKTVRGMHQSALKCQSTGGQIPIGYKIEGKKYAIDEATRFIPETVFRMYAEGKRLAEIARYLNEKGYRTRMGRKFTTGSFYTMLSNEKYIGVYKYGDVRIEGGYEAMIDPVLFDVVQKKLVENKKRAPKISERENFYLTGKLFCGHCGEPMNGMSGNSTKGKHLYYRCNGVRKHTGCDKRTERKEELENEIIGAIQRAFANADPEELTRKVIENYEKNSRPADQVKVMKAELQKITNKVDNVVNAIAEMGGNETLYTQLRQLTEQKEQKETEIRIAEHKADDMPTVELVKKILDLIQNADTMTDEGRQLLIDGAVSRIYVYDDSLDIYFKGGKNTEIPLNPANKDDVSDNSFACCKEWGAKAHTGEPLVIINGSLLLSVKRIK

SEQ ID NO: 732 - protein, 517 aa, unidentified
  source 1..517: note = Bacteriophage uvig_225515 from the Index of /pub/databases/metagenomics/genome_sets/gut_phage_database (ebi.ac.uk)
MSYCIYLRKSRKDLEAEQAGQGETLARHERTLLSLARQRNLIIGNIYREIVSGESIAARPVMQKLLKEVESGIWDGVLVMEIERLARGDTIDQGTVQRAFQYSNTYIITPQKTYDPSNEFDEEYFEFGLFMSRREYKTIKRRMQAGRYAAAKEGKWPFNAAPYGYRRVKLQNEKGWTLAFDDSEASVCRMIFSMFTGPDRKGITIIRRYLNQHGIKPRNGDLWTDSSIRCILSNPAYDGKVAIGRRKVVPTIENGLPTKTRPRSNDYAVYEGRHPALISHAIYAEAQSYLGHGTPKLPESYGVKNPLAGLIICKECGKRMQRRPATNPWVKNGAKYDMLICHTDSCPTVGSPLDLVERELIHALEDWVSGYELQETLPESRVPELEQMLESAKQEHDTSEKQKSRLYDLLEQGVYDSETFLLRSRALQDRLEESLAGVTRLEQELESERKIQANITNFLPACHDLLSCYWSLDAPDRNKALKILIDSVDYRKTSRNKKGEAEKASFELTIKPRIPRI

SEQ ID NO: 733 - protein, 507 aa, unidentified
  source 1..507: note = Bacteriophage uvig_107724 from the Index of /pub/databases/metagenomics/genome_sets/gut_phage_database (ebi.ac.uk)
MNAVIYARYSSDNQREESIEGQLRECREYAERNGMNVVATYIDRALSAKTDDRPQFQQMIRDSNTHKFEVVLVWKLDRFSRNRYDSANYKRKLAQNHVRVVSATEPISNTPEGIMLESLLEGMAEYYSAELSEKVSRGHKENALKAKFNGGTIPLGYRIDENQHYQIDPATAPLVLETFERYADGECVRKIVESFNARGLRTSRGAPFSINSFQAILKNRRYLGEYRYKDTVIPDAIPAIITPEVFEKVQRRCEQNKKAPAHTKTDVNYMLTTKLFCGKCGAMMAGESGKSHTGAWHYYYKCGNHKRHGRSVCDLKAVRKEPLERFVVKVAIEKVLKTDTLELLAQKLLEYQNKENTRLPVLQAGLKDISKRINNIVSAIEQGIFTPATKQRLDELEEQRKELEASILQEQIAKPLLTREQILFWFERFRQGDPSDPAYQQKIIDCFVNSVYIFDDHLVINFNYRDGDKLVSLQEVKSSFLGGNRSPIFKPHCIAKNGLTVRFFFIL

SEQ ID NO: 734 - protein, 499 aa, unidentified
  source 1..499: note = Bacteriophage uvig_286002 from the Index of /pub/databases/metagenomics/genome_sets/gut_phage_database (ebi.ac.uk)
MSENLKEVCAYIRVSTDKQEELSPESQIRLIKDYAEQHNMLLTRIYQEDKGISGKKADKRPAFQEMIATCKDKSHPYDAILLWKFSRFARNIDESTYYKSVLRKKCNVDVISVSEPITEGMYGRLIEMVIEWSDEFYLYNLSGEVMRGMTQKALKGGYNSNVPIGYVKERGRDKIPQIEPKGAEIVKKIFDMYTEQNIPMGDIAARLNKAGYRTARGSLFETRVVGYILENPFYIGKIRWNYFDKQSNKRKSPDNVIISKGKHKAIISDEQFSKAANRRAHDRLRTGYNKKRRPAPLLANWLSGMIKCSKCGGSLGFAHGGAKTVPNFCCWKYSKGLCSTRNGITLKNAEKEVLTILEELSSSGYFYNYNLNVINTENTERAYILKELRSLDTKMKRIKDAYINEIDTLEEYKANKELINKRREELNKKLEAASVTVHPAAVHKAVDFQALIDIIKDENSNDTEKHNALLEVVEHFVWDKETQEMTVVLNSDISLVNCK

SEQ ID NO: 735 - protein, 478 aa, unidentified
  source 1..478: note = Bacteriophage uvig_25355 from the Index of /pub/databases/metagenomics/genome_sets/gut_phage_database (ebi.ac.uk)
MSKELKNAAAYIRVSTDRQTELSPDSQLKVIRQYAKQNGYIIPKEYVFRDDGISGRSAEKRPSFNQMIATAKQNPSPFSAIMVWKFSRFARNQEEAIVYKSMLKKNGVTVISCSETLDDGPYSSLIERIIEWMDEYYSIRLSGEVKRGMTEKVQRGQPVSISAFGYDIADKKYVINEQSAPIVRKIFLDYLNGKGTRKIASELNSLGIKTSRGNNWESRTIEYILQNPVYTGKIRWNTNGRTDRNYDDDNIIITQGEHEPIIEQNAFDEVQELIAYNHKCHSKYTHSTVKTEFMLHGLVKCSSCGASMAMTAKGQGLQCIKYAKGACKDSHYISMDKINAIVLSGIEKVFENENINLNIKGNDSKDDFIDYNALIKKEYKKLSRIKTAYAEGLYTIDELKEYRQVIEQQINTLINRCKSSVFNESDSDVKVISKNKNLLNHLRNPNISEQEKNVMLRGFVDKIVFDRSIPKVDIFFYI

SEQ ID NO: 736 - protein, 536 aa, unidentified
  source 1..536: note = Bacteriophage uvig_457901 from the Index of /pub/databases/metagenomics/genome_sets/gut_phage_database (ebi.ac.uk)
MDIHSWKQKMTYGMILPVATVFAVAFSIERGIFMTRKSRKHQYTEGLKSSAPVAVGYIRLSVANKEECSSIENQKFIIECWGEQHQIPISHYYIDNGFSGKRFDRPAFQEMIEDILAGKINCVIVKDLSRLGRDYIITGYYIEVIFPINRVRFVSVNDQFDTIDGITNQERPYSSRIRVPITNAFNEQVSIEIKKKMEATLDMKAQQGIFIGPRAPFGYQKAEDNHDQLIPDPKAAIIVRKIFELAANGIGITAIVRYLNEKEIPTPIQYARANGLSGNYDNGNGNWNSRSVKYILTNRTYTGMLVQGKEKRVVSATHEALVDTNTFDAIQKSFQEKAFNIAKHGQSTENILKGKVICGCCGGKMQRKHGTNHADWYFFTCITKNRLGVDKCTGMYVREEDVLRAIYYQLKLYVKEHFISDSQYKQELMRLNNKIDQSDSQYQEAFRNAVRHYERFVDGEISKDEFRVVQDAANEKKVIRNDIITSKTAYEKQYQVFRKLLKASYKEITLSEIMDCINEIIIYPNKNITVKWAIEF

SEQ ID NO: 737 - protein, 546 aa, unidentified
  source 1..546: note = Bacteriophage uvig_247278 from the Index of /pub/databases/metagenomics/genome_sets/gut_phage_database (ebi.ac.uk)
MSRKKQVYEKITALYCRISLDDGGDNESMSISNQKIMLRDFAEKHGMFQYEYYVDDGYTGRNFNRPAFQRMIADIEAGKIGCVITKDLSRLGRNYIEAGSYIEIFFPKHNVRYIAITDGVDSLTRQEMDITPFKNILNDMYSRDISKKVLAGITTRSRQGKFCGGTPPFGLMRDPEDKGHLIIDPETAPIIRKIYDYALDGLGCMRISKRLMEEKIPITHVKANTEFDANYYFWGGARISHILRNPFYKGAHLVFRTHQKGIRSNTYDIIPRDQWEVIEGCHEAIVTPEEWEQVQELIDRRPTIQGNSCPFYNLFHGLVYCATCGKSMQVRYEKVGRTGKNRFTGEMREPIDKAYYICQTYNRMGCKVCSSHKIEARDLYNLVLKDIQELAAQAMKDADAFYQRLSRRMEHRYLVDASQTEKERLRLEARNQEIDGMFLSLYTDKAKGILTEQRFVKLTAALEQEQESNQKRLHDLAMMQGRADAQESEVRTFIKEIRRYAAIEELDEAVLNRLISRILIGEIKKIDGQRTQEVKIIYNFVGEMSR

SEQ ID NO: 738 - protein, 461 aa, unidentified
  source 1..461: note = Bacteriophage uvig_374979 from the Index of /pub/databases/metagenomics/genome_sets/gut_phage_database (ebi.ac.uk)
MKKAALYIRVSTDEQAKHGFSLGEQQHDLERYAAKHNYAVVDIYADDGNTARKSLGKRKELQRLLDDVRAGHIDIILMKCLDRWFRNIADYYKVQEILDAYGVEWECTQEEYNTTTTNGRLMLNLKLSIAQNESDQTSDRIKYINEGKKRRREECTGKHPYGYEVINKKLIVVEKDRPIVEFIFQQILAGSSTHSIASKVWDRFNFGIDAKRVWRILRNPTYKGERYGIADYCPAIIPPHDFDAVQAILGRNKPPSKTGISYLFNGKIICPSCGNILVVNCGKSKKTGEYTRPVYICGKKFTTGKPVAAGGCQFGGGVSESVIEKWLIKNLFPLLEAYQADLQSKQGQRINYDTKIKNINGKLSRLKDLYLDALIDKDTYKSDYQRLQKELTDLAIASKRQIALPPVMNEILQDEDFAKTYWELPREQQRELWQMLIKRITILRRPEEKGKPYKYFRVEFN

SEQ ID NO: 739 - protein, 535 aa, unidentified
  source 1..535: note = Bacteriophage uvig_140430 from the Index of /pub/databases/metagenomics/genome_sets/gut_phage_database (ebi.ac.uk)
MRIQNIHRVGIYLRLSRDDGNSNAESMSIVTQKRMLTDYVKERGWDLTETYIDDGYSGTTFDRPAFQRMLKDIERGHIDCVITKDLSRLGRNYAKTGYYTEEYFLEHGVRYIAVNDNVDTMKDDNDIAPFKNILNEMYAKDISRKVRAARAVNAKQGKFLGSKPPFGYTRCPTDKHKLIIDEKPAQIIARMFEMFASGDSGRHISDIFNKEGIPSPRAYFYQQAGRENPLNESMTWNSNTVMQLLKNQVYIGNMVQGKRRVTSFKTKSRAVVPEEDWIVVENTHDAIIGKDLWAKVQKKIATGKSPHVTKSGEISLFAGIARCADCGAAMTFNTKQYDGKTYYIYKCSRYAVHGKSSCSIHHVPASALEEAVLQNIRFNAQLLSENDEELLGKLIELGARGQQREIREAETKLNESVKRLEVVEGMAQKLFEERCTGNVPDSVFKKLMQNYDVEQANLNQIIAEKRNVLMEMENAAIDISAWAEEFKQYTNIDKLDRRIVTTLIDSVEVHESTKENGVVRQHITVNYKFVGQLNA

SEQ ID NO: 740 - protein, 513 aa, unidentified
  source 1..513: note = Bacteriophage uvig_249187 from the Index of /pub/databases/metagenomics/genome_sets/gut_phage_database (ebi.ac.uk)
MELYAQYLRKSRADMEAEQHGAGETLARHKYMLDQLANSMGIVISKVYKEIVSGETISDRPVMQQLLQDVEAGMYKGVLVVEVERLARGDTIDQGIVSQTFKYSNTQIITPTKVYNPNDEFDEEYFEFGLFMSRREYKTINRRIQAGRIASVKEGKYPSHKAPFGYRVVKLQNEKGYTLEIIEHEADAVRKIFDMYVNKLEGATTIAHTLNALGYKPRISNIFSTQAITAILDNPVYAGYVTWERRKEVRTMQNGIVKKSRPRSHNYIKCKGRHQAIIDENLWEKAHELRTNKRIATPRKSKELTNPLCGLIYCTKCGHKMQRRPAGSRQPADVIMCPNNECNNYASYMSLIEKDIIEVLCDWIDKYSICSKQDNELTLNINTLNNNITALNKELSTTKEQLNNAYNFLERGIYTPEVFFERSAALKDKINTIEQNIHNIQNEILKEQKQQQAKLNFLPKVKTIVDCYWELDNAKAKNDMLKEVIDHIDYIKEVKGRGHEDDFKLTIYPIISK

SEQ ID NO: 741 - protein, 493 aa, unidentified
  source 1..493: note = Bacteriophage uvig_199462 from the Index of /pub/databases/metagenomics/genome_sets/gut_phage_database (ebi.ac.uk)
MVLLDTYCIYLRKSRADAEAEARGEGETLARHEHALLDLAKRGNLTISHIYREIVSGDSIAARPQMQQMLQDVTDKAYTGVLVMEIERLARGDTIDQGVVAQAFRESGTKIVTPLKTYDPSNEFDEEYFEFSLFMSRREYKTIKRRMQAGRIASIKEGNYLGTNPPYGYKKVQPEPKVKTLEIVSEEAEAVKMMFNMYLSGDGARAIAARLNQLQIPPRKASMWEPVSVRKILRNPVYAGKIEWHTKKDGTILSDGVHPAIISWEQFQQSVERRKRTAPQVPTGYTTQNYYHGLLFCGNCGHQMKRRPVPNGTPHMLCRRYECRGKVVSSTTEKIDEAVLEAIKYRISELTLFKDQSGEEKRAKEKQKEFQRDQLKKALEKLKSQKEKLHTLLETDVYTVEVFLERSKALEAKKEELEKALHSITDSLQEKEHLAPEQAVIWLRYVLDHFSTADACQKSKMLQRIIKRIEYKKTEKMCYRKQSSDMSLHIDFL

SEQ ID NO: 742 - protein, 508 aa, unidentified
  source 1..508: note = Bacteriophage uvig_104410 from the Index of /pub/databases/metagenomics/genome_sets/gut_phage_database (ebi.ac.uk)
MPTVTVIQPTIAEEKAVKKRCAAYCRVSSDSEDQLNSFMAQMRYYSQVFDNSETEELVDVYADEGITGTREDKRDEFQRMIKDCRKGKIDRIYTKSISRFARNTRDCLKNVRELKSLGITIFFEKENIDTANMTDEMMITIMGGLAQEESVSISRNLKWSYQKRFEEGTINVFSAPFGYKLSNGSLIINETQAQIVKEIFEMFLNGIGYQRISEICQNKYSSYKDNFSYYGIRYILSNEKYIGDSKYQKTFTTDTLPYRKLPNKGELIQYYIQATHKAIISKETFEKAQALIECRKHKNIVSESPFSGKIICANCGTKYKRKCSGDKIYWVCRRHDNLAQLCTNKRIEEKFIRQSFIILHNKLLFNYKQILIPLQTALQDLKLKKFSGKTQVMDIHKEIAKLREQAHVLARLKTKGFLDEAKYIEQTTELTAKINKLQSELKKLTRSDYEDETLDQIEILIDFFEKRDKPITEFEESTFESIVEKIVVIDQHELEFHLIGGLKFKENI

SEQ ID NO: 743 - protein, 444 aa, unidentified
  source 1..444: note = Bacteriophage uvig_324974 from the Index of /pub/databases/metagenomics/genome_sets/gut_phage_database (ebi.ac.uk)
MLRCAIYIRVSTEEQKINGLSIEAQSAALTEYAVRNNLLITDYYIDAGLTARKKLQHRKELLRLLEDISNNKIDIIIFTKLDRWFRNIADYYKVQEILDLHKVNWKTIFEDYDTSTANGRLHINIMLSIAQDEADRTSERIKIVFENKRAKGEVPGWKAPLGYKIKDSKLLLDDDTKRIAIDIFEHYDLHHSIMGCVRMAKERYDYKIYDYSIRRMLENKTYIGEFRGYKNFCEALITSDLFYRIKNYREVKEYKNQRKAGRVYLFSSLILCKDCNHSMTCCFTKQHQKAGVKEYHYYRCKEAILGCCIHKKRLREDNLEEYLLQNICAGLGNYIIQINRSEKQEKTPILNIEKLSKKLEKLKDLYLDDLIDKESYRKEYDALQKHIKLSSIKPNKIKVEQMPLQYNLKELYYSLSIEERKIFWLGILDCITVDSQNRIQIFYR

SEQ ID NO: 744 - protein, 513 aa, unidentified
  source 1..513: note = Bacteriophage uvig_214087 from the Index of /pub/databases/metagenomics/genome_sets/gut_phage_database (ebi.ac.uk)
MLKTDMTNEKSTAVIYARFSSDKQREESIEGQIRECTQFAKDQNLEIIATYIDRALSARSDNRPDFLRMIADSAKGLFQYVIVYQLDRFSRSRYDSAVYKHKLKKNGVRVLSAKERIGDDPSSIILESMLEGYAEYYSAELSQKVKRGMTENVLEHKWTGGYVPLGYCLAPDKTLQIDPVGAEAVKIIYDKWLSGCRIMDIIRYLNDHNYVTSRKAKFRYSSLNRILTNPIYTGLYRWGSIEVADYAPPIISQKQFSLAQEKIHHIKAHPRAKRRSAAYALTGIIYCGVCGSPMTGQSGHSKSGALYHYYRCSTKNNYHDRGKKLNVKCTNRNISREKLEDLVLQTTINILMNPEAVHMIAKQAVAVQQKDPVSMELDRIKEDKKIIQKKLNNSIKAVEAGIISTTLAANISQYEKEIADLDIKMEKIKLSSTPVKIDEIAVEFFLKNLLLQKKEHDKYRLDMFQTFIRRVIVYPDKVEIQYNYTATPILENPVIKMMTGNPGCSRCERLVTR

SEQ ID NO: 745 - protein, 530 aa, unidentified
  source 1..530: note = Bacteriophage uvig_13945 from the Index of /pub/databases/metagenomics/genome_sets/gut_phage_database (ebi.ac.uk)
MSDKEKTNGSLAMAPRVITIPAANQETARKLRVAAYTRVSSNSKDQEHSFAAQNAYFSKLITDNPDWELADIYADQGITGTSIDKRDDFLRMMEDCRKGRIDRILVKSSSRFARNTKESLAAVRELKSLNISVYFEEQNIDTAQVSGEVLIAMFAALAQRESEAISERVRWSYRVRMSKGRFSTCKAPYGYRLVKDHLEIQEDEASIIRHIFDRYLAGVSMENIAKEITALGCPTRDGTQYWQLTSIQYILQNEKYAGDSLSQKKYTTRSFPRQQKINHGERKQYLVIDSHPAIISREIFQKVQELLTQRSAAIHPRSDVPHAFARKVVCGHCGTLCKRKNCGGSVNWACRRHDKSITACPNTQVPEEQMKNAFLHVYYNLKHYGTSILTQLISDLHAARTGSLLWSENIVEINKQISDIASQERLLAQLKQQGVVDPDIFISRSNQLAERLRELKLQKERILRSEEDHTIQQTQDLLDVLESGPDWQDDFDEQLFSDMIEKIVVVDNETLCFRLLNGLEVTEKIERTRR

SEQ ID NO: 746 - protein, 462 aa, unidentified
  source 1..462: note = Bacteriophage uvig_11401 from the Index of /pub/databases/metagenomics/genome_sets/gut_phage_database (ebi.ac.uk)
MAKKVTVIKAAKEQKHTQEERRLKVCGYARVSTGSQAQATSYTAQVEYYTEKIESNPLWEFAGVYADEGISGTNVKHRDEFQMMISDCEDGNIDLILTKSITRFARNTVECIQTIRKLKEIGVGIYFEKENINTLSEKSELFITILASVAQGESENISSNNRWAIQKRFQDGTYIISTPAYGYGKDEDGNLVIIESEAETVRWIYESYLNGMGVYVIAKALNQKGIPTIRGAEKWQDGVIQDILKNPIYEGDMLQQRTYTETRFPFVRRVNNGQRNQYLIKDSHPPIVTHEEAEAVRNLMAYRVDVLHMNKSDYTKRYLFSGRIICGECGKTFRRQKIYIGKPYEKIIWTCSGHVEDKENCCMKAIREDVLHRAFTDMWNKLYTNQGTILEPLLKELTELVAARQDSEEIRQLDKEIKDISEQSQILNQVMRKGYMDSALFMESSNKLGWCEFPYKSRVIPT

SEQ ID NO: 747 - protein, 585 aa, unidentified
  source 1..585: note = Bacteriophage uvig_81430 from the Index of /pub/databases/metagenomics/genome_sets/gut_phage_database (ebi.ac.uk)
MARKEGRFNALADKVPSSDKDKTVTYVTTEKQYHVALYARLSVEKDGRKSDSIESQFMIMENFIKERPELTHYQKYFDRGVSGTTFTRPDFMRMMDDVRAGKIDCIIVKDLSRFGRDYLETGNYIETILPFLGVRFISVNDHFDTVEDYNGNKGLGISLMNLVNDMYAKDVSKRITSAFQSCMERGSVLGHAPYGYSSVKTDDGHRLVIDEPAAEIVRKIFQMAKSGMSHRAIARELTQAGVRIPEEYRQTQLAYITEGEPLSEWKNGTISQILSNEAYIGTLQQGKTKRCLYQGLERQKVSKNEWIIHEDAHDAIVSKELFYEVRSVVDKKKEKKSFVAREDLPLTADRYKGILKCPVCGGDFSRESSIIYSGEGDVRLYYYRCRHNPLPVEERDKEAVIKISEEQLDLLVFESLQKAVKELVPDKKKLLNALEKGFQPAETTLKARIADLKKRAERLSFEGSELYGSYVKGEISRDELEDANRRQEQERVRLDKELLQAEKDYKAFVRNTKEQKKFVNALVSVKDKSVLTPELVETLISGITLTADRHMEIQYRFNSDKSTGYTDTFRFPRRTKWNEGGRTDV

SEQ ID NO: 748 - protein, 521 aa, unidentified
  source 1..521: note = Bacteriophage uvig_250870 from the Index of /pub/databases/metagenomics/genome_sets/gut_phage_database (ebi.ac.uk)
MARITKIEATKSFIEKKKIRVAAYARVSTRSDEQLLSLETQKEHYDNFISANSEWEYAGLYYDEGVSGTKVEKRDGLLALLKDCEDGKIDRVITKSISRFSRNTADCLEMVRNLARLNIYMYFEKENIDTEHMSSEWMLSILSSIAESESRSISQNNKWSIKHRFEEGTFIISYPPYGYENEEGRMVIVPEEAAVVRDIFNMTINGMGTHVIARELNERGVQSRKGTKWHPSTVRGILQNEKYTGDVIFQKTYTDDNYNRHINYGEKNMYLCKNHHEPIISHEIFDKATAVIHQRAKEKSIETGIGKYHHLYAFSGKIICGECGSTFKRRQHYKPSGNYVAWCCNTHITDNDDCSMMYIRDEDIKTAFLRMIRKLQTVHAKVLKPFIEGLRGANNKERLHQVLALEEQIEKNVEQTTVLTNLLSSGYIEPEIFHAEKNQLTSEADRLAREKQLISKSINGDLTHLDEAQKLLRFVSKKAEITEFEDEMFLEYVDTMTVHSRDEITFNLKCGLNITERLVVV

SEQ ID NO: 749 - protein, 546 aa, unidentified
  source 1..546: note = Bacteriophage uvig_590864 from the Index of /pub/databases/metagenomics/genome_sets/gut_phage_database (ebi.ac.uk)
MYSSKRAVIYCRVSTEEESQKNALEGQIKEAIKSVEEKKWILVDQYVDEGKSGTTTKNRPQYNRLIKDLSQDRFDIIVIKSQDRLMRNTLEWYMFIDLVNKNQKQLFFYLENKFYNTEDSLIVGIKAILAEEYSRELSKKINNAHKNGQKECSRIMLNNKTWGYDKINKQVVINEKEAEIVRLIFDLYIKGYGARTISKTLTEMGVKSRSGGDFAYVTIRKIVRNPLYKGDVVMNRLHNDFDSKKVVHIPKEEWIVHKNAVPAIVSEETWQAANSILDTRYQDTFSAQGLPIRIGKNKGDYPLSSKIYCGECGSTYWRRYRRNTKDDVTVYWSCSEYVTQGRKNDQTKRGKNMVKKQFDLQRGCNSPHLKEEDIISGLKMIAENIFSPSDRDSLISESIQLFESSALDNDKKVNGLNENLEKLKKQQEKLLDGYLNDCISEDLYKKKNAILVEEIRTLEAKKAEIGDTEAEVRQKKEYIESVKTEISKIGQNEGCVHKLINIIERITVFQTYMLVSLGAIGEIKLNVERLSYKRTRVTIADEQHNN

SEQ ID NO: 750 - protein, 421 aa, unidentified
  source 1..421: note = Bacteriophage uvig_135439 from the Index of /pub/databases/metagenomics/genome_sets/gut_phage_database (ebi.ac.uk)
MKLRKIEPLKPKQKKLRVCAYARVSTDSLKQGESFDNQVSTYERVIKSNPEYEFVSVYADQGMTGRSENRPEFQRMIADCKAGKIDLIITKSISRFARNTTTVLKYTRELKEIGVGVLFEENNINTLSSEGELMMTVLASFAQEESRSISENNKWTLKKKFERGEGMVNTARFMGYDKDETGDLVINKEEAKVVRQIFKMYLSGMGCHRIAKALNEEGVPTIAESSWHASTIKGMLTNEKYKGDFHIQKTYIPEGTHQSVKNNGQVQSYYVTEDHPAIISAEEWQQVQELMEYHRKQRNIGKGEKYQNRYPMSGMLVCPYCGKSLRRRYVYNRKVEWLCATYIHKGKEACKGIRIRDTELTGLSFSEPMVVEEVMIDGEKHYGYTSKRAYDAGERAADRIEKESSSVLPRVNGPRRTVIKL

SEQ ID NO: 751 - protein, 514 aa, unidentified
  source 1..514: note = Bacteriophage uvig_166254 from the Index of /pub/databases/metagenomics/genome_sets/gut_phage_database (ebi.ac.uk)
MGIPLLSGGIYMDNRLKAVAYARFSSDNQRDESIDAQISAIENYAKINNIEIIGTYIDRAKSATTDQRPNFQKMIADSSTGTFDIIIVHKLDRFARSKYDSAIYKQKLKVNHVRLISVTENIDGSPESIILESVLEAMAEYYSKNLAREVMKGLCENAKNTIHTGGIPPLGYDIKDKKLVINRHEAEAVRIIFDMYNDGYSYGEIIKTLNDTGYKTKIGNNFGKNSLYEILRNEKYMGVLTYNKSSEKSATGTYNRHKYKDNENIIRINGGCPAIITSDVFYTARDRQLYNKQVSQSNRTRQKYLLSGMLYCDVCGSPLYANRRKKDSQITYRCCKKYRSVDKCTCKEINQQWIDLEIIKIIKKHILNEQNVDYILQTINDYNNSQKSKQANIFLEYTNELTDIKNAKENILNAVEEGFAKEHFKHRLDTLIQRESYLKHQLHTMDNIHHLSISKTDILLISNKFNRLLKENDITALRAMLNDFIDKIYIGNNKVTVYLKERWFRTTILTLDRY

SEQ ID NO: 752 - protein, 515 aa, unidentified
  source 1..515: note = Bacteriophage uvig_422831 from the Index of /pub/databases/metagenomics/genome_sets/gut_phage_database (ebi.ac.uk)
MELSKGVIYARYSSDKQRDESIEGQIRECKEYAEREGIVITHIYTDKALSARTDHRPEFRQMIDDAKKHNFEYVIVYQLDRFSRSREDSAVYKSILKRNGVKVISAKENISSDPAGIILESVLEGMAEYYSAELAQKVRRGMTDNALKGKMNGTPTPLGYDKTKENSLVINKREAKIVERIFDMYLKGHSIPSICSFLNSKGYLSKKGGKFSYAVIRRILSNEKYIGIMKWNDIIVEGAIPSIISKEIFDKVQSANSRRIKLKASRSEFYNLCGKLYCGKCNAHYVGSTATSRSGEKHYYYVCNNRRKHHTCDAPNLKREIVEDIVINQTLEILNQPSTIEQLAELAIKANKDMMSTSELELQAVNDRINQLQSELDNYMKAIAKGFISDTLQNQIEKTEAELQDHMTRRANHEMASNQIQLTAEHIEFFLHKMAKENPTTKRGRASIIDTFIKQATIFDDRVEIIFNYSNDLPQFKEQAITCSHSCDMVVHTTHCTNHFYIARSRYPIRLVITY

SEQ ID NO: 753 - protein, 495 aa, unidentified
  source 1..495: note = Bacteriophage ivig_3102 from the Index of /pub/databases/metagenomics/genome_sets/gut_phage_database (ebi.ac.uk)
MIALYGRVSTEEQATKGYSLRNQIEECRRKANTKEIVEYVDDGYSGEFLERPALTKLREDVKGNRITKVYCYDPDRLSRKLMNALIIDDEFRSKGVDIIYINGEYADSPEGKLFYSLRGAISEFEKAKITERMSSGRKRKAQEGKIVKNHKMYGYDYDKEKAMYVVNEHEASVVKMIFHKFVVEQIGMNSIAKELTAKGVKTKTGKDVWHRQVVRQILMNESYTGDYYQNKWNTEGMIRNKYTDNPDNKIKMRHRDKSEWIPINIPQIIERTQYEEAAELLKQSRRRYAKAAVNQYLLSGLLRCGTCGNTMVGTKTTWWGKPHFIYTDRKSHAGAKHPGCVLDIKMEKLDEEVWKDVEQFVYNPELLFKYDNTKDVSMELKQAEKLKEDIKKAEKGRKKLYSLFAISDDLDEEELKKEIVELQDKQRKAEERLMEVEKEINKNKNDRDIDSIKETINELISKEDRITFDVKKSLIRVLVKEVIVEGKEKININYF

SEQ ID NO: 754 - protein, 512 aa, unidentified
  source 1..512: note = Bacteriophage uvig_404379 from the Index of /pub/databases/metagenomics/genome_sets/gut_phage_database (ebi.ac.uk)
MICAMYLRKSRADYEAEARGEGETLAKHRETLMAVAKARDLTVTDVFSELVSGDTIAERPEMQRLMRAVERGDYDAVLCMDIDRLGRGDGADQSAILKTLKYSDTIVITPYKDYNTRREMDEEFFEYSQFIARSEYKRIKRRMWAGRVASVKEGKWISPKAPFGYRRVRIEPGRGWTLTPEPSEAEAVRSMFAWYASGECGKNTIARRINDMGFRTYGGKNFDPSEIRSILTNPVYIGKIRWNYRHQNIEMKDGKEIVTRPRSSECLVSDGLHPAIVDKDVFDAVQRCFTSLGDPCVPFRREMVNPLSGLMHCAECGRAMHMVPEYKRYGVDATYRCRKTGGCATTTIEAKYVYDALLFALRQWSTYGDSDGYAPDCAAPVNDTLPQIRAVSAQITQLRNQLSKLQDLLETGVYSADTYVERSKVINDRIAAASATLAELRQSQPVDERAAIIRLKPKIRHLLDTWDDSTPAEKNALLRTIVREIKYKKTRRCFRNENPAEYLTLTIYPIVD

SEQ ID NO: 755 - protein, 466 aa, unidentified
  source 1..466: note = Bacteriophage uvig_554169 from the Index of /pub/databases/metagenomics/genome_sets/gut_phage_database (ebi.ac.uk)
MPQKTLVFGYVRVSTENQLENYSIEEQISRLKSYCAAKDMVLLKIYTDGGYSGGNTDRPALKQMLADIKTVNVDAVLVYKLDRLSRSQKDTLTLIEDEFLAHDVDFISINENFDTSTPFGKAMIGMLSVFAQLEKDQITERFTMGRIGRCKAGYFHGGGNAPYGYTYENGDLVINYTEAENVKKVYSMFLSGKSINAIYREMENINGKGWSARKVSNILSNVIYIGKVKFAKNEYDGNHEPIISADTFEAAQKLLNSPDRENAKTSAQKTPFRANYLLSSLVYCSRCGARYSANHGYYKCYSRSKSSKQFITDPNCKNDNWKIEELDKLVLSEIYNLIKKPQLINKLASKAKQNNTPYDRKKLEKRLRELERQMENLLDLYQLGNIPMELLSTRIHNIDVEKGIIQKQLETSSGNSSTSIEAFKASLASFSELFDISPIETQRLIVSSLIQAVNVDGQQVSVVWRI

SEQ ID NO: 756 - protein, 492 aa, unidentified
  source 1..492: note = Bacteriophage uvig_173267 from the Index of /pub/databases/metagenomics/genome_sets/gut_phage_database (ebi.ac.uk)
MAAIDFNNVVDLYIRVSTSEQAEEGYSVAEQEERLRSYCAAYNYTINAVHVDPGFSGASLDRPAIKKVMSDVEHGRCKKVIVWKLDRLSRSQKDTLILLEDVFLANDCNFISLMESFDTSTPFGRCIVGILAAFAQMERENIKIRTMMGRQARIREGHFHGSRCPLGYKFQYASDGTLLSNDLVVDPYTSKLVQEVYRLSLGGSSFSSIAAHMASTYGCSLYDWSRNTAIRRILSNPIYMGKVKVGNELYPGIHEPLVSETDWYMVAAMLKHNKEQQKRTYAYQISCGVYADNLLTGLLFCGDCGARMYARRVSQNKKKYICHSVAKTSPAMIKSDHCTNRLHPFTVHQLDEMVIDEILKLSLDRPGFDMLCDQPDDSSKSEDKEIYEERLAEVNRQLDRLVKLYQTGLIDLDNISARLGDLNQEKNFLEGNLATINEVTPAEIRETAWKSIQSLQSVLNNGDMDEVHRIIHTLIDKVVVLNTDVTIYWSFC

SEQ ID NO: 757 - protein, 462 aa, unidentified
  source 1..462: note = Bacteriophage uvig_110260 from the Index of /pub/databases/metagenomics/genome_sets/gut_phage_database (ebi.ac.uk)
MKKVACYVRVSTENQIENYSIDEQTERLEAYCKAKDYAIYKIYTDGGYSGGNMNRPALNAMLADIEHKLFDTIIVYKLDRLSRSQKDTLMLIEDYFLANNIDFVSVSENFDTSTPFGRAMIGILSVFAQLEKDQITERFTMGRIGRSKSGLFHGGGNAPKGYNYINGHLEINTVEAEQVKEIFSLFLSGKSVNAISKIMTKKYNDNLWKNALQITNCIRNSIYIGKVKFKGVEYDGEHQPIISEDDFRRANELLKSDDRIKFPAQKTPFRAGFLLSSLVYCKNCGARYSACHGYYKCYSRSKSTAKFVKDPSCKNKNWKIDELDALVISEIHKIAIDDEYKKLFKKEEKTDDTKSIKAEISKIDFQINRLLDLYQISDIPIDTIKSKITVLTNKKDELNELLNKNRRADNYKAFQAALNRFEALDDTSGIDERRLLISTLIERITIDEESVNITWRIESKIV

SEQ ID NO: 758 - protein, 478 aa, unidentified
  source 1..478: note = Bacteriophage ivig_1400 from the Index of /pub/databases/metagenomics/genome_sets/gut_phage_database (ebi.ac.uk)
MNKVAIYVRVSTTNQAEEGYSIEEQIDKLKAYCMIKDWSVYDVYVDAGFSGSNIKRPAIQKLIKDTKRKVFDTVLVYKLDRLSRSQKDTLYLIEDVFLENKIDFVSLLENFDTSTAFGKAMVGILSVFAQLDREQIKERMQLGKLGRAKSGKPMMWAKVAYGYTYHIGTGKMTVNQSEAIIVKEVFSSYLNGRSITKLRDDLNEKYPKTPAWSYRTIRQMLDNPVYCGYNKYKGQVYPGNHAPIISKEIYNQVQDELKIRQQKAYEHNNNYRPFQSKYMLSGIAQCGYCKAPLKITLGTIRKDGTRFKRYQCVQRTPRKTKGATIYNNNEKCNSGFYEKDDIEAYVLESISKLQTDSNCIDDLFNDEPEKLDRDALNKEIEALSNKISRLNDLYINNLIALDDLKTKTDTLQSKIDILKERLEKDPALERQKNKQKMLKTLDTKDIFKMDYEEQKMLVRALINKVQVTADSIKILWKI

SEQ ID NO: 759 - protein, 526 aa, unidentified
  source 1..526: note = Bacteriophage uvig_144279 from the Index of /pub/databases/metagenomics/genome_sets/gut_phage_database (ebi.ac.uk)
MQEMNISINDLIMYLRKSRSDDPYMTVEEVLARHEQQLQDYALSSFGAVLPEEKIFREVVSGETISDRPVMQNVMKYLETGLIKGVLVIEPQRLSRGDLEDCGRIINTFRYTDTLVITPPKIYNLSDEYDRKFFEMELTRGNDYLEYTKKILNRGRIASVKQGNFIGTIPPYGYRKVMIGSGKNTRHTLEIIPEQAEAVRLMFHLFVDEGYGFTRIARYLDRVGIRPLHSECWNPASLKDILENPVYIGKIRWNWRKTQKKMVNGQIIKTRPKTKDSSAWIYVDGIHEPIIDEKTYQAALDRRTDNPRIRKGTELKNPYAGLLFCGTCGRAMNYKRTHNKKYGSICENMLCSNQANCHTHSVKFSTFQERVITSLKETIADFEIKLEEDNGSSLRFHMAQVNRLRSELDKLKEKDERQKNAYENGIYTMEEFAPRNAKLQEQICQMQQKIRNMEHAVPEAIDYKEKIMRFRDCLDALQDPNISAEEKNNFLKSCIDKIMYYNDLESRSGIGRYIQNEFRLDIFLRL

SEQ ID NO: 760 - protein, 558 aa, unidentified
  source 1..558: note = Bacteriophage uvig_193710 from the Index of /pub/databases/metagenomics/genome_sets/gut_phage_database (ebi.ac.uk)
MRSIEICDNKCGEKMMQTLAQGEMRVVVIPAKSSEENKQAAKCLRVAAYCRVSTDDEEQKTSYEAQIGYYTEKINQNPEWQMAGIFADEGISGTQAKKRPEFLKMIRLCRQRKIDIILTKSLSRFARNTVDSLGYIRELRALGIAVISEKENINTLTAESEMLITIMSCFAQAESESISKNVSWGVRQSFKNGNVPMQYARLLGYRKGHDGNAEIIPEEAEVVKEIYRCYLDGMSMNLIADRLNEKGLTTKGGSSPYRKTVVQRILTNEKYTGDALLQKTYVTDCITKKTRKNNGELPMYLVKNHHEPIISRTDFNRVQEEMARRSAKRTIADKLTKTGQGKYSAKYALSELLICGECGEHYRRVTWTAKGFKEIKWRCVSRIQYGKKKCHSSPTVDEQAFHRAIVSAINEFCEVKDDVAKALRESIIEALDQNQNGSVHAAQQRIDELARNMDELIKLATVPETAENAMSDIAKFSEEMKMLREFIETEKAKQAATQRGSDEVNTILERLGQEDFTLIEYDDVAARQLIEKITVASKDAITVRFKGGFEIRKDLNGN

SEQ ID NO: 761 - protein, 492 aa, unidentified
  source 1..492: note = Bacteriophage uvig_256500 from the Index of /pub/databases/metagenomics/genome_sets/gut_phage_database (ebi.ac.uk)
MSQLSTSNAQPLEIGAAYIRVSTDDQTELSPDAQLRMILDAAKADGFVIPKEYIFEEKKGISGRKADNRPEFQRMIAIAKSQKPAPFKRLYLWKFSRFARNQEESTFYKGILRKKCGIEIKSISEPIMEGMFGRLIETIIEWFDEYYSFNLSGEVKRGMTEKALREGYQTAPCLGYKAVGDGKPFLIDEDAYSIVEYIFQAYHSGRDMTGIARSVNTIGYRTQRGNLFDRRAIYRILTNHFYTGEVSWNGITFQGTHETRPAVTSVFDDVQKRITSEYHPKKRREASANAHWLSGMLFCGVCGSSLGFNRSNDQKKRPDFFQCWKYAKGFHPGSCCVSARIAERTVLRSLEKALRNNHLEYEHIPKTENDISEEEIAIKEALERITVKERRIREAYENEIDTLEEYKQNKLRLNAERKELENALDQLRQKAQQTEAAPPDQAEMMAKVSCVYQVLSDPTADNETKGNALRSLCEKIVFDRETRSFTFFYYTS

SEQ ID NO: 762 - protein, 595 aa, unidentified
  source 1..595: note = Bacteriophage uvig_206777 from the Index of /pub/databases/metagenomics/genome_sets/gut_phage_database (ebi.ac.uk)
MSVKQTEEKITALYERLSRDDELAGESNSILNQKAYLETYAAQHGYTTIAHYTDDGWSGGNFERPDWKRMIADIEAGRVCRVIVKDMSRAGRDYLQTGFYTEVFFRQHGVHFIAIANGVDSEDQNSNEFAPFLNIMNEWYLRDQSRKVSAAYKIKGNSGKHTSTHAIYGYKKDPEDKNHWLIDEEAAAIVRRIFQMSIEGHGGYEIAQILTREKVESPSYYLASRGLYKNRKDMSRPYDWYGNSVNVLLSKPEYMGHTVNFRTSKKSYKDKRIMNPPEEWLIFENTHEAIVDPETWHLAQQTRKTVHRIDTTGEANPLTGLMYCADCGAKMYNHRSFKTKSDGTRTAVDNYNCANYTLTLQRETHKCCSHSVTTKAIRGILLDTIRGVSKYAISNEEEFRDKVMEASRLKQESDAKDLKKRLKAAQKRCQELDILIQKLYESYAVGKITEHRFDLLSTQYEKEQAELSAVIDSNRVELADFETDTSRAKQFLALAKKYTDFSELTTPMINEFIEKIIVHAPEKINGERTMEIEIYLKFIGKFEVEPTPEEIAVAEAERNRRAVERQKYLRKKAQQEQKRMEAQLEQTDAPTQETA

SEQ ID NO: 763 - protein, 483 aa, unidentified
  source 1..483: note = Bacteriophage uvig_158624 from the Index of /pub/databases/metagenomics/genome_sets/gut_phage_database (ebi.ac.uk)
MTTQSTVEIGAAYIRVSTNDQTELSPDAQLRVILESAKADGYVIPKEFVYIEKKGVSGRRADNRQEFQRMVATAKTQPCPFKRLYLWKFSRFARNQDESVFYKSVLRKKCGVEIKSVSEPIADGMFGRLIESIIEWFDEYYSFNLSGEVMRGMTEKALREGYQCSPSLGYAAVGEGKPFIIIEKEYAIVEFIHQSFHKGKDMTAIAREANDMGFRTKRGNRFDRRGIYRILVNEFYNGIVVWNGIKFQGAHETRSSVTDIFESNQQRIKKEYRPRSRRETSSCQHWLSGILKCSVCGASLSYNRSNDQKKRPDFFQCWKYGKGVHRESCSVSVKKAEEAVLTSLRQVMADQSVQYEYIRKPDQKVISEESRLSEALEKVAMKEMRVKDAYESGIDSLEEYKANKLRLQDERNHILEELEQLKETPGEPEGPDMQEVLKRITTVYDLLMDPDIDNVTKGNAVRRIIKKIVFDRQMNEFHFYYYA

SEQ ID NO: 764 - protein, 581 aa, unidentified
  source 1..581: note = Bacteriophage uvig_46185 from the Index of /pub/databases/metagenomics/genome_sets/gut_phage_database (ebi.ac.uk)
MEDFYKIKEALKIMPITQIPLRVVIYSRVSTDSEEQLTSITNQKTYYKKLIENTPKWTLIEEYVDEGITGTSTKKREAFQRMISDGIEGKFDMIITKSVSRFARNTLDSLQNVRILTAHGVGVWFHSDGILTFEADGELRLSIMSAFAQGESEKKSEAVRFGLQESIKRGTVFGFDNMFGYRLRGGKLEIDEAEVPMIQKIFELYATDRYSMNQIEKILYDDGYRNHNGNRISHATLSHIIRNPKYKGVFAGRKVRKKDLFDDRVEMLPQNEWVIIDGEKGRSIVPPIVSEELWAKANRVLEARSIDVKTRQNKCNHPNLLTGKLWCVHCNLPYHRKASKTSNAVLNSAWVCAGKIRNGTASCPSIYLYENEVKQCLYELFIEDDFDIDDYIDQYIKLVSEASSSEKNTNRQNELEKELALIEKKKTKILEFNVLGQVSDQDYIAQNNALNEEYKRKSEELANVRLALDTKKRTEEDFEKMRGALQQLKGRKNIDFIDPTFVRTYIERIDVSMIDGRTMNMDVILKTGDKISRILKKNLSSVNRRKHIYTGRRLTFRRKTPYGRGSHEIPIQINICFFSLN

SEQ ID NO: 765 - protein, 524 aa, unidentified
  source 1..524: note = Bacteriophage uvig_593892 from the Index of /pub/databases/metagenomics/genome_sets/gut_phage_database (ebi.ac.uk)
MPDCLYLRKSRVDMEAEARGEKDVLARHEAELLRTARRLGRTVGAIYREVVSGDTIAARPVMQQLLREVEAGQWEAVLVMEVERLARGDTIDQGVVARAFQYSETKIITPIKTYDPTNEFDEEYFEFGLYMSRREYKTIKRRMQRGREASIREGKFVGNKNPYGYVRVKLQGVKGWTLAPDPPRSEVVQDIFRWYTEGYTGPDGATQLLGVTSIANRLNELGIHTAHGTFWNASVVNAMLRNPVYAGWVRWNYRATVRTVKDGQVSLSRPRNKANQTLVRGLHPALVSQQTFDAAQKRLSINPSRVGPKNAARKNPLAGLIFCSVCGSSMVRRPYSNGAEPCVMCPRPHCPTVSSQMYVLEDTLMDALAQWLEELEPETPPDPAEDPEVQSLQALIDDTSRQLQKLDAQIDRAYELVETGVYTSEVFSARSMELARRRLDVQDQKRNAELELQSRKQALFFWRQLAPQVRHVIDSYRASSDPDEQNALLRTVLARVEYKKTTRARWGDGSDLSLTLFPLVPDSD

SEQ ID NO: 766 - protein, 525 aa, unidentified
  source 1..525: note = Bacteriophage uvig_36383 from the Index of /pub/databases/metagenomics/genome_sets/gut_phage_database (ebi.ac.uk)
MGRKVTVIPPTISLQTHLPTTQKVKRKVAGYARVSTDFEEQLTSYEAQVDYYTKYIQEREDWEFVKVYTDEGISATSTVHRDGFNQMVADALDGKIDLIVTKSVSRFARNTVDSLTTVRKLKEKGVEVFFEKEDIYTLDSKGELLITIMSSLAQEESRSISENVTWGQRKRFADGKVSLPYKHFLGYRKGADGLPEIVPEEAEIVRSIYRWFMEGMTPYKIACILIEKGIPTPSGKEQWHLSTVKSILTNEKYKGSALLQKKFTVDFLTKKTKVNEGEVPQYYVEESHPAIISPEEFELVQAEMARRKELGKRYHSGNIFTAKIVCGECGGFYGPKIWHSNSHYRRVIWRCNKKYTNDCYCKTPHIDEDTIKQGFLKAYNQLLTDKGSVLSLCEMLLHAFSDCSDLDAKMSVLGDEEKQITKNIREMVVINSRTVQKQPEYTLEYQSYEREYEALKAKYQKLQAEKLDRINKTTVIQDFMEQIKKRKEPIKVFSSDVWLTAIETVTICEKGELQFRFKNGTEITV

SEQ ID NO: 767 - protein, 473 aa, unidentified
  source 1..473: note = Bacteriophage uvig_384338 from the Index of /pub/databases/metagenomics/genome_sets/gut_phage_database (ebi.ac.uk)
MSQAIAGTAVIYARFSCSKQREASIDDQLRVCRQWCEREGYAIVAEYCDYAISGRTDDRPQFQQMIANAGESDIALVYMMDRFSRGEYDAPIYKRELSLKGVRLVSALEAIPDSPEGIIYEKLLEGLAACESRKTSIRVKRGMEGNALQCKTNGVRCYGYRTGEDGHYEVVPEEAEVVREVFRRRLEGEACNSIARDLAQRGVKTYTGRPCGYSMVYSMVHNDKYRGVYSWGGITQEGGMPRIIEDDLFYRVQGVKGKKQRANESWGEFMLAGKVICAGCGRSMPGVSGRGHKNVKYEYYTCRNCKEVKPVRRDWLEAEIVRALRETLSDPDEALRIAKLTLGDQSENDAERKAAHRSLDEADRGLRNILKAVEEGIVVPGTKERVAQLEAQKQRAERDLAMLQGKEIDPQDFAYFLQFGSTLDDASLLDAFVYQAMVSTEDVVVTLNYDTIENEPARLTLSRVRTKFEWCPR

SEQ ID NO: 768 - protein, 527 aa, unidentified
  source 1..527: note = Bacteriophage uvig_329211 from the Index of /pub/databases/metagenomics/genome_sets/gut_phage_database (ebi.ac.uk)
MEERAKAVIYARFSSDKQREESIDGQIRECTAYAESQNLEVIDAYIDRALSARSDNRPDFLRMIADSARKNFRYVIVYQLDRFSRSRYDSAVYKNKLKKNGVRVLSAKEHIGDDPSSIILESMLEGYAEYYSAELSQKVKRGMTENILEGKWVGCRVPLGYKLTADKKLQIVSRDADAVRLIYTMYNANERIIDIVRYLNAHRYKTAAGRAFTRSSLTKILGNKIYIGTYEWDGHVVEQFAPPILDDDVWEAAQKRTQQHKLNPRPKRRSADYALTGLIYCGECGNPMTGQSGRSKNGSMYRYYRCSTKNNYHSRGKKQHIKCKSRNISREKVEDLVLDETVRILSNPKAVKIIAKQAANVQKIDPTAQEQARIAQERKTIQAKLENSIAAVENGLCSKTIAENIERYESRISELDQQIDELKFAYAPIRIDAIAVEFFLKSLLNKKKDHDKYRLDMFRTFIRQVIVYADKIEIRYNYTACPQILKNPVSIALTGLPECSGNDSVVRLEGFEPSHPVPETGALSPEL

SEQ ID NO: 769 - protein, 525 aa, unidentified
  source 1..525: note = Bacteriophage uvig_163634 from the Index of /pub/databases/metagenomics/genome_sets/gut_phage_database (ebi.ac.uk)
MWMLPPMSVDDIIMYLRKSRTDDPALTVLEVLSKHEQMLDDWVVRNIPDDGRRIPEANRYREVVSGETIESRPCVQEVLRRVESPRVKAVLVVEPQRLSRGDLEDIGRLVKLLRYSNTIVITLQYTYDLRDERDRDMFERELKRGNEFLEYQKRIMGNGRLLSVQNGNFIGQKPPYGYNKVVIKEGKRKCHTLEPDPERAPIVKMVFEMYAGGTSATQIAKTLRTMGVTTADGGKWVTSSVKQMLTNDHYIGMVHWNKRKTVKVVEDGEVVATRPRNSDFLVYPGKHQPIIEKELWDAVQAIKGNIPPIKNRAKYANPFAGLVVCQCGGKMVRQQYVRDGVERCAPRLVCPNQAECHTASCSLPEFTEAVIEALEKGIKNFELMMADAPEDDATQQERLIAQLEKRLAELDRLELAQWDKYTQEAMPKHVFDALNKKVVQEKEETLQALKTAMETVPIRVDYEKKRETFATAVKTLQDPNASVKEKNLLLKQCIERINYNRKPKESDNRRFGNPEPLELELQFKV

SEQ ID NO: 770 - protein, 509 aa, unidentified
  source 1..509: note = Bacteriophage uvig_351740 from the Index of /pub/databases/metagenomics/genome_sets/gut_phage_database (ebi.ac.uk)
MIWNTALYLRLSNDDGDKDESNSIGSQRNITSNYAAGLPDVQVIGEYADDGFTGTNFDRPDFKRMIDDIQTGAVNCVIVKDLSRFGRDYIGVGSYLERFFPAYGVRFIAINDGYDSLTQSANDEFIMPIKNIFNAQYSKDISRKVKSSFRTLQGEGKFTGAFTSYGYIKDPDDRHKLIIDEPAAAIVMEIFNMYISGIGKQTIAKKLNERSIPCPSEYKKLMGQKYNNGNRLELTKYWTYSTINSILKNEMYIGNMVQNKSVRNTVRGKAKENSKDKWIKVENTHKPIINIEKWNAAQILLKRNTRQLDFNSNVGLFAGYVFCGDCGRAMSKIRQSNGQIMYICGSYKRYGADICTRHAIKLETLEQLVLDKLNEQLKYLENIELNKAEEDKRNDEFSIKKYDIMLNRIYKLKKSCYEDYKEGLLSRDDFIAYKTDYEKEEQLIRGQMAAAQTRQDDNDLNNEWIETLMKHKEIKKLDRETVVEILDKIIISETGDNLKVEIRFRFELK

SEQ ID NO: 771 - protein, 601 aa, unidentified
MKTNNVEIIKADSLVRRRGVKVERHLKRVAAYCRVSSDSEDQKNSYESQVRHYKDYISQRSDWELAGIYADEGISGTQVGKRQDFQRLINDCVNGEIDYIVTKAIARFARNTLDTLKYVRMLKDMQIGVYFEEENIDTLTMDGELLLTILSSVAQQEVENTSAHVKKGLKMKMQRGELIGFQGCLGYDYDVETKQLSINKKEAKIVRYIFERYLEGIGGKVIARELDELGYKSPRGLDHWNDTTVLGIIKNEKYKGDILMGKTFTVDPISKRRLSNFGEEDKYYIKDNHEPIISKEDFEKAQEIRLRRAGNKKTVANVNGKRERYSKMYAFSSMLECGFCGSILSRRSWHCRSDYRKVVWHCVTSIKKGKKFCKHSKGLEELAIEGAFMEAYRQLYHSNENLMTDLLETIESELNDNSLNKELKRITNKLRTLLKKEENLVNLRLEGKISDTIYNEKYNEISSEKEFLAEEKVNIETTLKSEIDVKKRLTEFKHLLSSQKMLTEFDRAVFESIVEKIIVGGVNSDGEIDPAMLTIIFKTGETQNKDGKQFKSKRKNAKLETDKLCPQNSDEDKKLYSQGTDYTRGVCCSACKSLETFERKG

SEQ ID NO: 772 - protein, 532 aa, unidentified
  source 1..532: note = Bacteriophage uvig_587893 from the Index of /pub/databases/metagenomics/genome_sets/gut_phage_database (ebi.ac.uk)
MNAVIYARYSSYNQTERSIEGQLEDCTEYADRNGLTIVGTYCDRAKSGTKAETRPEFLKMIKDSEKQKFQIVLVWKLDRFARNRYDSAMFRAKLKKNGVGLKSVTENISDEPDGIILQGVIEAMAEYYSANLSQNVKRGLRVARERGTFTGGRVMLGYQIIDKKPVPHPQEAKLVRSIFERIADGQTVRQIIDDFNARGLRTRSGQPFTRTSFQTLLKSPRVAGYEIIDGERSPSIYPAIVSEELFGAVQARLAVNAHLGGREKAKDRYLLQGKAFCGHCGAPMVGESGVGRRGTLYRYYTCATRKATHACKKKNVPKHELENLVVNSIVEKILSSDRIKSICAAVSDYFADNDAVAKIKELEAQLREVEDSIRKTADLMLANADLPALIKPLREKAVALSARAEDIKADLSATRAEAGSEITPESVHEWVCSFAKKDFTVPENRIALIETFLNSVYVFDDHLLIFCNSSKDTEQIPYADALKIPFSSPSESTAAPPGGSDSGCQTQPFPQIRTAFICFGCFGLFIPLHQDG

SEQ ID NO: 773 - protein, 611 aa, unidentified
  source 1..611: note = Bacteriophage uvig_195542 from the Index of /pub/databases/metagenomics/genome_sets/gut_phage_database (ebi.ac.uk)
MSTSNTDCDNRKYAIYARKSKFTAKGESINQQIDRCKLHLSSMNVAEEDIIIFEDEGYSGGNTDRPQFKEMMDMCEDNKIQCVICYKLDRISRSVSDFTNTFNNLEKHNIRFISVSDGLNGTNSPMDKAMIQLVAVFAELERNIIAERIIDNMTELAQKGRWLGGTTPTGYKSVETFGSTNKEGKVHYARKLEIVPEEMELVKRIYKLYLKTESLTAVQAILLNDNIKTKMGNEYTRFAIKVILSNPVYAKADNAVLKFFENKGSTIYAEGTEFDGTKGMMVYNKTKQEKNTSHKVKPYNEWIVAIGEHEGVIDGADWVSVQNILDKNKDKNYNRPRSHCALLSGLLRCKCGSIMYPRVAKTYNERGERNFAYACKMMLNSNRQRCNVKRINGNFLDDLVWEQIKVLTSDKSELAKQLKEAQGNFESDEQPVLKELEQMKKRLSDNKQKQKNLINFIANNGSKMSPEMSDDANEQYRKLENSNKEISSKIIKLEEVVAQSEQAFANFKDLATRLSEFSAALDTQTTFEDKRYAVRQVIEHAEWDGENVKLFFTGNRTVELQDIKDELANYKKAHRKWAKTSSDENATLGEDSERDTNALSLPEKVCQRYPL

SEQ ID NO: 774 - protein, 540 aa, unidentified
  source 1..540: note = Bacteriophage uvig_40909 from the Index of /pub/databases/metagenomics/genome_sets/gut_phage_database (ebi.ac.uk)
MRNYPPLSSAEEYCMYLRKSRVDIEAEAHGEGETLARHEKLLLEVARRDKLNVTQIYREVVSGETIASRPVMQHLLQEVEQGRWAGVLVVEVERLARGDTIDQGIMAQTFKYSGTKIVTPLKVYDPNNEYDEEYFEFGLFMSRREYKTINRRLQRGRLAAAKEGKWVSGVAPYGYEKIRVPNDKGWTLRPVEAEADIVRFIFRLYTSGEEGESGEVKKLGTYSLAVRLDRMGVTPPGGAPCWSSTTIQSILENPVYIGKIRWNVHKTKKRVIGSSVRVEHYTAPEEEQVFVEGLHPAIVDEAVFLAAQELISRKGPPPVQAANTVTNPLAGVLVCGKCGRSIVLRPNAYGGLLMCPNRACNNVGSKYDIVEERLLQALSQWLDDYRLEWSDRPPSEEQALMELKAKSIRKAQSEVETLQRQLERTHDLLEQGVYDTEMFLSRSRSITGRINAAQDSIASLTSELAEEEARSASRQNIVPKVEKLLEVYSALPSAQAKNDMLKGVLEKVEYTKLHRSGRNGPFDNFELLLYPKLPPSGLGE

SEQ ID NO: 775 - DNA, 1503 bp, unidentified
  source 1..1503: mol_type = unassigned DNA
atgagagctctggtggtgatcaggctgagcagagtgaccgatgccacaacctcccctgagagacagctggaatcttgccagcaactgtgcgcccagagaggatgggacgtggtcggagtggctgaggacctggatgtgtccggcgccgtggacccctttgacagaaagcggcggcccaacctggccagatggctggctttcgaggaacagcctttcgacgtgatcgtggcctacagagtggaccggctgacaagaagcatccggcacctgcagcagctggtgcactgggccgaagatcacaagaaactggtggtcagcgccacagaagcccacttcgataccaccacccctttcgctgctgttgtgattgccctgatgggcaccgtggcccagatggaactggaagccatcaaggaaagaaacagatctgccgctcatttcaacatcagagctggcaagtacagaggctccctgcctccatggggctacctgcccacccgggtggacggcgagtggagactggtccccgatcctgtgcagcgggaaagaatcctggaggtgtaccacagagtggtggacaaccacgagcctctgcacctggtggcccacgaccttaatagaaggggcgtgctgagccccaaggactacttcgcccagctgcagggaagagagccacagggcagagagtggagcgccacggccctgaagagaagcatgatcagcgaggccatgctgggctacgccacactgaatggaaagacagtgcgggacgacgatggcgcccctctggttagagccgagcccatcctgaccagagaacagctggaagctctcagagccgagctggtcaagacctctagagccaaacctgccgtgtcaacaccttctctgctgctgagagtgctgttctgtgccgtgtgcggcgagcccgcttataagttcgccggcggaggcagaaaacatcctagatacagatgcagaagcatgggatttcctaagcactgtggcaacggcacagtggccatggccgagtgggatgccttctgcgaggaacaagtgctggacctgctgggcgacgccgagcggctggagaaggtgtgggtggccggcagcgacagcgccgttgagctcgccgaggtgaacgccgagctggtggacctgaccagcctgatcggcagccctgcctacagagccggtagcccacagcgtgaagccctggacgcccggatcgccgccctggcagctaggcaggaggaactggaaggcctggaggccagacctagcggctgggagtggcgcgaaaccggccagcgatttggcgattggtggcgggaacaggacaccgccgccaagaacacctggctgagatctatgaacgtgcggctgaccttcgacgtgcggggcggcctgacaagaaccatcgacttcggagatctgcaggagtacgagcaacacctgcggttgggcagcgtggtcgagcggctgcacacaggcatgagcaag

SEQ ID NO: 776 - DNA, 1422 bp, unidentified
  source 1..1422: mol_type = unassigned DNA
atgaaatgcgtggcctacatcagagtgtctacagacgagcaggccaagcacggctacagcatcgccgctcagaaagagcgactggaggcctactgcgtgtcccaggagtgggacctcattgatacatttgtggatgatggctatagcgccaaggacctgaatagaccccacttcaaggaaatgatggaaagagtcaagaacgacgacatcgacgttctgctggtctaccggctggatagactcaccagatctgtgctggacctgtacgagatcctgaaaatcctggacacccacaactgcatgtttaaaagcgccaccgaggtgtacgacacaacaaacgccatgggcagactgttcattaccctggttgccgctatcgcccagtgggagcgcgagaataccgccgagagggtgaaactcggcatggaaaagaagacaaagctgggcaagtggaagggcggaatgccaccttacggctataagatcctgaacaaggagctggaagtgaaccaggacgaggagcctctgatcaagtacatcttccacctgagcaagaccctgggcttctacaccatcgccaaaaaacttacagaacagggcttcaccacccggaagggcggcgattggcatgtggacacagtgcgggacatcgcaaacaatcctatctacgccggctacctgaccttcaacgaccccaaggacagcaagaagcctcctagacagcagaccctgtatgacggacagcactccagaatcatccccagagaggaattctggtccctgcaggatctgctggataagcggagaaccttcggcggaaaacgggaaaccagcaactactacttcagcagcgtgctgcggtgcgccagatgcggcagcagcatgagcggccacaagggctctcagggagtgaagacctacagatgtagcggcaagaaggccggaaagaaatgtacaagccacatcatcaaggaggacaacctggtgctgaccgtgctgaacagcctggaagagatcaccaagcagatcatcggagatacaaaccagaacaacatctctcaacagaagatcaccgagctggaaaccgaactgaagctgatccagaaactgatgaaaaaacagaaggtgatgttcgagaacgacgtgatcagcatcaacgagctgatcgctaagacagagaacctgagacaccaggagaagcaactgtctgaggaaatctccaagtaccagaaggctaacaacaccaatacagaggaaatcaagttcatcatggaaaacatccacagcctgtggaacgatgccaatgacttcgagagaaagcaaatcatcagcaccatctttaatcagctggtgattgacaccgaagatgaatacaagcggggcaccggcgccagcagaaagatcatcatcgtgtctgccaag

SEQ ID NO: 777 - DNA, 1632 bp, unidentified
  source 1..1632: mol_type = unassigned DNA
atggaactgaaaaacatcgtcaacagctacaacatcaccaacatacttggatacctgcgcagaagcagacaggatatggaaagagagaaacgcaccggagaggacaccctgaccgagcagaaggaactgatgaacaagatcctgaccgccattgagatcccttacgagctgaagatggaaatcggcagcggcgagtctatcgagggcagacctgtgttcaaggagtgcctgaaggacctggaagaaggcaagtaccaggccatcgccgtgaaggaaatcaccagactgtccagaggctcttattccgacgccggccagatcgtgaacctgctgcaatctaagcggctgatcatcatcaccccttataaggtgtacgacccccggaaccccgttgacatgcggcaaattagattcgagctgtttatggccagagaggaattcgagatgaccagagaacggatgacaggcgccaaatacacctacgccgctcagggcaagtggatcagcggcctcgccccttacggctaccagctgaacaaaaagaccagcaagctggacccagtggaagatgaggcaaaggtggtggaactgatctttgatctgttcctcaacggcctgaacggcaaggattacagctacaatgccatcgccacacacctgacaaacctgcagatccctagccctgctgggaagaaaaaatggaaccggttcacagtgaaggccatcctggaaaatgaagcctacatcggcacagtgaaatacaaggtgcgggagaaagaaaaagacggcaagagaaccatccggcccgagaatgagcagatcatcgtccccgacgcccatacccctatcatcgacaaggatcagtttcaggaggctaataaaaaaatcgagaacaagatccctctgctgcctaaccggagcgattacaagctgaacgagctggccggcgtgtgcatctgcgctgactgcggcggacctctgagcaagtacgaagctaagcggaagcggcagaacaagaatggcaccgaatctctgtaccacgtgaaggtgctgaggtgtctgaacaacaagtgtatgaacgtgagatacaacgacgtggaagaggccattctggactacctgaagtatctgcaggccctgaatgataacgacctgactaagcacctgggaagcgtgatccagagccacgaaaacaagaacaacatcagatctaagaaacagatgaacgagcagttcgagcaaagagagaaggaactgaaaaacaagctgaatttcatcttcgacaagtacgaatccggcatctacagcgacgagatcttcctgcagagaaagagcgtgctggataaggaattgcaggagctgaagaaggccaaggacgagatcaacggactggtggacttcaagggcggtctcgacatcaaccagctgaaggaaaatatcaagaatgccatcgagctgtacgagagcagcgagaatagagaggagaaaaacaagcttctgagaatcatgctgcaaaaggtcattgtgaagatgaccgccaagagaaagggcccaatccccgcccagttcgagatcacaccaatcctgagatacaacttcctgatcggcgagacagtgtccagctacgagagc

SEQ ID NO: 778 - DNA, 1419 bp, unidentified
  source 1..1419: mol_type = unassigned DNA
atgaagtgcattgcctatgtaagggtgagtacagaggagcaggctaaacatgggtactctattgctgcccaaaccgagaaactcgaggcgtactgtgtctcccagtcatgggacctcgtggaaacagtagtcgatgatggctacagcgcaaaagatatggaccgcccatattttcagaagatgatcaaccggataaagcagggagggatagacgttctgctggtatacagactggatcgacttacgcgatcagtgcttgacctgtacaatattcttcaaatcttggatgaccacaactgtaagttcaaaagtgccactgaagtctatgataccaccaatgctatgggccggctttttatcacactggtcgcagctatcgcacagtgggagagagaaaatctggcggaaagggtgaagatgggcatagaaaagaaggtgaagcttggtaagtggaaaggcggcaccccaccgtatgggtataattatgagaacgaccttctcaccatcaacgaggatgaagagcctgtggtgaagaaaatttttaaacttgccaaacaactgggattctacactatcgccaagatgttgacagagttgggatatcctaccaaaaagggcggagactggcatgtcgacaccgttagggacattgctaataaccccgtttacgctgggtatgtgactaataacacgaaagaggagagcaaaaagccacccagggaacagaatctctacgaaggtatacaccctagaatcatcccccgcgaggacttttgggccctgcaggacgaactggataagcgccgaaccttcgggggcaaacgcgaaacatccaactattacttcagctctattcttaagtgcgccagatgtggatccagcatgtctggtcacaaaggaagcaacggaatcaagacttaccggtgctccggcaaaaaggccggtaagaagtgcacgtcccatatcatatccgagaagaatttgacccagaacatcctgacaagcctcgataggctgataaaggggagtattaaaagttctaatacttcactgcgcaacattagtgagctcgaaaaggagttgaagtccattcagcggttgatcgacaaacagaaaacaatgttcaagaaagacattatcgacatcgacgagctgatttctgaaacagatgctctgagagtccaggaaaagaagatcgcaaaagagctgaatgcctactaccagtcaaggaacagcaatcaagatgatctcaactacgtgatcgagaacattgacgccctctgggaggcggcagacgatcacgataaaaaggagctgatgacccggctttttaagcaaattgtggttgacactaaggatgaatataaacgggggactggcaaagccagagaaatcattatcgtgtctgcatcagctaag

SEQ ID NO: 779 - DNA, 1635 bp, unidentified
  source 1..1635: mol_type = unassigned DNA; note = Bacteriophage uvig_401611 from the Index of /pub/databases/metagenomics/genome_sets/gut_phage_database (ebi.ac.uk)
atgagcggcgctactaacaagatcaccgccctgtattgtcggctttctcaggaagacgccagactgggagagtctctgagcatcgagaaccaaaaggcaattttgcttgagtatgcgaaaaagaatcatttcccaaatcctgtattctttgtggatgacggctactccggcaccaattatgacaggcccggtttccaaagtatgctcacagaaattgaggcagggcatattggaattgtgattaccaaagacctgtctcggctgggccgcaattctgctctcaccgggctctacactaatttcacgttcccccagtacggagtccgctacattgcaatcaacgataattacgacacaatagatccgaattccgtcaacaacgacttcgccgggatcaaaaactggtttaatgagttttatgcgcgagatacaagcagaaaaattcgggccgtgcaaaaggctaagggtgagcgaggagtgcctctgacagtgaatgttccgtacggctacgtcaaagatcctgagaacccaaaacattggctcgtggatcctgaagcagccgctatcgttaaaagaattttttcaatgtgtatggagggtagaggccccacacaaattgccaaccagttgtgggttgataaggtgctcacgcctaccgcttataagctgagccatggcctttcaactaattccccagccccagaagacccctatcgctgggataagcgagctgttagctcaattttggaaagacttgagtacacgggatgcaccgtcaactttaagacttacaccaactccatatgggacaaaaagaggcacttgaacccagtagagaatcaggccatctttccagacactcacgaacggatcatcgacgatgacgtgttcgaaaaggtgcaggagatacgctctcagaggcaccgcatgacaaggacaggtaagagtagcatcttttccgggatggtgtactgcgcagattgcggttccaaaatgcaatacgggagcagtaaccaccgggatttcagtcaagactttttcgactgttccctgcacaaaaagaacggctctaagtgcaagggccattttatcagagttaaagtgctggaagggcgcgtcctgagtcatgtgcagagagtcactgactatatcctgtgtcacgaagattactttaggaaagtgatggaggagcagcttcgggtggagagcactgaaaagttgaccgtcctgaaaaagcagctggctcggaacgaaaaacgaatagcagacctcaagcgcctcttcatgaagatctatgaagacaacgtgaatggaaaactttcagatgacaggttcgatatgatgagccaatcatatgacgcagagcagaagcagctcgaggaagaggtactttcaatccagcaggagatcgaagtacaggagcagcagatcgagaatatagagaagttcgttcagaaggctcacaagtacgtgcacatagaagagctgaccccctatgccctgcgagagcttgtctccgccatctatgtggatgcccccgacaaaagttctggcaagagggtccagcatattcacattaagtacgatgggcttggatacattcctttggatgagctggaagcgaaagaaaaagcc

SEQ ID NO: 780 - DNA, 1554 bp, unidentified
  source 1..1554: mol_type = unassigned DNA; note = Bacteriophage uvig_576757 from the Index of /pub/databases/metagenomics/genome_sets/gut_phage_database (ebi.ac.uk)
atgaagatgaaagaactgattgatattctcgaggaccagggcttcagcattggcaatatacgcgaatctattttttacaaaaaagagaaagataagcatgtaagaatggggatctacggcagattgtctaaagctgacaaaaaagtcattatccggcagatgagagctctggaagacatagccctgtacgaattcaacatcccaatcgaggacattaagaagtacgttgacaatggattctctgggaccaacgataaacggcctaagtacctggaaatgctgcgagacctgaataagaacgacatcaacgtgattttcactactcacattgatcggttcggccgcgccgtggaacaagttatcaataatatctatcccagggggataaccgagcatctctatattgcatttgataacaaacttatcaacagtcccgataacatcggaaaggtaaaagagatcgccattgctgcagacaagtacgcagaggatttcggtaataagagtcgacgaggtatctattcccagatgaggaatggttcagtcatttccgccaaggagctgtacggatataagattgaatttgacgaggatgaaggcattcgaaggattgtaataggggatgagtacaaagtgtcagtgattaaggatatcttcgagatgtatctgacaggaaaaagtctgaatgatatcaagctgtacctggagcacaagaaaatcaagagtccttcaggcaacaagaaatggagcaaaggcactatagtctccatcctttccaatccactctatacaggccacttgtatcagcggagatacaagaaattgaattatacctactctggcgaaggaaataggatagtcaaacttccgaagaaagaatggattaatggaggacgctttaaggggattatcgacgagaaggtgtttaactgcatccagcagatgttggaggagaacaagtcctctagaagctcagggggcaaccgatatgcctttacgggcgtgctcaaatgtggggagtgtggaaaagctctcgtgtatcgcaaacagtccagaggttacaagtgttccagctctcaacaaaaaggcgatataaagtgcacaacacattttatcaaggaggacgaactgtacgagatcgttagcgagaaaattctcaacaagcttctccagaatagggactacattagggataaagtggaacagaagatcatcaacgacggtttgatgaagaataagatcgatcggaagaatcgcatcgtgaaagaaaaagaaaatgcgctcaacaaactggccgacatgtatctgaacatcgacgagatcaagtatggggaggaagtcgtgaagaaaatggaaaagaagattgagctcctcaatcgggacaaggaggttatcgacagcgagattaactatattaactcaaggatagggaacgaaaaggaggtgctctacaacatcgagaagtacataaagaaagagaattggatcatccggcttttcatcaagcgcattaccatatacgaggaaaacagaatcagcatagaatggcgatgc

SEQ ID NO: 781 - DNA, 1758 bp, unidentified
  source 1..1758: mol_type = unassigned DNA; note = Bacteriophage uvig_205537 from the Index of /pub/databases/metagenomics/genome_sets/gut_phage_database (ebi.ac.uk)
atggacaggaccactggtaaagtgctgaacaggaaacttagagtggccgcctacgctcgagtgtcaacaatgggcgcggagcagctgaacagctatgagtctcagaagaagtactattacgaaaagatcaacaataatcctgagtggcagtacgtcgacatctatgccgacgagggcatcagcgggaccactgattatcggagggcatccttcatgaaaatgattcaggatgctctgtcagggaaaatcgatctcatcttgacaaaaagtatttcaaggtttgggcgcaataccatggatgtgctgaaaaacgtccgcttgctgcgggacaataacgtggccgttttgtttgaggaaaacaatctcaatactctggacacaaaaacaagcgagatgctgcttaccaccctcagcgctgtggctcaacaggaaagcgaaaacatatcagagcatgtgaaactcgggttgcaaatgaagatgaacagaggcgagctgatagggtttaaccgctgttatggttatagaaatgagaatgacaagctcgagataatagacgaagaagccgaggtagtgaagtttatcttcgacaagtattgcgacggacatggagccaatggaattgctaagatgctcactgagcagggaattaagagtccaaagggtaataataagtggaatgattccactattagggggatcctcaggaacgagaagtacaaaggggacgtccttcagggcaaaacctacactgcagatcccctgtcccacaagaggtacaagaacttgggcgaagctgatcaattttacgtgagcgaacaccacgagcccattattagcccggagcggtttgacatggtgcaggaaatccttaaagagcgctgcggcgccagggcaaacgggaggagaattggcaacgttggacggaaattcgccttctcttcacggatccgctgcggcttttgcggcaactgttttaccagaagaacagtggtcggaaaggatcgggaaaagattccttcctggtcatgcacgagcttcgcaaagaatggtaaagaaaattgtacggactctaaaaccatccgagaggagatgatcaaggaagcattcgttgactcctataagcttctgagctccaacaccaacttcgaaactgacgagttcctgaacctgatgcaggatacgatgaacgagaacaacaagcaggacgagctggaacggtacaagaaagaattcagtaatatcaaaagtaagaagtccaagctgatcgacctgatggtcgaggataaaataagtgaaaatgactacaatgaaaaagtggagaagtacaacagaaagctggagatcttggagaataagatcgagcaattgaagcttcttgccgaggataagaaatctatttccgagggcctccaaaaagtgaaagaactgctcaattctaaagatatcatggaccagttcgatcaggagatcttcaacgcgattgtcgactatattatcgttggcggttacgatgagaacgggttgattgacccatatctgatacgattcatactcaaaagagaatttgatctgtccgtgcccaaggacgtatctgatgaagttgtcatccagaacaacaagattgatcttaactctaacaatgtactggtggactttatcaatacacggaaatattttagttacgagcgcgatgaaaatggaaaacttaataaggttcttcgaaatggactgcgaattcgcgtagaatgtgatattaca

SEQ ID NO: 782 - DNA, 1455 bp, unidentified
  source 1..1455: mol_type = unassigned DNA; note = Bacteriophage uvig_281475 from the Index of /pub/databases/metagenomics/genome_sets/gut_phage_database (ebi.ac.uk)
atgaatgccgtgatctacgcccggtatagttccgacaatcagagcgaagagtcaattcaggcgcagcttcgcgcatgtaacgagtacgccgagagaaatcggattaatatcgtccacgagtacattgacagagctcagagcgcccgatctgacaaaaggaccaacttccagaatatgattactgactcaaagaaacgaaccttcgaagcagtgattgtacataaactggaccgattttcccgggacaggtatgatcacgctatctatcgcaaaaaactcagagataatggtgttaagctgataagtgtgctggaaaacttggacgattcccccgaaagcgttgtcctggaatctgtgcttgaagggttctcagaatactactccaagaatcttgcccgagaaacccgcaagggactcaaggagatagctctgaaggcaaagttcactggaggctgcccacctttcggctttgacattgatgagaacaacaattacatcatcaacgagcgcgaggccgtggccgtacggaagattttcgatgcctgtctgaacaatactggctataaccaattgctcatcgagttcgacaagcagggtatcagaacaaagttcaacaagccatttgggaagagttccttcaatgccatacttaagaaccggaaatacattggtgattacatctattaccctgtcggaacctatcgggaaaaaaaatccgaaccgattatcatagagaacgctctgccccagattgttgaatctgaaattttttgggaggtgcagaagaagatgaaagagaggaagcacagtggaagagtgaaagcgatcgaaccttatctgctcagcggagtcttggtgtgtggcgaatgcggggagacaatgagcgggcatagacattctaaaaatggcaaccactattatgactacgaatgttctaggaatgcaagaactaagcaatgctccaacaggacctttagccgcgataagcttgaaaaactggtgtgcgactacatcagggagctgctgagtgatgaggctatcaacgagatcaggaagtttctgctcgacaatgctaaactgattaatgacaacaacgacgagtccattacacttatcaagcgggagatcaactctctcgagagaaagataaactcagtgatcgatctgctgattgaaaacccctcagataaactcaaagagcgcttgaagacccttgaggctcagcaaaaagaggcagaattggagctgaaaaagttgaagaatagcgccataacggaggagaaactggatcactacatagtgaaaatcaaggactttgatgatcttagcagggaacagaagcagctctttatcaaacgccttatcgagaaagtcacaatctacaagaatggcaatttcaagatcgcgactacgtatgggaaagtagctgcagccgttggcggtgcaacacaaatt

SEQ ID NO: 783 - DNA, 1443 bp, unidentified
  source 1..1443: mol_type = unassigned DNA; note = Bacteriophage uvig_22285 from the Index of /pub/databases/metagenomics/genome_sets/gut_phage_database (ebi.ac.uk)
atggggctgaaaatcggagcagcctacatcagagtgtcagatgaacgacaggatgagtactcaccggactcccagctgaaactgataaggaagtacgcgaagaataacgactatatcatcccagacgagtacatattttacgacgatggtatatctgccaagagtacaaaaaaacgggctgaattcaatcgcatgatcgctttggcaaagagtgacgataagccatttgagtccatttttgtgtggaagttctctcggtttgctcgaaaccaggaagagagtattgtttataagtccctgctcaaaaagaagggcgtgtccgtgatctctatcagcgagccaatcgtcgacgacgtttttgggagcttgattgaacgaattatcgaatggatggatgagtattacttgattcggctgtcaggcgaagtaaaaagaggtatgaccgagaaagcaagcaggggcgagcctatgtgtcaccccgccttgggatacgacctcattaataatcagtacgtgcccaatgccgagagcgtttatatccgccgaattttcgaatcttacctgaatggaatgggggaacgcgagatagcaagaaatctcgctctgcagggcatgagaacacaccggggtaatcctcccgataacagacttattgactacatattgcataatcctgtgtacattgggaagattagatggtcaacaaacggccgcgccgcaagcacgcgcgactatgacaacgagaatatcatgatcgtcgacgggacacacgagccactcatcgacttggatacctggaatgaagtgcaagagcttttgatggaaaacaagcacaagtataaacgctatcagaggcgggaacagcccgtacagttcatgctgaaaggactggttcggtgcgaccactgcggtgccactcttgtgatgcagtccacgaagtgtccgtctatccaatgtcataattatgccaggggctcctgcggcgtctcacattccctgagcattaataaggccaacaaggctgtaattgaggcgctcgaggccgccgtcaacactctccaattcactatcgaacccgctgctgttaaaagtgagtctcctggattggacttcgataaactcatttcctcagagcggaacaagcttaaaaagatcaaagaggcgtatctgagcggggtggacactctggaagagtatcaacaatctaaggccgagattcaggagaccatcgataggctggaaaacgaacagaaggccagccaggaaaaagcagattgcaacaaggtgtccaaaaaggagttctctaagagggtgataaacgtccttgatttcatcaaaagtccagatgtcagcgagcaggctaaaaacgaggcactgagaaccatcatcagtaagattatctacgtgaaacctgaaaacaggttggatataattttttacacc

SEQ ID NO: 784 - DNA, 2118 bp, unidentified
  source 1..2118: mol_type = unassigned DNA; note = Bacteriophage uvig_274113 from the Index of /pub/databases/metagenomics/genome_sets/gut_phage_database (ebi.ac.uk)
atgagtaggtcatctaaaataacagccttgtatgagcgcctgtccagagacgacgatttgaatggggaatccaacagcatcacaaaccagaagcaatatcttgaggactacgctcgaagaaacggcttcactaacatccggcattttactgatgacggattctccggcgtgaatttcaatcgaccctccttccaagaactgatcaaggaagtggaggcaggcaacgtcgctacgattatcgtaaaggatatgtctcgccttgggcggaactatctgcaggtcggcttttacaccgaggtgcttttccagcaaaaagatgtacggtttctggccatcaataactctatcgacagtaataatgccagcgataatgacttcgcgccattcctgaacataatgaacgaatggtacgctaaagatacctccaacaagattaaggccgtgttcgatgctaggatgaaggatgggaagaggtgtagcggatccattccgtatggctataacaggttggctaccgataagcagacacttgtggtcgatcctgtggcctcagctgtggttaaacgcatctttctgctggccaatgagggaaaaagtcctagagccattgctgagctgcttacggaagaaaaggtgcttattcctgcagcacatgccaaggagtatcaccctgagcagtacaatggcaccaagtttagcgatccctacctctggggcatgtcaaccattcgagctatactctctcgacaagaatacctcggtcataccgtcctgcgaaagtcagtctcaaccaactttaagctccataagcgaaaaaacaccgacgaggacgagcagtacgttttttacaatacccatgaacccattattagccaggagctctgggacagcgttcagaaacgcaagaagagggcgaatcggactgcagccagagggacccactccaatagacttagtggctatctgtactgtgctgactgcggcaggaggatgactcttcagactcactactccaaaaaggataggtctgtccagtactcatacaggtgcggaggatacgcctctaaggtaaacagttgcagcgcccacagcatctccgctgataatgtggaggcgctgatactgtcagcagtgaaacggctgtctagattcgtcctgaatgacgaggaagcttttgcaaaagagctgcaggcactgtggaacgagaagcagacagaaaaaccaaaacacaacaagagtgagcttcaccgcttccagaaacggtacgacgagctctctaaactgattagaggtctttacgaaaatttggttagtggactgttgccagagcgccaatataagcaactgatgaaacagtacgacgacgagcaagccgagcttgagacaaagatcgaagaaatggaaaaggaactcacggaggaaaaggtcaacgccgtagatatcaagcactttatcagcttgatccggaagtgcaaggaacctacagagattagcgacctgatgtttgcagagttgatcgataaaatcgtggtctatgaggccgagggcgtggggaaggcacgcacacagaaagtggacatctatttcaactacgttggacaggttgacatcgcctatacggaggaggaactcgcagagataaaggctcaggaggagcaggaagagaaaaagcgcatggataagcagcgggagcgagagaaagcgtatcgggaaaaacgcaaggccaaaaaaatagccgaaaatgggggtgagattgtgaaaacaaaagtgtgtccacattgccagaaagaatttgtgccgactagcaatagacagatcttctgctcacgggactgttgttatcaggcaaggcaggacagaaagaaggccgacagggaagcggaaaaagggaatcattattacagacaaagagtgtgcgctgtttgtggttctacctattggcccactcacagccagcagaagctttgctctgaggagtgccagaagcagaaccacaacgaaaagagtctcgaattctaccacaaaaagcaaaaggaaaaatccgagtgtaacgatctcctgcaaacaaaagagctcgtatccagcaccaattcctccgaaattattactatccccgcc

SEQ ID NO: 785 - DNA, 1740 bp, unidentified
  source 1..1740: mol_type = unassigned DNA; note = Bacteriophage uvig_176095 from the Index of /pub/databases/metagenomics/genome_sets/gut_phage_database (ebi.ac.uk)
atgaaaaaggccgctatctatttgagagtgtctaccagtgatcaaaactacgaccggcaggaaattgaactgcgccagctggcctccgcactggggtacgaggtgaagtacgttttcgaagagaagaagagtgccgtcctgaaaatggataccagagagcagctctctgagatgcggaagctcactaacaaggatgttgatagaatctttatctgggacataacccgattgtccaggagggctattgactttatctcactcattaacgaattcgcagacaagggaatctgcctgcactttaaggacaaaaacatcatcacactcgaggaggacggatctctgaacgttttgaccggcatgtatctgtatctcttgggggtttttgctcaaatggatgctgaaaatctgaaggccaaaatgaaaagtggcaaggaggctgccctcttgaagggtaatagctataccaataatccacctttcggctacgaactgagaaacaagcatctgtatattaacgaagatgaggccaagtatgtcaagatggcatacgagctgtaccgcgagggtaaagatacacaatacattgcagatatgttcaacgccaacaatgtgcccttgaaaagcggtaaaaaggatataatatgggtcaaaggcacaatttcacagatactcaacaataccgcgtattacgggaaaggaaagcggtcaaccacaattaagaaagcgactgccaatatccctgctgaggtaaaagtaagctatttcgacaccccggctattatatctaaggagttgttcgaggaatgccgcaaaattgccatggctaatatttgcaaacaggacaagagtcggaacctgatctgtcttctgaggggccttctgaagtgcgggcgctgtggcaagttctatgtgctgggaaataataacaagcagcgggaatatcgagatggagacattagagccaatgtcaataatagggtgggatgtaagaatggcagcatcaaggccatgattgcggacgaacttgtgtggaaagcaatccagaacatctacaagtacaagaaattcaaagagaagtgcattgccgaaaaggagaaatataggctcgaaatcgcaaataatgacaacagcatcactaacatggaaaaagagctcaaacaactctcaatccagtccgagaaccttgtaaagttcgccatcaaaggccttctgtccgaggaagagtttgcaaaacagaaactttatctggagtcagaaaaagtccgcaagaacaacattcttgaagaacttagggctactaatttgatcctgcaacgaaagattaacgccgagttcgattacaacatcctgaatgaaggggtgagcttgtctctcgaagagaaaaaacagatatgtaatgacctgatcgaggacgtgtttatctacgggtacggtgcatacaagaagctccttcaggtgaacctgaagatggacatcacatacaatatcctgattaatacgcagcactccatatcttcctactgtatctttgatgacgaggtcgcgacgttctctaaccccttcaagagcgatacactgattaaagacatgaacctcgatatcaaaattccagattttgacgtgactagcgacaacaattccctcttttccgaggaggtgtttggcgtttatagttttgatgatatgtggaacataatgaagaagtacgggtatattaaaaagatagacggcgacagcaat

SEQ ID NO: 786 - DNA, 1575 bp, unidentified
  source 1..1575: mol_type = unassigned DNA; note = Bacteriophage ivig_2328 from the Index of /pub/databases/metagenomics/genome_sets/gut_phage_database (ebi.ac.uk)
atgaaaaggataggtatctatggcagaaagtcagtgttcagcgataaaagtgaaagcatcgagcaccagttcaccttggggaaggaatacgcctacgctaattacgataatccagagattatctactacaaggacgagggagaatccggctcctatctggagcgccctgatttccagatcttgctgaatgacgttatcaacgataacttggacatagtgatatgctataaactggaccgcatcagccgagatgtggcagactttggcgcggtgtataaactctttatggcacataacaccgagataatccccctgagggacaatattgttattaatgagaacatgagccctattgagaaggctatgatgtacatcaacactgtgttcagtcaagtggagcgcgaaaacaccatcattagggtgaccgacaatatgatagaactggccaaggatggttactggacaggagggagggccccactcggcttttccagtaaagaaattattgtaggtggaaaaaagcaccacattctcagccacaaccctacagagatcgagttctacaccatggtcgctgacacttttctgaacggcttcacccttagcggcctcgaaacttacttcagaaaaaataatgtgaagacgctgagaaacgcctatttgtcttctacccagatctggactatactgaagtcaccgtttgccgcacccgctgacgaagcgacgtatgactatttcagctctttgggctgtaaaatggtacatgatcggagcaagtatgatgggtcacacggtctcctggtctatggtagaacatccggcggacggaaaaggaagcacgtgaccaatccacccgataagtggctggtttctatcggattgcatacaccgattataactagcgacaagtggctgagtattcagaaatgcttcggaaacaacacattttgtaagacccgcaagtataaggttgggattttgaatgacatcctgcggtgtagttgtgggtcatacatgaaggtcaagcacaagtacgataaacagtacaacgtgcattactaccattatcgctgccttcaacgggaaaggcggggatctgaatattgcgcttcacaaatgatttcagtcgagactctcgataacgaagtcatcgagatcctgaagggcattaaacttgataaaaccctgatagacaattacacaactcccgcctccttctttccactgtttcgaaagcctgagacaatcaaccgagagattgaaaacgaggggaaaaaaattcagaacttgaccatgtccctcgccgaagcctctggctccagtgcggctaagtacatcattaaggacatcgagtcccacgataagagaatcgacgaacttaaagaagagctgaagaaatctagattggcaatgcagaatgtgaaggagctccagatcaataaggaggacaagtacaatgcagtctgtaaaattgtagattgcatcgagacggccacatatgacgaaatcaatgccttgctcaaagagacacttactgagtgcgtttatgatggggaggtgctgcatatcaaactt

SEQ ID NO: 787 - DNA, 1911 bp, unidentified
  source 1..1911: mol_type = unassigned DNA; note = Bacteriophage uvig_594158 from the Index of /pub/databases/metagenomics/genome_sets/gut_phage_database (ebi.ac.uk)
atgataaaagaggtcatctatctgggaatcaatgttggatacgccaggctttcaagagacgacggggacgacgagagctcttcaatcttcaaccagaagcggattataatcgagtttgccaaacagcacgggatccatattgacaagttctacattgacgacggggtgagtggatataccatggatcgccccgatttcgatagactcaagattgctctgaacaatgatgaagtggacatcattatcgtgaagaacttgtccaggctcggacgaaggaattctatggtacagctgtttctggaaaatatagaagagagcggcaaacgagtgattgccatcgatgataactacgatacatggaacgaaagctctcatgagacagtcggcatcacaacctggataaacgagcggtacgtgaaggacactagcaaaaatgtccgccgcgctatcgatattatgcagaaagaaggtagatatgtgtctaacgtgccctatggctacgaactcgatctgtttaacaagggttcctatcatattgacgaaacatgtgcgatgtacgtgaaagagatatttgacctgtatttgtctggttacggcgttctgtatatcgcccggctttttaccgagcgaggcgtgcctaactccaccatgattactaagcagaggatggagcgccgcgggcagacatacaaagggaagatctcctacaagtgggcaccgaatgtgattttgaatatgctgaggaacgacttttacattggcactcttacactcggaaaaaccaaacgacgaacaattaatggcaaaagaatcttccaaccagaggagaatcttatcaggtttgaaaatgcacacgagcccattatagacaagcaaactttcaaactcgtacaagaaatgattatcgagcggtccagggataattatcgggggcaaaaagatagaaaacgcccaaatattttcgcaggaaaactgtattgttccacgtgcggtgttaagatgacttctgggggcggaacaagaaacagctcaaacaccaagtatatctgcaagacctacaacatctatggtaaaactcactgcaccagccatatagtctcagaaaacgagcttaaagatacattggtttactttctggagcactgtcgggaaaatctctctgaggccattattgatctggacaaaatcatcaagcgcgactgtagcaaaaaaaccggcgacgtgatcgaagatctcgagaaaaatctcgccaaggcagaaaatgaggtgaaggctcttttggaacagaaaatcaaggatatgattgctaaccctagcatgtcagatatcatcgataagacttactccaacatggtgaacgaaaagtacaacgaaatcaagattcttacaacgcaggtagacgataaacggaaagagatccttagtggcaacgaaatcaggaaggacctgaacaacgccctggagatattcgataacataatcagtaccaagaatatcacgaagaagcagatagcaaccatagtcgaccacatcgttgtccatgaggacggcggcgttgacattttcctgaaaggcgacctgcatgaactgtgtactaactatattatgtgcaagaagaccaataagaccctggtagttgacgcgacgattaagtatatcaagaaaaaccctgagcaggtcatgatcagtaaggccggtgactatgtgagactctgcgggcaccacatcagtcggactaattacgagaagatattcaagaacttcatcgaaaaggggtacctggtcgagaatgagggataccacaacggatacagagtggtggatctgaacaagttgattcacgatgctgagaataatatcattattgatgacgctccacgcgtgcataataacaatgtcaatattgccctc

SEQ ID NO: 788 - DNA, 1557 bp, unidentified
  source 1..1557: mol_type = unassigned DNA; note = Bacteriophage uvig_181433 from the Index of /pub/databases/metagenomics/genome_sets/gut_phage_database (ebi.ac.uk)
atgaaaagggtctactgtttgtatagagttagtaccgtgggtcaagtggaccacgatgacatccccctccaacggatctcttgtcgacagtatgctcaacagaaaggatggacgatactgcgcgagctctacgaatgcggagtgagcggttataaggtgtcaagcgaggcgcgagatgccatccaggaactcaaagacgaagctttgctgcaaaggttcgacattctgcttgtattcatgttcgatagactgggcagaagagatgacgagacgccctttgtcgtagagtggtttgttaagcacgggatcgctgtttggtccgtgaacgagggcgaacagcggtttgatactcatgttgacaaactcatgaactacatacgatattggcaggcatctggagaatctgagaagactagcattagggtcagactgcggcaagagcagatgattcaggacgggcatttccgcgggggcatgattccctacggctataggctggagtatacaggcagggctaataagaaaaatcagccagtgcacgatctggtcatcgacccttttacaagtgagaatgtcaagctgattttttctctggtgtccagccaaggatacggggccaacaggatagccatgtatttgaacgagagaaatattttgcccaggaccgccaacgcgcactggcacgcgagctctatccgcgctatcctgcgcaaccctatctacataggtatcatgcgcatgggcgcttgctgttcagaacgatcattcgcacagtacagaattatctccgacgagcagtacgaagcagttcagaagattatgttggaaaggagcctttcccacactctgacccgctcaatcccttaccggaccgataacgcctacttgctcaccggacttctgcggtgtggatcatgtgggtcccgcctctgcggcgcgacaatgtcctccaaaggcgcaagcactcagtgccatcgacgatactatagatgttacaccagtagtgtacatcggggagtgtgcaatggtcagcgctgctacgccgcaaatcgcatcgaaaggatggtagagcagcgcgtcgtggacgttcttaacgagatcctcagcactccagtgggggttctggccgagcaaatggatgccctggcctattgcgacgaccagagcgccctgcaagctgcccagttcgagattacagcaatcgagagagaggtagagaaacttgaacagcagctggtgaagagtgtgataaagaatgatagaacattgaccgatgctattaatgatgccgtcgtgaaaaagaggcaggcatatattgaagccgagcgggagtataggaaactcgccgacgcaattgctcagtctgccgagcggcgggaaaacatgatgcttgaaatccggaacattaggtcctgggctgtgaattacaagctgctcaagccggaagagaagagaatgatattgccacagatgatcgagagaatcgtggtgttgaaggggtacggcgtggaaatcgtgtttcggtctgtcattaaagaactttgccagatgaaggtc

SEQ ID NO: 789 - DNA, 1596 bp, unidentified
  source 1..1596: mol_type = unassigned DNA; note = Bacteriophage uvig_154782 from the Index of /pub/databases/metagenomics/genome_sets/gut_phage_database (ebi.ac.uk)
atgaagggagttatctatgccaggtactcctccgacaagcagactgaacaatcaatcgaagggcagattagagagtgcaccaagttcgcggaggagaacagaatcgaaataatcaaaatctacaccgacagggccttgtccgggaaaacggcagaccgagaagaattccagcaaatgatttctgacagtgccgatggcgagttcgaggccatcgtcgtgtataaactggatcggtttgctcggaacaggtatgattccgctatctacaaaagcaggctgaaaagtaacggggtgaaagtgctctctgccaaagaaaacattaccgactctcctgagggagtcatcctcgagagtctcctggagggcatggcggagtattacagcctcgatctggcacagaaaaccagccgcggtatgatggagaacgcactgaagtgtcggcacactggcgggcggcccctgttgggatacaagctgaatcctgataagacttattgcattgatgagaccacagctcccattgtgagaaaaatctttgagatgtacgcccagggatcatcctataaccagataattgacgcactcaataagaccggagctaagactggtagcggcaagacctttgggaaaaattcaatacacgacctcttgaaaaatgagcgctattctggcgtgtacatctacaatcgcatccccagagattccactgggaaacgcaattcccatggaacgaaagaagatggcatgatcaggatcgaaggcggcatgccagcaattatagatcgcgagctttgggaagaggtccaaaaaaagatggagggaaataagaaaagccccgcacgcaataaggccaaaatcgactatctcctttctggtaagctgttttgtggccattgcggctccgctatggtaggtcaatcttcaacaaccagaggtgttgtgtatccttattacgtctgtaatcacaaggttcgactccggacatgtgacaaaaagaatgtgaaaaaggatgacattgaagatctggttattgatgaaacagttcaccgggttctcgcagacgaagccatcgacaatattgctgatcaggtggccgccctttcctttcaagaaggcatggatacaagcagaatggaccacctgaagtctcagctgaagagcaccgaggagattattataaacatttgcaacgctatagctcagggggtgctgacacctagtacgaagaaaatgcttgaggaagcggaagagaagaaggaacatttgtcactggaactggagcaagagaaagtgatccagaagaacgtcattaccaaagagcaggtattgttctggctcagtcagtttcagaacggggacacaaatgacccagagtacaggaagaagttggtggacgtgttcatcaacaagattttcgtctacgacgataagttcgtaataacttacaattttagcggcgacaacaacactgtggagctctctgatgtgaacatcgccctttcagacctgagccagagtggaccaccggccccgcagaaaccaaagatcttcgtcgtaaagaacatttttgggatcgtgaagcgattcatcgaacga

SEQ ID NO: 790 - DNA, 1623 bp, unidentified
  source 1..1623: mol_type = unassigned DNA; note = Bacteriophage uvig_569447 from the Index of /pub/databases/metagenomics/genome_sets/gut_phage_database (ebi.ac.uk)
atggaaaaggacaaaaaggtgacagctctgtattgccgactgtcaaaagacgacggtagcaattctgaatcactgagcattagaactcagaagtctatgctgatggaatacgctaccagaaatgggtttggcaattgtcagtactacgtggacgatggatattccgggactaattccgatcgccctgccttccaggagctgctggatgatatacgcgaagggaaagttgccacggtaatcactaaggaccaaagccggcttggccggaaccatatcgaaacaggtacctacatggaaatcttctttcctgaacacggagttcgctacattgctattaacgacgggtatgattccaacgagcaaagtcagatggatattgctccattccgaaacataatcaacgagatgtacgcaaaggataccagcaggaagatcaaaagtgctcttaggacccggaaaaagtctggaaagtatatctcttccggggcccccttcggctaccagaaagatcccgctgaccataatcatctggtgattgatccaaacaccgcccccgtcgtcgaatacatctactctatggcggaagagggtctcggcctgcatcgcatcgcaaaaaggttgcatgacgagaaggtcctgaaaccttgctattataagaaggagatgtttggccgcttcatcgatgacgagaagatgtacgattgggacagcgcctatattagccaagtactccactccccagtttacgcgggacacattatctatgaggcaaaacctaccgtgtccatgaaatcaaaaaagcgaagatacatcccatttgaagagagagccatcgtgcccaacactcacgaggctataattccgcaggatagatgggaaaatgtgcagagaatcctctactcacggagctcctctttcatgtgtgacaaaacagactacgacaacattttcaagggcattgtccggtgtgccgactgcggcaggactatgttggtgaaggttgagcaccgcaggaagcgaaactctgtcttggatcagacattttactgctgttcaacataccggaagtatggagcaaaggcctgtgactcacacaatctcgaagccagagtgctgcatgaggcagtgttcgcagatattcaggcccatgcgaaagcggccgtctccaaccgcgaggcacttgtgaaaaagattgctaatcaaatgcacctccgggtaagcagtgacagggcccagcacaaacgggacctgaagcaatgcaaggccagaatagcagaaattgaggacctttatgctaaactctatgaggacgtgagtaaaggacttttgcccgagaaaagatttcaaatgctcgctgataggtatgacaaagaacaggccgagttgaccgagaaaatagaacagtatgaaagggagggcagggccgagcacgatcagttggacaagatccaggattttatcgatgaggtgagcaagtatgccggcatcacggagctgaattacaagattctgcaccagctgatagataagatattggtcagtcgcgctgagaaggtggacggtgagtacgttcagaagatccagatcttttatcgattcatcgggccgttggacgcaattgaa

SEQ ID NO: 791 - DNA, 1698 bp, unidentified
  source 1..1698: mol_type = unassigned DNA; note = Bacteriophage uvig_187460 from the Index of /pub/databases/metagenomics/genome_sets/gut_phage_database (ebi.ac.uk)
atggccaggaaatccaggaaagtagattacgtcaacgtgggaaacaaggagaacctggtgacagaagctgaaaaccaatgcgaaaaggtgagccatgcagccctgtatgctaggcttagttatgaatccgagaaaaaccgggagagaaacacaattgagactcaaatggtgttgctccacaacttcgtgaaagaacaaaaggacattgtcgtcgcaaaggagtattacgatatatctaagaccgggactaattttgagcgcgacggctttaatgagatgatgcaggacattaaagagggcaatattgattgtgtgatcgtcaaagatctttcacggctcgggcggaattacgttgaggccggctcatacatcgagcgggtatttcccttttttaacgtgcgcttcatcagtgtgaacgaccactacgatagcttcagagatgacatcagcctgctgatttctatgagtaacgtgtataatgagttttacagccgagacttggccaaaaagattcgctcctcttaccgaacaagttgggccaacggcgaatttccgagcggccaaatggcttatggttatgagaaggataaggataacccccatcagcttatccccgacccagtggccgcacctgtggtcaaaaaaatcttccaatatttcatcgatggcatgacgtacgcggagattgcgcgcaagctcaacgctgatggatacctgtgtccaaaggcatacaaactggataaggctggcaaggccaatgagaagtccgctacatggacatggtccggtggaaccgtccataaaattctcgaaaatcagtactatgccggggacagcgtgcacaatcagttcacaaatgactcttgggcagcccagaggcagaagatgaaccaaaaggaggagtggataatcattaagaatacacacgaggccctggtttcacgaaaagattttgacgaggttcaggagaaaatcggtcacatcgtcaagagagtgaatgaagctcggaagtcaaatggcaacaacgtaagggacttcaactttttcaaacagaagatagtctgcgccgactgcggcaagaccatgtacctgtatgggaaaaccaaaggaaaccacaggagattttactgtggaaataataagcttcatgggaagtgtactcctcactccataaccgacctggaagttaatgactacgtgttgagagttattcgggctcatatcaacgtgtatgtggagaacgtagaccttatacgacgacttaatcagcggcaggagtctatcaagaagtacgatgtgttcaacagggaaattaagaaatgcaggaaggaattggaaaaggttgcagtacatagagaacgactgttcgaggactatgtttgcagaatcattgacgcagagcagtacgagaccttttcaaagcaggatgccgagacggaaaaagagatccagaataacatggagatcctgttgaagcaccaggtggggtatgaaaaaaatttccacaccgaggaagaatgggaaacgctcatcaataagtatcgcaacacccgcactctgactaaagagatggtcaatgccttcgttgaaaaaatagaaatccatgagagcggatctattactgtccgcctcgtgtacgacgatatgctggaagagctcagaaaatatgcgaaagaacgggaagctgagctttgtcag

SEQ ID NO: 792 - DNA, 1599 bp, unidentified
  source 1..1599: mol_type = unassigned DNA; note = Bacteriophage uvig_166991 from the Index of /pub/databases/metagenomics/genome_sets/gut_phage_database (ebi.ac.uk)
atggaatactacatctatctgagaaagtcccggaaggatagggaggcggaaatgcaaggagaaggcgagactctcgcacgacatcagaaaactctgctggacctggcctccaagatgcacctgaacattacccgcatatacaaggaggtggtatctggggaaacaatagcttcaaggcctgaaatgcagcgcttgcttcatgacattgaagacggaaactgtgcaggtgtcctcgttatggaggtggagagactggcgcgcggcgataccaaggatcaaggcgtcgttgctgaggctttcaagtattctgggactaagatcatcactccgataaaaacgtatgaccccgccgatgagtacgacgaagaatactttgagttcggcctttttatgtccaggcgagagtataagacaatcaaccgccgaatccagaggggacggataacctcagccaaagaggggaaattcatcagtagcactgcaccttatggataccggaaagtcaagattaaaaacgggaagggttacaccttggagatagttcctgaccaggccaatgtcgtcagaatgatctacgattggtatacaaagggagtgacaaatgagaacgggatttgccaaccaattggggctacctccatttgtaggaaattggacatgatgcacattcaacccatggtgaatgcaacctggagtaaggcctctgtgtctgatattcttaagaaccctgtgtacaccggcaaaatccgctggtcatatagaaaggaagtgaaaaagataaaggatggaaaggtggtaaaaactcggccagacaaccacgacgactacattctggtggacggtcttcatcagtccatcatttctgaggagaccttcaccgcagcccagcgcatgagtgccaaaaatagaaaaatgccactgaaaaataatacgcaactccagaatccactttccggcgtgatcaggtgtagcatctgcggctgtacgatgactcggttgggccccacatctcacaccccctacgcgacacttaagtgtagcaaccggtactgcaaaaacataagcagcccattgtatctggttgaacagaaactgctgatctttctggaagattggcttaagaattatagcctggattggtcaaattgccgaagtccttttgccaccgacgccgagattaagatgaaagaacacgccattaacagcgttgctgagtccctgaacacacttcaggagcagctgaacaatacctacacgtttttggaaaaaggcatctacacaaccgagatttttctcgagaggaataagctgctgactgaacagatcaatagcacaaagtgcaacctcgatcagctcaatcaggagtataacgatatcctcctgctccaaaagtcacagaatgagttcatgccccgagtccagaacattatcgacacctattgggacgtgaagaatatgaaaactcggaacgacatgctcaaggaaatcctcgaaaaagtagagtacacaaaggataagcccaacactcgaggtaaaagagaggtggctaatttcacactggatatctatcctaaaatcccaagaaagttgccgatgagt

SEQ ID NO: 793 - DNA, 1329 bp, unidentified
  source 1..1329: mol_type = unassigned DNA; note = Bacteriophage uvig_169676 from the Index of /pub/databases/metagenomics/genome_sets/gut_phage_database (ebi.ac.uk)
atgtctcacaccaaaggagtgaattatatggagcgggtagtaaaaagggtggggaccctcatccctgcacagcctaaggctcttttggtctgtgcatacgcgcgcgtgagcacaggcaaagatgctatgctgcactccttgtcagcacaggtgagctattacagcaagatgatccaggaccactgcggttgggtgtactgcggtgtatataccgacgaagcagttaccgggacgaaagaggagagagctggcttccagagaatgatccaggagtgtaggcaggggcatattgacctggtgataactaagagtatctctcgatttgcccggaacactgttatgctgttggaaacggtgcgggaacttaagagtctcggagttgatgtgttttttgaagaacagaacatccatacaatgtctgccgacggggagctcatgctgactatcctggcctcatatgcccaggaggagagcctcagcgcttctgagaaccagaaatggcgcattaggaaggccttcgaaaacggcgaacttgctaatctgcgcttcctgttcggatataacattacagccgatggcgtccaggtgaatgagaaggacgcagccatcgtgagggaaatttttgcccgattcaacgaaggggaatccatgcgatcaattggtcgggacctggacgcaagaggataccggggcgttcttggaggcacatggtgtgccgagcgcatgaggaataccctgtccaatgagaagtaccttggaaatgctttgctccaaaaacagtaccggaataatcatattgagaagaagctccttccaaacagaggcgagctgcccatgtactacgcagagggcactcatgaaccaatcatcgaccaggctacattcgacaaggcccaaaagcggttgaaaatgttggcccagcaaacagcaaatagaaaaaagcccacccattccgcttttacgggcctgatacactgcgggttgtgcgggaatacctataagcgggtgacctaccgcaagaaacactattggaactgtaccaccttccagaccaagggtaagagtgaatgtgcggccaaacgaatacccgaggagacacttgatgctctgacttgcgaagtcctcagagtcgcccacctggaccctgatactgtcagatccaaaatcacagctattagggccgagaacaacaacgtcgtggttttttgcatggatgatggatctgagatagtcgagcgctgggcggatcgatcaagggccgagagttggactccggaaatgaaagaacaagcaaggcagcgagccctgcaagcgagacgcagcaaaaag

SEQ ID NO: 794 - DNA, 1431 bp, unidentified
  source 1..1431: mol_type = unassigned DNA; note = Bacteriophage uvig_284816 from the Index of /pub/databases/metagenomics/genome_sets/gut_phage_database (ebi.ac.uk)
atgagcaatagcagcagttttcctgctaaaatatccgccatctattgtcgggagtcaaccgaaaaacagaatatacagtccctgatcgacatgtgcaagaaagcggccaagaagatcaatctgcaaaatatcaaggtatactacgatgtggccagcggatacaacaaggaccgcgagcagtatagcaaactcaaggaggacattcagaacaatttggtggatacccttgtgctgtatgagtcctcaagactgactcgcgatgaactggaacatcacatcttttatgggctccttagagtccataacgtgaaggtatacaccgttacacacggctggctcgaccttcaagatgctgatgatacctttcttaccaacttgctgaacctcctcgacgcccgcgaaggtcgcaagacagccaaacggtctaaagacagaatgactgagctggcagaacaaggccgatggacagggggccctgccccgctgggctataaactggtgaataaggaactggtgatcgtacccgaagacgctgagaaggttaagaccatcttcaaactcttcctcgatggaaaaactcggcagagtatcgcaaatttcttcggatacgaagttaaaaaagtccgacggcttctggaaaatcccgtctatatcggaaaactgaagttccacagtgtggagatcattaacaagaagaagattcaccataaggattacaaagtgctcgacggcattcacgagccaatcatcgatgagtctacattcagtctggtgcagggcaagctcaaaaacattaaagtggagaggaatacggatgtctatatcttcaaagacttgataaagtgtacctgcggtcgaaaaatgtacagggtggtcaacaagtataactacctgaagaaatcaaccaatgagattagccagaagacagagaacctttactactgcaggacatctgataagtacaagtctatcggttgtggggctattgggattcatgaagaggaactgtttgaagaggtcatggcctctctccaaaaaatcatttttagcctggaagtggagaatattgacacaaagttcgatgactatcagtcccagctcgcactttataagaaagaacttgcttcactgtccaggaaagaggagctgttggcaagacagctgctcaattcactcatctctgaggaagtttttgaaaagttgatgaaggagttgaaggagaagaaagcctttttggaagagaagatcaaaaatttgactactctcataacgaacaaaaagaacactaacaagaactccgaaattctgaagaagtatttcttcaaactcgagaaagagaaagcgccagagaagataaacaactttctgaaactcattatcgacgagatagagatggttaatgactacaggttttacattcacctgaagttc

SEQ ID NO: 795 - DNA, 1302 bp, unidentified
  source 1..1302: mol_type = unassigned DNA; note = Bacteriophage uvig_366143 from the Index of /pub/databases/metagenomics/genome_sets/gut_phage_database (ebi.ac.uk)
atgcgcgtggcgctgtatgaacgagtgtcttccgaagagcaggccctccatgggtattcactcgaggcacaggatagcgctctgcggaagttcgctgaggacaatgggcacattatagtggacgtttacaaggacgagggcatcagtgcccacaagccctataccgcacgcccagaactgctccgacttctgaacgacaccgataagatcgacttgattcttttcgtgaaactcgatcggtggttccgcaatgtgcaggaatactataaggttcaagagatactggataggaaccacacttactggcaggcaattacagaggattatgagacaattaccgccaatggtaggtttaccgtcactgtgatgcttgccattgctcagcaggaggccgaaaaaaccggggagcgcatcaagtttgtgttcaacagcaaacttcagaaaaaccagccgattaccggcaactacgggttcggctttaaaacaatcgagcaagatggcctgaaaaccgtaagccatgacgagaatgaggcagccgtctacgacatgttcgactacttcagtaaggtccagaacgtttccctgctgaacgactacatgaaagaaaaatacggcatcatcgctgccaaccagacttggagcagaaggttgagaagcgagaaatacgctggaattgcgcatggcattgctaactttcttcccccttatatcacgatggagaagcactatgaactcctggatattttggaatccaggagatctcgaagatctagaaatagaatctatctgttttcaggcattttgaagtgtccagaatgcggaggagctatggccggatgcacatgtatccaaaacgggaaggaatatccttattaccggtgtagcaagtgctggaacaagggtgggtgttctaacaagaaatccacttacgaatccgtcgtggagaagttcttgttggaaaatctggaggcccaagcccgagtccagatagaagaggagcccaaaaaagcaaaaagtactaagagtttggaggaccgcctctcccggctgaacgacatctacctgatgggcaatatggaaaagtcaatatacgaggaaaagacaaaggagatcaaggagaaaatcatcaagatccagatggaaaataagaaacacggtgagtgctcaggtgcaaataggatacttagcatggattttaagaatgtatatgaaaccctgtctcgggatgcgaaaaaggtgttttggaggaatactctcggaaaaattcttgttggagatacgatctctttcacatttcggggc

SEQ ID NO: 796 - DNA, 1626 bp, unidentified
  source 1..1626: mol_type = unassigned DNA; note = Bacteriophage uvig_121245 from the Index of /pub/databases/metagenomics/genome_sets/gut_phage_database (ebi.ac.uk)
atgatgatggagaaccgcatgatgactggcaatcgggtcgactgtctttaccgcgttagcacagacaaacaagtggattacaatgataagagtcaggctgacatcccgatgcagcgcagggagtgtcaccgcttttgcgagaagatgggctggacgattgtacatgaggaacaggaggatggagttagcggtcacaaagtgagagcagaaaacagagacaagctccagattattaaagagcgcgcaaaacaggggaaattcgatattcttctggtgtttatgtttgaccgaatcggccgaatagctgatgagactccttttgtggttgagtggtttgtgaagaacgggatacgggtgtggagcacccaagagggagagcagcggtttgacaaccataccgataagctgacaaattacattagattctggcaggcagacggcgaatcagaaaagacttccattagaacaaaaacggcgctcgggcaattggtggaagatggaggattcaaaggaggtctggccccctatggttacgacttggtgaaaagtggaaggttcaacaagaggaagcatgaagtgtttgagcttgcaattaatgaggctgaggctgcggtcgtaaggatcatcttcgataagtacgtgcatgaaggcttcggcgcacagcgcattgccacttatctgaataatttgggatatagagctcgaaccggtaagatgtggcatcacgcctccatacgagggattatctgtaaccttacctacacaggggtcctgcggagcggcgaaagtagatcccaaacactgccacacctgcagatcattacccctgagctttttgaggccgctcagcatatcagaacctctagagcgaattctgccgagcaagaaaggagggtgcccctcaacacccgcgggcagtccctgctcgcaggcaatgtattctgcggccactgtgggtcacggttggctttgaccaccaacggtaaggcatatccatgtaaagagaacgcccaccgcatagttaaaagggtccgctacatatgctatggcaaaacacggaaacagactgaatgcgacggacaaacaggctacaccgcccacatcctggatgggataattgacaaagtagtcagacaaatattcgaaaggatgaaggctatccccaaaagtgagatcgtcaacatccggtacagggaaaagatggaggagcgaaagaccctcctgaagtccgctaaaagcgattatgccaaggccgccgccgagcttgacacgctgcgggcagaagtgatcaagagtctgagaggcgaatctgcgttctcacaggatcttctcggatccttgattagcgactgtgaaactaagtgccttgaagtccagcacactatggaggccgcccaggcagcctacgatgaaggccaggcaatgctggatgcgctgaacgctcagtatgacgatattatctcttgggccgacatgtatgactcagcctcaacagagagcaagaagatgattgtttcctgcctgatccgccgggtggaagtgtaccgagactataggctccacatcgactttaatatcgatttcgagcagttctctgctgggctcgacatctctgctatcgccgcc

SEQ ID NO: 797 - DNA, 1674 bp, unidentified
  source 1..1674: mol_type = unassigned DNA; note = Bacteriophage uvig_190766 from the Index of /pub/databases/metagenomics/genome_sets/gut_phage_database (ebi.ac.uk)
atgtcaaagagagtgcggacacttctccgcgtgagcagccgacaacagcttcatgatgatgacatacccatacaaagagccgaggcaacggaattcattgccaaacatgaggactgggtcttcgacagagagtacttggagaagggggtatctgcttatcacaacggagtggaagacagggaaattttgcaggaaattgtcaaagacgctaagaacaaggagttcgagattctcttggcatacatgtctgacaggatcggcaggcaggaggaatactcattctacgttgccgagctcaatcgaatgggcatcgaagtatggactatcaaagatggacagctgaagaccgaagagcatatcgataaactgttgaactatatacggttctggcaaaatgagggtgaatctaagaaaacgggcatgcgcgtacacgacacaatggtggagatggtcaaggatggaaagttcgtgggcgggaaagctccttatggatataaactggtcctcagcggtgagatttccaatcacgggcgcgccctgcacaagttcgtcatcgtgcccgagcaggcagacaatgtgagaaagatattttcatatgctgtgaaccaaggtatgggttttcagaagatcgccaaaactctgaacgaagaaaacatccccgctcctatcttggccgaatggaagtctggaaccgtaagaagcattttgaccaatccaatctacatgggctacattgcttataaccgacgaaagaatagtcactccagctccacgtatcttgaccgcaaggagtggacatacagtagagaaagaaaccctgaaatcaccatagtcagtcaggatatctgggaacgcgcacaggagatccgcgaagcccggaagaagaggattaatgcatctaaacaggctaccaacgaactgtacatggaacagtacaatgtgccgttctccactcgggggaggttggccctgactgggctggtgtactgtgggtattgcgggaagaaattgaagaatactggatatgccaatcactggacatgcaagaagaccggtgagaaaaaagtggcctacgttggcaggtatggctgtcccaatcagtgcaaacctaggcatacatatactcagaagtaccttgaggaggtggtcttcgcaaccgttggaacatacttggaaaatctcaaaaagatcgatataagtgatgagctcgaggagatgcagtcacagcaagataagaacattaagcgggagatcaaagatctcgagagagagattaaaggcctgagtgctgacatcatgacccttgaggaaaaactgccagaagcaattaggggcgaattcgcgttttccgttgacaaactgtccgcgatcatctccgataaggaatctctcaagaaagagaaagaggccggaaaaaacaagctgcaaaaacagctcgacgagattaatgttcagggcagcgagttgaaggcctttatcgatgcgatgccaaagtgggatgaaatcttttttgaatctgacgtgcagaccaagcagatgatcctgagcactcttattgaccggattatcgtgaaggacgacaacataacaattaactttaaaattcggctggagaactttctggacgagaagctgctggagaataacggctcagatttgagccgcaaagggctg

SEQ ID NO: 798 - DNA, 1512 bp, unidentified
  source 1..1512: mol_type = unassigned DNA; note = Bacteriophage uvig_152630 from the Index of /pub/databases/metagenomics/genome_sets/gut_phage_database (ebi.ac.uk)
atgcaaaaatacctcatgtatcttcgcaagtctagggcagatggtgagcacgaaaccatagaagagattctggccagacatgagaaaattttgcaggagtacgcggagaaaaatattagaaaagccgtgccggaggaaaatatatttcgggagatcgtatctggcgaaactattaaagatcggcctctcatgaataagctgctcaagtgcattcaaaatgaacagataaccggcgtactggttatcgaaccacagagattgagcagaggagatcttcacgactgtggcacaattattagggcctttcagtacactaacacactggtgtacaccccgaccaaaacctatgacttgagcgagaagtatgacaggaaattctttgaaatggagcttatgagggggaatgattatctcgaatatgtgaaggagatcctgatgcgcggaaggctggcttctgtgagcgacggcaattacattggaagtatacccccattcggctactccaaggaaaagatcgacaagaactatgtcttggtggagaacgatgaatccaatgtcgtgaggctcatctttgatctcttcgttaatcagaacatggggacttccaaaattgctaaccatctgaacagcataggcatcaaacctcggaagaacaattactggtcagattctacaatccgcgatattttgcgaaatcccgtctatatcgggaagatccggtggaactggcgcaaaaccgtgaagacatataaagacggagagattgtctgttcaagacctaaaagtactccagactcttggatcatcatagacggtaaacataatggactgattagtgaggaggtttttaacgccgcgcaaaaacgatttggtcagaatcctagggtgaaaaaagaatatgaaattgttaacccatttgctggcctcgtaaagtgtgaatgcgggaagagtatggtgtataagaaattcaacaagagtagccctcgcatcatctgccccaaccagccccggtgtgaaaatagaagcgtgttgtactcagagttcgagtccgaggtcatcatcgcactgaagaagtacattaacgacttcaagatcaagataagcaacggggacaatcaatcagaatccatccagaatggtatactcgaatgcctcattaaagaactgaaaactattgagaaccagcaagataagctttacgagctgctcgagcaggggatctacacaaacgccatattcatcaaacgcaatacggctcttgcagagaagcggaagaaaatcaccagcgagatcgaaaacctgaagacttcaattcccaactccatcaattacgaggagaaaatcgtccagctttccaacgccctgaacacgctgcagaatcccgatatccacccaaagattaagaatgagttcctgaaggtgataattaacaacatctattacacaagaaagaatgataaccgaacgcgaaacgacgactctcctttcaccatcaagattatcctgaatctt

SEQ ID NO: 799 - DNA, 1737 bp, unidentified
  source 1..1737: mol_type = unassigned DNA; note = Bacteriophage uvig_500555 from the Index of /pub/databases/metagenomics/genome_sets/gut_phage_database (ebi.ac.uk)
atgaccaactcccagaatctgggcactatagaagccaccaatcccgtccttgcggtggctcctctcaaagaagagacggaaatgctccgagctaccgacaaaattacagctctttactgcagactgagcgtagaggatatgaaagaagataagaaaggaggcaaagaggacgtcagcaactcaatccagaatcagaagatgatactcctgcaatacgcgaaggaaaacaggttcccaaacccaacattttttgttgacgacggatattctggcactaactatgacagacccggtttccaggctatgctggccgagattgaggcggggagggtggccgtctgcattactaaagacctgtctagacttgggcggaactcttctctcacgggactgtacattaacttcacattccccaagtataatgtgcgatatatcgccatcaacgaccactttgatacaattgatcccaatagcacagactcagatattgcaggcatcaagaattggttcaatgaattctttgctaaggatacgtccaggaagatccgagcagtccaaaaagctaagggcgagcgcggcgtaccactgacaaccaacgtgccatttggttatctgaaggaccccgcagacaagaccaagtggattgtagatgaggctgcagccatggttgttcgcagaatcttcaaactttgcatggagggtcggggccctatgcaaatagccaagctcttgcaggaagaaaaagtgctgaatccaaccgcctacaaacggcgggccgggattaagactccaagccctgagactgacgttccttatcattggaacaccaacacagtggtgcatattctggagcgacgggagtacactgggtgcacagtgaacttcaagacttacaccaattcaatatgggataagaaacagcgcgagacccctctggacaaacaggccgtgttttacaacactcaccccgcaataatcgagcaggaggtattcgataaagtgcaggagatccgccagcagagacacagaagaaccaagacgggcaaaagtagtctgttttcaggtatggtctactgtgcagattgcggcgccaagatgcgctattgtaccacaaactactttgaaaaacgccaggaccacttcgtgtgtgccaattatcggtcaaataccggaagttgttctgcccattttatcagggcagtggttctcgaagacctcgtctggatgcatatgaaggctgtgatcttttacgtcaccaggtacgagaaccactttcgggctgttatggaacataaactgcttctttcttccgaagagaaaatatgtgcatccgtaaagaggcttgaacaggcgcagcggcgaatgggggaactggacagattgttcatccgaatctacgaggacaatgtcgctgggaggatcaatgatgagcgctttagcatgatgagccgcagctacgaaaccgaacaggagcagcttaaagtggagattcagactctgcagcaggatatcgaagtgcaggaacggcaaatcgaaaatctcgagcaattcattcaaagggtgcacaagtataaggatttggatgagctgacaccttatgcccttagggaattggttaagggggtgtatatcgaggccccggacaagagttccggaaagaggagacaaaatattagaatttcctacgatttggtcggattcatcccgctgaacgagttgatgaaggaggagacagca

SEQ ID NO: 800 - DNA, 1590 bp, unidentified
  source 1..1590: mol_type = unassigned DNA; note = Bacteriophage uvig_356689 from the Index of /pub/databases/metagenomics/genome_sets/gut_phage_database (ebi.ac.uk)
atgatgtaccagatgggtgtatactgcagactgtccaaagacgatggggaaaacaaggtctccgagtccatcgaaaaccagatgaagctgatccgcgagtatgtaaccaagagtgaagaccttgaaatcgctgatatctacattgatgatgggtacagcggcctctactttgccaataggcctgaatttcagagaatgatggaggacatctacaagggcaaaatacagggagtgatcaccaaggacatcagccggctgggccgggaacatattgagactagcaactacattgaacgggtgtttcccagcttgggcgtcagatatattgcgatcctcgatggcgtggattcagtgcatcactccaacgaagagctggcccaattcaagacgcttttcaatgacatgtactctcgcgacattagcaaaaagatccgaggtgcacttactgcccagaaaaaacgaggacagttcatgtccggcttcgcaccttatggatatgtgaaagaccccgcggataagcatcattttttggtcgatgaggaagccgctaaagtggtgcggcgaatcttctacatgagcctggaagggtattcaagagatgggatagccaaaaaattgaatcaggagggtattctgaccccatctgagtataagcgcaaagtccaaggcctgaagtatgcgaacgcactcgaaaaggccggcgctaaagggtgggcctaccctacgataaacgttatcttgaggaaccgcgtatacacaggcgcaatggttcagcacaaaagtgaaaagatctcttacaaggtggagaagtatcaatacattccagaggaacagcaatacatcgttgagggtatgcacgaggccatcatatccaaagacacctttgagcaggtacaggagctcatgaagaaaaggacaaggactcccggctttaatagcgaagtgcgcaaagtgaatccatacgctggaattattgtttgtggggattgtgggtataactttcaacgggtgacttgccgagacggatatgaatgcgggacataccacaagaagggcaataccgtctgttattcccacttcatcaagaaggaggtgcttgactcaattgtaaaaaacgagatccagaggcaggctgagctggcattgaaagagtcagacaaagatgaaatcctgaaggtggcggataggaaaaaggaggtccagcgcagatgcgctgaagcagaccagcagattgagagacttcagaaggaactggctgctgttcaaaaatataagaagaagacctatgagaactacgtggacggagtgctcgacaaagaagagtacctgtcatacaaggccgagtacgagaagcaggacaaagatattcgggccaaaatccagctcgcagaacaagagaaagattctttcggagaggccgaggagtcttatgagaattggattgaaaaattcatcaagtatggaacactgtctgaagttacaagggagattgtgactgagctcatagaaaagattgtcgttaatggtgacaagagtatagacatagtgttcaagtatcaaagtccctacccggtcgagaagcaggccgtc

SEQ ID NO: 801 - DNA, 1461 bp, unidentified
  source 1..1461: mol_type = unassigned DNA; note = Bacteriophage uvig_527188 from the Index of /pub/databases/metagenomics/genome_sets/gut_phage_database (ebi.ac.uk)
atgacactgaagaacgcgtgcgcttatattagagtgtccacggataaacaggaagaactctctccggacgcacagaagcggcttattatcgactattgcaaaaaaaacggatacacaatcacgaacgagaacattttcatcgagaacggaattagcggcaagaaagccgacaaaaggcccgagttcaaacggatgatcgctatagctaaaagtaaggaacacccttttgatgtcatcctggtgtggaagttctcccgattcgcccgcaatcaggaggaatcaatagtttataagtcaatgctcaaaaaagcaaacgtagacgttgtaagcgtatctgaaccagtgatagacggcccctttggttcccttatcgaacgcataatagagtggatggatgaatactattcaattcgacttagtggcgaggtcattcgcgggatgaccgagaaagcattgaaagggggatacaacgcccagcccccgctggggtacagaaagaattctgacactagcatcccagaaatctatgaacccgaagcagttatcgtgcgcaacatctttagtttcatctcccaaggcttgtccctcattgacaccgccaggtccatcaacaatatgggctttcatactagacgcggcggcatgtttgagcagcgaacaattaggtatatcattgaaaatcctttctactatgggtacgtccggtggaacagacaaaatccttcagagcacacaatcaaggacaaaagtgagtggattattgcgcctggagctcacccagtgttgatcaataaggaatcctgggactttgctaatgagcagctcattaagataagtagaccatacaaagaaagagggaccagcggaatcaagcactggctgagcggtattgtcaagtgttcctcttgtggctcttctctggtgagcaattccctttggaaaggacactcaacctccttccaatgttcaggttataataagtgcaagtgcaaggtgagccattatattaaaactgagcggctggaggcagggatctacgaaggctttctgaaggtgctgagtagcaagaacgtgacatatgagaaggtgtctgagcatagttacgaggaaaaggtggacaccgccgccctgctgaagaatatcgaagataaagagcgacggattaagcaagcataccgggatggtatagatactctcgaggaatataaggataacaaggctattttgcagaaggagagggagaaggtgatggagatcatttcaaggcagcagcctgccgtccaggatgagaataatgagactatgctgagacagattaagaacgcgtacgaaatcatcaagaacgtcgcccttgataaactcaccagggccaatgctatccgcagcgttgtctctaaagccgtttacgacaacgagaaagataccctggacatctacttcaggcttatagagaaaagcccc

SEQ ID NO: 802 - DNA, 1500 bp, unidentified
  source 1..1500: mol_type = unassigned DNA; note = Bacteriophage uvig_415064 from the Index of /pub/databases/metagenomics/genome_sets/gut_phage_database (ebi.ac.uk)
atgaaagctgcagcatacgcccgctattccaccgataagcagaccgagaatagcatcgcctaccagatgaacgcaatcaccaagtactgcctggaccatgacatcgatctgattagcgccttcagtgacgaagccgaatctgggacaaatactgatagggagggattccagaatctggtccgcgctgctcaaaacaaggaatttgaagccgtcgtcatctacgatatatctcggggtagccgagatgtagctgactggtttcagtttcgcaaaacaatgcgcgcccttggggtgcaggtaatcagtactaatcagcaactcggcgacatcacaaaccctaacgatttcctgatcgagctcattaacgtgggtttgggacagcacatggtgctggacacccgaaaaaaatcaatggcaggaatgctcgaaagagcgaaaaagggcctctattgcggcgggaactgccccctgggatacaagatagaaaatggacggtatgtgatcgaagaaaaggaggcaaaagtggtgaggcagatttttaataggtacgcccagggcgagtcctacaaccagatcatcgacggacttaacggtgctgtgggcaagtttggtaggcccatcggcaaaaactccctgcattcaatattggctaacgagcgatacacgggcgtctatatctggaatgagaggaacgtccgcatcatgcggaagtgggctggtggcaaaaaaaatcctaacccagtgattatcgaggggattattcctcagattatagacaagactacgtgggagcgggtaaagaagagaatggagacacggaagaatggaaccaacaaggcgaagagagagtacttgctgaccgggttgattgaatgtgcggaatgtggcgcaacctacgtaggacactgcaacgttgcccatagaaaagatgggagcgtcagagagaatagatattatgagtgtgggaacaagtatcgcactcggacatgccactcaaagaatctgaacgccgatgagctggagcttttcgtggttacacagattcaggacaccttgagaaattgggacccctctgaagttgcccgcaagtatatcaaagaaattcaaggagctactgccgactgcacggaggaaaaaagggaattggtggatgttgagaggcaaatcaataatggcgtgaaggccgtgctctccggcatgagggttccagagctcgataaagagatagacagactccgacagcggaaacttgacctggaaaacatcattgcagaaaagtcccagcagactaatcatagctattcagccgatgagatcgaggcggctcttagtggcctgatcaagaactttgaccccaaggaggccgtcaagcaactggttcaaaaaatatacgcaaatgccgacgggtcttgtaccgtgcacattggtgtgcacaaaattggggcaggcgatccaagctactctatttgtactttcttcttcccggctaaaagtaagaca

SEQ ID NO: 803 - DNA, 1590 bp, unidentified
  source 1..1590: mol_type = unassigned DNA; note = Bacteriophage uvig_593675 from the Index of /pub/databases/metagenomics/genome_sets/gut_phage_database (ebi.ac.uk)
atgagcaaagcagacatcctggcaaggtactccacggacaatcagaatgccgacagcatcgaggtccaagtcgagaagtgtactgaatggtgtaagcaacacggttacgctatcgtcaacgtgtacgccgattatgccgtttccggcatgaaggacacacggccccagtataaccagatgatgcagaaccttcgagcaggcgaggccgatactgtggttatctatgatcaatcacggatgtttaggaaaatgacagcttggtttgccttccgggacgagttgacagagatggggatcaaagtaatcagcatcacgcagcctatgatcggaaaagatctgcgcgatccagcaaactttcttgtggagagtaatatggccgtctttaatcaaatgtgggtgctgcagactcgacagaaggttatggaaaaaatgcggtacatggccgccacccagcaacatactggcggcaaacctgctcttggatacaaagtggtgctggacggggacaagaagcgattggctattgacgaggccgaggcccagattgtgcaccgaatctttgatgcgtacgccagcggccagtcatatcgggagattattgctggcctgaatcgcgatgggataaagactaaacggggatctgcatacggtgtgaactccctccacgaccttctgaagaataagaaatatattgggatagtggagtatggagctcacccttattccgagtccggcaggagaaacacccatggatcagtggacgaaaatgtaatacgagtggagatccccgacctggccatcattgataggaagacgttcgatacagttcagcagaggatgaaggaaaacaagaagaaccaagggggtagacccgctacccggagggagtatccattgaagggaaaaatcttctgcgccgaatgtaaaagttcaatgacagtccggatctctaaaggcaatttgttctactacgtgtgcgcggctcagaaaagacagcatcagtgcaccgccagacccattagatgcgactacttggaacagagagttgcagatgcagtgcgcgcagcactgggtactccagaaaacaagcagttcctgattagaattctgagagaacaatctgaggcgatacaggggacagccgcttccagcctccttgccctcattgacgaggaacgcaacaccaccgcacagctgaacaatgctattaacgccgtgcttgccgggcttatgtctgatcaactcaaagcaaagatcgctgagctggagacccgcaagtcagatatcgaaaagaagatcacagcgctcaagaggcaggtcgacgccagtaggatcccggaagagaatctgactcagatgcttgactacattatatctagcgactctgaaagtgcagcgctcttcgccatagtcgctcgcgtagaggtcggcccagatgacattacaatttggaccatattcgatgctgatcccaatggtcacattgactttgattccaaagaagacgtgctgatcacccatggggtcccgagcggagtgcctctcgtattcatcaccgcttttggcatgcttaagatccaggttcgccgc

SEQ ID NO: 804 - DNA, 1578 bp, unidentified
  source 1..1578: mol_type = unassigned DNA; note = Bacteriophage uvig_200526 from the Index of /pub/databases/metagenomics/genome_sets/gut_phage_database (ebi.ac.uk)
atgggcaaagtcagagtcattcctagcaccataaaccccctgactcatcaaagcattgtagccaatgtgaaacggaaggtggccgcttacgcaagggtctctacagattcagacgaacaatatacatcttacgaggcccaggtgaactactacaccggatatatccagtcacgggttgactgggagtacatcaatgtatatgccgacgagggtattagcgggactaacacaaaaaagcgggtgcagttcaataagatgatcgaggacgccctcgaggggaagattaaccttataataaccaaaagtatctccaggtttgctagaaatacactcgacaccatttcttacataaggaaactcaaagcagcaggggtggaagtgttcttcgagaaagagaacttgtggacatttgactccaagagtgagatggtgttgagcatgctggcggcaatcgctcaggaggaaagcagatcaatctctgagaacgtcaagattggtaagaggtgggggtttaaagaaggaaaagtctccatgccttataagatcttcctggggtatgacaaagtcgatggaaagatagtcattaatgaagagcaagcaaaggtggtgcgcctgatctatcgactgtacgctcgagagggctatagcagagccgcaatagcggattaccttaacgagatgaaagtaccaaaacccagcaacccagaaggcaaatggtcaatcaacaatattacagctatcctcaccaacgagaagtacaaaggcgatgccttgcttcagaagggttatgttgacaactacttggatcacacggttaaaaaaaataagggcgtgctgccacagtactacgtagaaaactcccatcctgccattatcgacaaggatgaatggaatatggtgcaggaagagttgaagaaacgagacaagttcaggtatgcctactccaagaacaatccgttctcctccaagctcatctgtggctgctgtggacatttctatggcctgaaagtgtggcactctaacacgcaataccgcaaggaaataatgcagtgcaacaagaagtattcaactaaagacgacaagtgcgataccccctccgttcttagagaagatgtgaataagcggttcatcgaagcctacaatgccattatgatcaacaaggaggaggttatcaaaagtgccaaagaactgatcggactgcttactgatacgactaaaattgacaagcgcatagaggagctgaacgggaacatcagcgacactaagacactcgtggagaatctcattcacgataatgctctgaaggctcaggatcaagatgcttatattaagaaatgtaattctatgaccgctcagtatgatatcctcaagcagcagctggatgaagcaatctctgaacgcgacagccgggagatcaagagtaagagtatgaacctgtttatcaccgacattaaagaagcccccattatgattaatgagtttgacctgaccctgtggaatattatgctcgacgaggcgatcgttaataaggatggatcaatcacttttaagtttaaaaacggcatggaatacaagaat

SEQ ID NO: 805 - DNA, 1767 bp, unidentified
  source 1..1767: mol_type = unassigned DNA; note = Bacteriophage uvig_188594 from the Index of /pub/databases/metagenomics/genome_sets/gut_phage_database (ebi.ac.uk)
atgacaaaaacaatccgcaggattgaagcacagattccaatcactaccaagaaaaagcgggtggcagcttacgctcgagtcagcctggacacagaaaggcttgagaattccctgtctgctcagatctcttattactctgcctttatccagcgcaacccaagctgggaatatgcaggcgtgttcgcggacaatggtatttcagggactagcacagaccgcactgagtttcagagacttatggcggaatgtgaggcagggcacattgatatcattctgaccaaaagtatctcccgatttgcacgcaacaccctggatactctgacagccgtgcggagactccgagagctgggcatagaggtgcagtttgaaaaagaacacatacacacgctgagcgataagggcgaactgctcttgacactgctcgcatccttcgcacaggaggaatctaggtcaatctcagaaaatgtgaagtggggcgtgaggaaaaggatgaagaagggaatacccaatgggcggttccggattcttggatacagatggcaaggggacaaactggtgatagtgcccgaggaggctgcagttgtcaggagaatctaccaggatttcttggatggcaagagtagactcgagacggagagagcccttaacgcagaaggaatccggaccattaacgggtgccggttccaagactcctcattgaaagtcatcctcacgaatgttacctacactggtaacctgctgctccaaaaggagtacatcaccgaccctatcaacggtaagcgaagaaagaaccacggggaattgccccagtactacgtggagaatactcatgaagccatcattgatcaggctacttttgactatgtccaacaggagatgacacgacgcaaggctctcggcgcccaggccaacaagagtctcaacttgacatgtttttccggaaagatcaagtgcccttattgtcatgtcagctatatgcacaatccacataggaggaaatcaaatatcgattactggatttgtggatctcgaaagaagaaaaaggttggggacggctgccccgtcaaaggtgctatgagcgaagtagccctgaaaaagtgctgtgctgaggtattgggtattgaagagttcgacgaaatcgtatttgcggagaagatcgagcacttggaggtgccggaaaaaggacatttgactttcttcatgagggacggcagcgtttttacaagagagtgcaggaacactggccaccaggattgttggacgaaggagcatcgcgctgtggccagcgagtatagacttaaacattccagtgaacggagcggctcaacctgtttcaccggcaaaattaagtgcgggttctgctccatgaattatcagcgcgccacccaatctaacgccggaaaaaagacccgctactggcggtgcccttctaagggcgaaccagacaagaaaggactgcgcgaggatcatctgagagagctttgcgccgaggtgttgcacatcgacacctttgatgaggccgcgtttacccaagccatagaccacattacagtttccccggatgccgtcctggagttccagttcaatgatgggcatgcggagatacacaactggagttatgagcggcatggtcacaagtggacagccgcccagagggctcgctttagtgagaccatgaaacgacactacactcctgaacgccggcagaccatgtccgagaagatgaaacagattcgaaaagaacggggagctcagtggagaaaagaa

SEQ ID NO: 806 - DNA, 1773 bp, unidentified
  source 1..1773: mol_type = unassigned DNA; note = Bacteriophage uvig_323580 from the Index of /pub/databases/metagenomics/genome_sets/gut_phage_database (ebi.ac.uk)
atggctaaaataacccgcgttgaacaggcagtacctacaatcaagacgaaaaagaaggtggctgcttacgcccgaatttctatggagtcagagcggatgaaccacagcctcagtgcccagatttcatattactcctccttgatacaaaaaaaccctgattggcaatatgcaggagtctttgccgacgacggtatttccggtaccgggattgccaagcgcgacgagttcaagaggatgatcgaggccgctgataatggggaaattgacattattctgactaagagtattcagcggttcgccaggaacactgtcgacctgctcgagacggtcagacacctcaaagatattggtgtggaagtaagatttgagaaggagcacatcaactcaatgtctggcgatggggagctcatgctgaccattttggcaagtttcgcccaggaggagtcccgcagcctgtccgaaaattgtaagtggggaatcagaaaacggtttgagaaagggatacccaatggccacttccgcgtttacgggtataggtgggaggatgatgaattggttatcgtgcaggaggaggctgaagtcgtgcgccgcatttttcagaactttctcgacggcaaaagtcgattggagacagaacgcgagttcgcagctgagggcatcaccacccgagaaggttgcaggtgggtggattctaacatcaaagtggtgcttaccaatgtcacgtacacaggcaatctgctgctccagaaagaattcatctccgatccgatctcaaagcagagaaagaagaataagggtcagttgccacagtattacgttgaggatactcatccagctatcatagataaagcaactttcgattacgtacaatcagaaatcgcccgacgcaaagaactgggacctagggccaataagagtctgaacctgacctgtttttccggtaagcttaagtgccctttttgcggcatctcatatgctcacaacaagagaacagacagagggttcatggagtactgggcatgtggcagccgaaagaagaaaggcggcaggtgtcccgtcggaggctccatcaatcacgagaaccttaaaaaagcctgtgccgaagtgttggggctggacgaatttgacgaggacgcttttagcgatatggtggattacatcaacgtccccgaacgggaaatgctggaattccatcttaagagtggcgaagtgatcactaaggattgccctaacacaggccataaagactgctggacggcagaatacagagcgaagacaagcgaaaagcgacggaagaaaccgaattgcaagggctcttccgtgatgaccggaaaaattaagtgtgtgggatgcggctgtaatttcaggcgagcgacacaaccatctagcaccgccgaaagcgggaaggcctattactggagatgcgccgagcgggatgggtgcgggacagtagggctcagggaggacgttctgaaaccctttatcgctgaaaccctgggaatagatgagttcgacgacgccgagtttgagaaacagatcgaccatatagacgtgttgagcgcaactgagatggtgtttcacttcaaggacggtagaaccgtctctagaacttgggagcagcccaagcgggtgggacgcccatggacagacgagcagcgggcgaagttcaaagaaagcattaaaggaaggtatactccagaggttaggcagaggatgtctgaacatatgaaacaacttcggaaggagcggggaaaggcgtggagaaaagagaaa

SEQ ID NO: 807 - DNA, 1647 bp, unidentified
  source 1..1647: mol_type = unassigned DNA; note = Bacteriophage uvig_81430 from the Index of /pub/databases/metagenomics/genome_sets/gut_phage_database (ebi.ac.uk)
atgagcgagatgaaatacagggcttgtgcatatctgcggcttagtcgagaagatgatgacaagcgagggtcaacggacgaatctaactctattaaaagtcagcgaatgatgatcgaaagcttcgtgcggggattcccagacgtggagctggtcaaggaggtttgcgatgatggctttagcggaacagactacgaacgccctgcgtttatggagatgatcgccatggtagagaagggggagatcgactgtattatagtgaaggacctctcaaggcttggtagagaatacataggggccggaaactacatccagaagtacttcccgcaaaaaaatgtgagattcattgcaattaacgacaactacgattccctcacggccaactcctctgacagatacatggtcgtacctgtcaagaactttgtgaatgaatcatattgccgggatatatccattaagtccaggtcaaatcagcaggtgaaacgcatgaacggcgaatatatcggaagtttcgtgtgctacgggtaccgaaaagatgagaaggataaaaataagattgtgccagacgaggaggcagccagggtggtccaagatatctttgcctggaaattgatggggctgagcgccaattccatagcagcgaaacttaatgagcgcggcacactgtccccagctgaatataagaaggcgcatggcgagaaattcaagacttcttttcaaaggaaccccgaggccaagtggacacccaaagccgttctccgcatcttgtctaacgagatctacatcggagtgctcgaacaggggaagcgcgaaaaggtctcttataaggttaagaagactattgagaagcctaaaagtcagtggattcgggtcgaaaacaatcacacccccataatcaccgaggccgatttcaaagctgtacaggaactgctcaagagagacacccgggctaaagagcgcatgaccgagcctaaactgtacgccggcctgctcttttgcggcgattgcggtagaggactggtgagcaggaatgtcccctacaaggatactgtgaacgagtattatatttgttctggctacaatcggggcaaggagtgtaccagacactcaattaaagtggatgtgctcaatgaaatcgtactgggtgaggttagaaagtatgttaaacagctgaccgacacaaagaaactgctgtcaattttggacgctaagcaaattagatttgaggaggcactgaaccgagacaaagagatagccatgctcaaggaaaaagaacaggagtatagcgccatgaagtccgccctctacacagacctccaggagaagctgatcactcaggaacagttcaacaggtatcgcgaaatctacagcaacaagctgagcgagatcgcagctgcaatcaaagtgcaagaaacaactgtcaagagtatctatgagaatgggatcgctgcgggtcagtggttggatgacctccgggagaatatggaaatcgaaaagcttgatcggatgcttcttgtgagcttgatcgacaaaattttggtatacgaggacaaaaccgtcgagattgttttcaagtataggaatgagatggccaaagctgtggaactcgttaaaggcgaactggaagctgaagcaatgcgcgaggtgtcc

SEQ ID NO: 808 - DNA, 1158 bp, unidentified
  source 1..1158: mol_type = unassigned DNA; note = Bacteriophage uvig_395648 from the Index of /pub/databases/metagenomics/genome_sets/gut_phage_database (ebi.ac.uk)
atgtcagaaaatacaatccagattattaaaatcgcccagggcattccaggacgaaaccacgagtatactgagatggtcattagaggggatatcatgattgaggaaaaacgctattgtatctacttgcgaaagagtagagcagatgcagacgctgaagcaaggggcgagggtgaaacattgctgcgccacgagaagactctgttggagctgagcgagaggatgcatataaaggtggaaaagatctaccgggaaattgtgagcggggataccatcgcggctcgccctgtcatgcaagagttgctgacagatgtggagagtatgacatggacaggtgtgctcgtaatggaagtcgagagactcgccagaggcgatactatcgaccaaggtatcgtggctcggaccttccaaataaccaatacccagattattaccccactgaagacgtatgatcctcagaacgaatcagatgaagagtatttcgagttcgggctgtttatgtctcgccgggagtacaagacaatcaacaggaggcttaaccgcggacgaattcagtctgtcaaggaagggaagtacatagcctctgtggccccgtacgggtatatccgggtgaaactgccgaacgaaaagggctacactttgagtcctcatcccgagcaggccgacgtagtacgcatgatatttgacctttacgtgaacggactcaatggtgaagagtacggagctaccaaaatcgccagatacctcgacagcctcggcatcaagcctatggtcgctgacaagtggtcccctgcatctattagggacattctccaaaacgaggtttatgtcaataagattgtttggggcaaacggaaagaagtcaagaccgtggagaatggagttgttaaaataatgaggcccaccgcagcggattacctttgcaacaatgcccttcacgagggcctggtgactcaggagatctttgacaaagcccagtacaagcgaactcattccccacacagcatcaaagttaacgtgaaaaaacccctgcagaatccattggctgggctgatctattgtgacaagtgtggctcactcatgacgcggctgggagaatccaagaagacgccctatgccttcctgaaatgccccaatagatattgcgacaacgtgtccgtg

SEQ ID NO: 809 - DNA, 1494 bp, unidentified
  source 1..1494: mol_type = unassigned DNA; note = Bacteriophage uvig_255494 from the Index of /pub/databases/metagenomics/genome_sets/gut_phage_database (ebi.ac.uk)
atggctaagcaacaggcggtaatctacgtccgggtctccagcaaggagcaggaagagggcggattttccatccccgcccaattgaaatacctcaaggactacgccgctaagaacaacttcgagattatacacatatttgcggagagcacgacagccaaggaggccggccgaaaggagttcaccaaaatgctgaaatttctccggactcagaaaaaggcatgtcatctgttgtgcgagaaaaatgaccgcctgctcagaaatgaggatgacgctgcaacagtcaagaacctctttatgaaaacagaagtgtctgtccacctggtgaaggacaacatgattctgaacaagaacagcaccccttacgagatcttcatcttcatgatgttctctgccgtctcatctttgtatccacgcaacttgtccaatgaagtgaagaaaggtatgatcgaggccgccgaagaaggacactttccagctagagtgccaattggatatattaaccataggacttccaaaaagaagacctgtattctcgtggatacagataaggcacactacgtcattagggcctttgagttgtattcaaccggactttatagttacgaaactctcgcacagaaattggctagtgagggtttcatgatcgggaaaaggaaatgctacaagcgaaacatcgagctgatcctcaataaccctttctacatgggcgagttcaattacaaggggaagagatactatgacgctaagcacaccccactgatttcaaaagaactgttttacacagttcagaaattgatccattctcgcacctcaccccatttgaagaaacacgacttcttgtatagcggcctgattaagagtcccaatggctactctttggtcggagatataaagaaggggaaatatatctattatcgcagcacagatgttaaagacaaggggctgaaactcctcaaggaggaatatgttgacgaaatggtggaaactatgctgaaaaatatctcttgccctcccgagtttgtggaaaatgtgatgaatactcttaaaagtatgctgcagggcaaagaaaaatacgagaccaattccttggaggagatgcagaaaaagattaacatccttaagaagaggttgaatcaactgtacgtggacaagctggatggcaccattactgaagaattctactttgacaaacacgaggagtggcaaaccgaattggatgaacttagagtacagtttgactatctgtcatccgaaagtgatgagattctggatcgggcagagacaatactgacgctctgtaaaaacgcctattccgtgtacatgaagaacaataacgaacagaaacgaatcctgcttaagctcctgacgtctcattttctgtgggatggtgaaaatcttacaatagaggtgaagaacaccgttaagccgatgttcaacagcgtgatcttcaatatggttggggtagagcggcttgagctgcctactagcagcctg

SEQ ID NO: 810 - DNA, 1335 bp, unidentified
  source 1..1335: mol_type = unassigned DNA; note = Bacteriophage ivig_2835 from the Index of /pub/databases/metagenomics/genome_sets/gut_phage_database (ebi.ac.uk)
atgaatgtaatccgcggagttgggtatattcgagtttctaccgcagagcaggccactcgagggcttagtctggatgcgcaggaagccgagatacggacatatgccaaagcacatggaattgagctctttaatatctacgtggatgcgggcattacagcacgaaaacggttggataggagggaggctttcggtcagatgatgaaagacgttgactccggccttattgacgaaatcatagtgatgcgactggatagatggtttaggaacatctatgattatcataagatgatgaacgagcacttgattcctcacggagtcaattggtccgctgtcaaggaggattacgataccaaaaccacaaacgggagacttatgattaacctgcggctggctatagcagaacaggagtgcgatactgacggagacaggatcagagacattcacgacaaccagatagccaacggcatctggattggtgggtgtgctcccccaggctaccgaattgaaaataagaggctctcaattgatcctgatatgcaaccggccgtctcatatttcttcgagcggctgctcagctgtgggtccgtcagaagagctatgctggacatgaatgaacggcacaacctccatttcgaatacggacaagcgatccgcatggctagaagtaccacgtattgcggtgtgcgccgagagaactataactactgcccaacctacatctcacaggacgaacatgcaaggattatggccgccctggagcataacgtgcgggtccgctcagctgacaatgcacggatccacatctttagcggcttgttggtgtgtagctgctgtggcaggcgactggccgccaacactgtcaggaagaagagcgtgacgtggacagcataccggtgtcacagagccttcggcgaccacgtgtgcgataataggcaccttgtcgatgaaagaaaagttgaagcatggcttcttgattacctggagaatggactgtctgactatattgtgtctgccagtgtagctgacgcccagcccgtggtggtagacaataccgctgccataagagagaggcaggagcgcgtgaaggagctctttatcaacggttttatcgacctccaagagtacaagaagagagcgactgaactggaggctaaaatacaagtgcctgaaaaacagccccctcggtccatggaaaagctgaagagtctcttggagcgcggcgttcgcgccatctacaatgacctcagccgcggggagcggcaggagttctggaggtccatcattcgcgaaatcccagtgaacaatggggccgtatctggcgatcccatctttctg

SEQ ID NO: 811 - DNA, 1281 bp, unidentified
  source 1..1281: mol_type = unassigned DNA; note = Bacteriophage uvig_78894 from the Index of /pub/databases/metagenomics/genome_sets/gut_phage_database (ebi.ac.uk)
atgcaggaaaacgaaacctacgtcatctatttgcgcaagtcacgggctgattcagagaagagcagtctcgaggaagtctttacaaagcacgaaagtgagctgcagtcactggcggaaaggacactgggcaatcgcatcccagaggacaaaattttccgcgaggtggtgtccggtgaaaccattaccgacagacccgtgattagccagatcctgaaggtgatggagtctaaaaagatcaaaggcgtgttcgtcgttgatccccagaggctgacaagaggcgacctcctggataaagggcacctgatcaacgtgtttaagtacacaaatacgaaaataataacaccctacaagacgttcgatctgaacaacgactttgatctcaaactttttaagatggaactcgataagggcagtgactatctcgagtattataagatgatccaagctcggggccggattgcatcagttcgaagcggacaatacatcggatccacagccccttacgggtatgataagtactcatacaaggagaacaagcatactgttaatactctgaagccaaattctgatgaagccaccgtcgttcagcttatctatcatctctacgtgaatgagagcttgtcctacgctgccatagcgaacaagcttaataccatgaacattaaacccagaaaatctacgtcctggtccccatattcccttaaagagattttgcacaatcctgtgtacattggtaaagtgaggtggaacagaaggaaaaccgtaatgaagtataagaacgaatccctgcttaaaacacgaccaattgcacttaacgacagcattatatctgacggaatccacgaggccataattgacgaggccctctttgactctgcacaggaatgtaatggcaaaacccctaggaaccattccagtagcaagctcattaatcctctggccgggctgattttctgtgggaactgcggacgggctatgagctacaaaacttataagaataatgccggtagcgagaaacagtctccgagatatctgtgtaacaaccagtctaattgccacactaagagtgctaaagccaccgacgtcatcaaccagatcatcagtgcactggaatgctacatagaagacttcaaagtgaagctggagaacgacgatgggaacagcttcaatgtacgatcacaaatcatctccgtattgaataagcagctccaagatttggaggtgcgcgaggaaactcagtatgagatgctcgagaataagatctacactccggagttcttt

SEQ ID NO: 812 - DNA, 1563 bp, unidentified
  source 1..1563: mol_type = unassigned DNA; note = Bacteriophage uvig_205989 from the Index of /pub/databases/metagenomics/genome_sets/gut_phage_database (ebi.ac.uk)
atgccaaaaaacaagattatgacacccaaccgaaatggtaagatagctgtcgtgtatgcacgctacagcagtcataatcaaggcgagcagtcaatcgagggacagttggaagccgcccacgctgccgctctgagtcgcggatataccattgtccacgagtatattgatcgcgccgtcagcggacgaacggataacagagagcagtttcaacagatgcttgctgacactgccaagcggcagttcgacgtaattctcgtgtggaaggtggaccggttcggaaggaaccgggaggagatcgcacagaataagtatcgctgtcgaaaaaatggtgtgcgggtggaatatgtagccgaaacgattcctgacagtcctgagggtgtgattctcgagtccgtcctggagggctttgcagagtactattctctgcaattgtcccagaatgttctcagggggatgagagtatctgctgaaaaatgtcaggcagtcgggggcggatgcccacttggatataaagtggggcctgataagaaatacattatcgacccggataccgcacccactgtgaaactgatattcaagctctacgctgaaggccaaaccgccccagagattgttcgagttttgaatgggaagggtcttcgcacaaaacgaggcactgcattctccaagaattcccttttctctgtgctgcggaacgaaaagtatagaggcatctacatctttaaagacatccggatagaagggggcatgcccagaatgattgatgatgtgacctttttcaaagtccaggacctgctcaaagtcaacaagagagctcctgcgcacaagtggagcaaggctgaatacctgctgaccgacaaacttttctgcggcaagtgcggttctcccatggcaggagaatcagggacgggccggtctggcaggaaatataattactacctgtgctccaaaaagaagcagtataagacatgtgataagcgggcggttcgaaaggatgagatcgaaaatattgtgatcaaccatgccttggcattgctcggcgatgacgagctcctgaattacatagcggacgccgtatacaactattacttggcgaaggatgaaagcgacgccgacctgaaggccctggagagcaaactgaaacgcacagaaactgctatagcaaatctcatcagggccctggaagccgggatcttcaacgccgataccaagcagagaatggacgagctccaagcggacaaagagcagctgaccgcagctattgctgaaacaaagatcatgtgtgactacaagatcacaagggaacagatcctctactttctgagatcactccgagataaagactatactgaccgcgagtgccaaaaaaggctgattaagactttcatcaacagcgtcttcgtgtacgacgataaaatagttatcaactttaactactccggagagagatctgccgttacagtggatgatgtggatagtgtgtttgcctcacttgctgggaccgccgaggacagcgagcaggtgtttgtgaggtgtgccaggtggactaccatcctcgtccag

SEQ ID NO: 813 - DNA, 1446 bp, unidentified
  source 1..1446: mol_type = unassigned DNA; note = Bacteriophage uvig_580229 from the Index of /pub/databases/metagenomics/genome_sets/gut_phage_database (ebi.ac.uk)
atgtctaagatgaaaggcgtgatctatgcccgctacagccccggtcctgatcagaccgaaaggtccattgaggggcaagttgccgactgccaggcttatgctgaccgcaatgacattgagattatcaaggtgtatgcagatcggcacgtgtccggtaggtcactcaaaggcagaatggagttccagaaaatgatcaaggacgcggaaaagggcttgttcgattgtgtagttacctggaaaattgataggtttggaagagatcgctatgacatcgctaataacaagatgaagctcaagagaacaggcgtcaaactgctgtacagtaaagaagcaatacctgagggaccagaagggatcattcttgagtccgtcctggaaggcctggccgagtattattcagccgacctcgcccagaaagtgtctagagggcaccgggagaacgcgaaaaaaggagtctggaccttccccctgccattgggatacacaagagatgaccagaagcatatcgtacccgacccagtggtcgcccccgtagttagacggtgcttcgagatgtacgctgcaggcgcgaaggagaaagagctgatagagtatatgcgaagccaaggtattacgggtcaacgcggaaagcctatttcaactggggttatctaccgaatgctgcggaatcgacggtacctgggagagtttgaacttcaaggtgttacatacgaaggcgtagagccgattgttccaacagacttgttcgaaaaagtgcagactatgttccccactagccggaataatgcagccgggagggctaaaatgaactacctgctgtcctgtaagtgctattgtggcaagtgcgggactatgatgagcggagaatgcggcaccgggaagagtgggactgtgtacgcctactataagtgcggtaaccggaaaaggggaggcgcgtgtgatctcaagcctgtgaagcgggaacttctcgaggaggctgtgttgaggcataccatggatgatatgcttacagatgaggtgatagaccgactcgtcgcaaagatcatggaaatccaggatagggacgatggccaggcagtggtgacctctctccgctcccgccttgacggtacgaagaaaaagatcgagaacgtcctggacgccattgaaaatgggggcggagcttccctggtggaaaggctgtctgcactcgaggaggagcgagacgcactggacgctgagctgtcaaaggcccagattaagaccccgcgcctcactgccgacgctgtgcgggcatggttgtgcagttttagaaacggcgatatcagtgatgaaggattttgtagacgcctcatagacacatttgtcgatagggtcgaagtgcgagaaggggaggccttgatcatctacaacgccaccaaagagggcgctgccagcagatgttctagcacggcccagttggtggaa

SEQ ID NO: 814 - DNA, 1602 bp, unidentified
  source 1..1602: mol_type = unassigned DNA; note = Bacteriophage uvig_94393 from the Index of /pub/databases/metagenomics/genome_sets/gut_phage_database (ebi.ac.uk)
atgaaaaaaaacccgtgtcgcagttctgaccttagcggtcagagggcggttatctacgccaggtactctaccggcccaaaccaacgggaggaatcaatcgaagggcaggtgagggagtgccgggaggtggccgagagacatgggctccacgtgatccacgaatatattgacaagaaaatgtctggaactaacgatgcccgccccgattttcagcgaatgctgcgcgacgcagacaggggcctctttgacgtcgtgattacctggaaaaatgataggtttgcaaggaatcggtatgacagtgccatctacaagcagcgacttaagagaaatggagtaaagatcatctacgcgaaggagacaatccctgacggccctgagggtataattcttgaatccctcctggagggcatggcagagtattatagtgctaatctcgctcagaacataaggcggggccagagagagaatgcactcgaagggaagttttttggaggatcagttcctttgggctatcggctggatttcgataaaaaattcttgattgacaaacgcaaagctcccattgttcaagagatctttaagcggtatgttgatggagaggctatcctggatatatgcagagatctgaactcaagaggctttaggactgcgcagggaaagaagttcaatcgaagctccctgcatcgaatactgaccaacgaaaaatacatcggggtgtacagatacaaagatattaagagtaactccatcccaaggctgataagcgacgagatcttcctggcggccggccggagagcagaacgcaacaagcgatccagaagaactatgcacgaagacagcgtggactatttgttgactggcaaactgatttgcgggtactgtggttcttctatgggcgggacatgtggtacctctcgctcaggtgaaagacactactactatcactgccattgcaagaaaattaagaaaaccaagtgcatcaagaaatccgaaaggaaagagatcctggagtcactggtgatcgacaccaccattaattccgtactgaagaaccccgatgtcgtcaatacaatcattgaccactgcttggggctccaggagaaggaggaaaagatgtcacccgctacagctttgcgatatgagcttaaagatacggaaaaaaagattcagaacatcttgagcgccattgaagccgggatttttactgacagcacaaaggccagacttgaagaactggaggcacggtgtgccgatctgaagtgcggaatcgccagtgctgaaattgccccacctaagttcagccgcgatcaactccttttcctcttcgagaagtatcaaaaccgcgatgccgacgaccctcgctttatccgggacattattgacacattcatccatgagatctacgtctacaacgacaagatcttgataacctataattactctgataggtacacgaaggaagatgccgcagtgataagcccgcgagctatcgagaaagcagccacggtgactgtcttcggcttcgatagctccggaggggacgagggcaatcggacacccgtgcagaaagcttgtccaatatccatttctgagtgtagttcc

SEQ ID NO: 815 - DNA, 1524 bp, unidentified
  source 1..1524: mol_type = unassigned DNA; note = Bacteriophage uvig_401826 from the Index of /pub/databases/metagenomics/genome_sets/gut_phage_database (ebi.ac.uk)
atgaagccactcagtcgaccctccgggctgccacccaaggctgttatctacgctagattttcctcccacaatcagagggaggagagcatagagcagcaggtggccgagtgcagagcttatgccgctgccaacgacttggacgtgattaggatctatcacgatagtgcgaaaactggcaaaaatgacaatagaacacaatatcaaagactgcagcgcgatgcgaaaaaaggggaattcgaattcgtgatcgcatataagtcaaatcgcattgcccggaatatgctgctcgcattgtcctttgaaggggagatggagaagttggggataagggtcgtttatgcgaaagaggagttcggagatacagcagccggccgattcgctctccggactatgatgaatgtgaatcaattctactctgaaaacatggccgaggacattcgcagagggctgcgggataacgccgaaacatgcaaggtcaccggtgcactgccttacggataccagtctggcgagaacggcaaacccgtgatctgtgaagctcaagccgaaattgtgagggaaatcttcaagcgagtgtctggtggggaggcctttgtgcatattgctaatgaccttaacatgagaggcattaagacacagaagggaggcttctggaataagaacagctttcacagcatcctgaataacgaaagatatacaggggtgtacatctacactgacattcgaatagagggaggcatgccacagatcgtagagaaagaactgtttctgaaggttagcaataggattcataacaagaacaatcctcaggggagacaccgcgaaaacggcgattacctcctgactggcaagctgaggtgtggacactgtggtacgtttatgatgggaacttccggaacaggcaagagtgggaagctccattattattacgcatgtcagaacgcccggaaaaaagaaaaggagtgcgataaaaagaacgtccgccgggactacatcgagcatgagattgccgcggccattaaagaatacatcctgcagggcaccgttatcgactggattgcagactgcgtcgtacaataccagaaggcaaatagggaggcctcagaattggacatgctgaagtcacagcttagtgatacacagaaaagcatcaaaaacataatgaccgctatcgagaatggcatcttcactgataccaccaagagcaggttgttggagttggaacaggctcagaaggagctcaccaataacatcctgattatggaggccgcaagtgccccagttccccgggatcgcgtcgtgacgtggctggaaagctttcggggtggtgatgtcgatgacccttcataccgaaaaacccttttcaactcttttctttccaccgcatatctctatgacgacggacgctgtaagatagtgtttgatataggcggtaagggaaaagagttggacttctcagtactctccgaggaagacgctgatctgtctgggtgctcttacaaacttccgagcaaccctccgacg

SEQ ID NO: 816 - DNA, 1560 bp, unidentified
  source 1..1560: mol_type = unassigned DNA; note = Bacteriophage uvig_183461 from the Index of /pub/databases/metagenomics/genome_sets/gut_phage_database (ebi.ac.uk)
atggccaaacggagggccgcgatctacgcccgctttagctcccataatcagcgctccgaatcaattgaaatccaggtcgagaatagcacacgatattgtcgggagaacggcctggatgtcgtcagggtttataccgactatgccaaaactgggcgaaatactgatagggtggagtttcagaggatgatggacgacgcaagattggggctgttcgacttcgtggttatctacaaggttactagaatcatgcggaatagggatgaaatggcccttgcaaggataatgctgcgcaaagccggagtggagatactttacgctggcgaggagatcgcttccggaagctctggtgtcctgcaattgggaatgctggaggtgctcgcggaatgggagtcagccatagactctgaacggattagagacggcattcagaagaatgcccagcggtgcatggcaaatggtcgaacactctatggatgggacattgtggatgggttctaccaagtaaacgaacgggaggctgccgtactgcgcaagatgaaaaacatgcttttctctggcagcaacatcgccgagattgtgagagccgttgctaacgtgcgatcccgaaacgggaaacccatcattcacgatcgagctcgcaagttgctgatgagacctcagaatggcggcacgtactcatacgcaggagttgttgtagaaggagggatgcccgccctttggccgaaagaggagcaggacatgatcatcgcaatgctttccaaaaaacgaccaagacggcgagtcgatcacgaagaagagtggcctttgaccggcaagctgtggtgcgataagtgtggtaagacactcgctgggacgagtggcacaagtaaaggcggatcagtgtacagttactataagtgtcgccattgcgggaggacctttcggagagatatactggaagacgccatcgttgacatgactatcagcgccgtagagaggccagaagtcagaaagagaatagcctcaggtatggcagcttacaacgccgagattgatgatgctcccttcgaatctgagcttctccggaaagagattcgccgcatcgagcaagcctttgagcgcgtgtggcaggccattgaggacggaattgcaccccctggcgggaaggaaaggatcgcagagctcacagcccgaaaagaagctctcgaggtggattatgaaatcgctaaggctaacgaagggattgaaccggatatgagcgacctcatggactggctggataatatggcacaagaattgacaccacaggagatcctgaaaatgtttgtgagggcggtggagatcaccgaggctgaggtgagactgttctttgcgttcgactactatggagacggctttaccccacccaagtataaggatgaacaccctgtcgaaggctgctcctctaatcctaccatggtggagttgatgaggaagaccgcaaacagtacgtctactgcgaccagagcagctattcagctggacacatgcatagtccgggtcagcaagaactggttcgtggtggtgggtacttgtcagaag

SEQ ID NO: 817 - DNA, 1668 bp, unidentified
  source 1..1668: mol_type = unassigned DNA; note = Bacteriophage uvig_19322 from the Index of /pub/databases/metagenomics/genome_sets/gut_phage_database (ebi.ac.uk)
atggcccgcgccgctaaacaagacagtaacagtgagatcatagatggggttatctacgctcgctacagcgagggacccaatcagacagaagccagcatcgaaggccaggtgagagagtgcaaggaatacgccaagcggaatggcatccgcatcatcaacgtttatagtgacagcaagcacactggcaccaatgataatcgagctgagttccaaaaaatgctcagggatagcaggcggggcgggttttctgtcgtcgtggtatggaaaattgataggtttggtcggaatcgagcagaaatggcacaaaacaaggccttgcttaagctccagggtgtgaaagtcgtgtccgccaaagaatatattcctgattctcccgaaggaattatcttggaaagcgtattggaaggcatggctgagtattactccgccaacctgagccagaatatcaagcggggcatgaaggagaacgcacttcactgtaaaagtaacggaagcggcaagagtctgggatacattgtggacaaagatgggtatttcgagatcgagccaaacgaagctactattgtgaagaccatcttccagaaatacgacgaagggatgaaaattgcagacatatggagagagattgtcgcatccggagccaaaaccaagcgaggcaaggactttacacagtatgggatatcacgggttttgtctaaccgggcgtacataggtgaatacaggtacggagacattgtcaccccgggcggaatgcctaggatcattgatgatgacctctttaatagagtgcaggagagacgggccctgtccaaaaaggagacaccacatcggagatctagctcacctgctgactttctgctcaccgggaaagtctactgtggtcactgcaagtcatcaatgcgcggcgatagcggtacgtccaaaaatgggaactcattttacttctacacttgccatggtaaaaggtataagcacaacgggtgtaaaaagaagaatgtacgcaaagagtggctggagacagaagtaacgagactgaccgtggaaaatatcttgaatgacgaggtcataagcttcatcgcagatagggttgtgaaaatacagaaggaagagcaggagaacaagtcaatgctccattattatgagcagcagttgcgcgacacacaatccgcaatcaataacataatgaaggcgattgaggccggaattattacctcttctaccaagagtagactgttcgaactggaggaacagaagagtatcattgagggagagatcgaacgagagaaaattatcactccagtcattgagaaagagcaagtgattttctcactggagcgattttttggcggggacattaataacaaggagtatcagagaaacatcatcgacatgttcgtgaataaggttatactgtacgacgataagataatcatcacttacaacatctcttcccaaaacgagatttctgtggatgtggtggaacaggctgcttttgctgccttggacgaatgctcctccaagctttctttggcgcctccagcgggcgcctgtccctgcacacagagcgccctcctgtatgtggaacgcttctttatcgcagctcatcagttctatcttaagcccaatcactgtttcgccgttgccgatatctccaggcagggcttcctg

SEQ ID NO: 818 - DNA, 1596 bp, unidentified
  source 1..1596: mol_type = unassigned DNA; note = Bacteriophage uvig_539751 from the Index of /pub/databases/metagenomics/genome_sets/gut_phage_database (ebi.ac.uk)
atgaacgtggtgatctatgctaggtttagctcttccgggcagagggaagagagcattgaaggacaggtaaaggtatgcactgagtacgctgaaaacaatgattacactgtgatcggaacatacgtggatcgagctctgacaggtagaaacgataagcgccctgatttgcaacgcctgctgtccgactccaataataacaatttccaggccgtgatagtttacagtatagacaggttcgggagaaatctccagcagtgtctcaccaacgaaaacaagcttaaacagaatggtgtggcgttgttttcagcaacagagcactttacaaacgacccagccggaattttctatcggaacctgatgatggctcatagccagtactattgtgatgagctctcccagaaaattagacgcgggatggacattaatgcagaaaaatgcctttccaccggagggaatatcgccctgggcttcaaagtggacgacaagaaaaacttccagattgacccggatacggcccccatcgttcagtatatctttgagtcttacgcctcaggcaagacagtcaccgagattatcaaccagttgaacagccagggtcttaagacttctagaggcgtgccgtttaataagaatagcctgcactctatgttgaagaataagcggtacatcggcatctacacctataagggcacagagaagattggtgggatgcctcgaattatatcagacgaacttttcaataaggtcgccgagataatgaacaagaaccggaaagctcccgccagggcaagggccaaagtcgagtacttgctcaccaccaaaatcttctgcgggtattgtaaagaaatgatgaccggattcagtggcactggcaagagtggcaaggtatatagatactatgtctgtaatggcacgaagaaaaaggcatgcaagaaaaagaaagtgaataaggagtacatagaggacctggtggtgaacgagtgcagaaaactgctgaccaacgaaaatattaagaaaatcgccaacagcataagcaaaatttctgagtccgagaaggacaccgcccatctcaaatttctcaaaaaagcgctgagtgaaaatgagaggaaacacaaaaatgcactgaatgccattatcgagtgcgacctggaaagtgtccgcaaatctctttacgaacaaatccctatattggaaaaggagcacagcgaactgcaaaaacaaatcgctctcgaagaaaagaacttccccgttctgactgtcccaatggttcatttttttctgcgcaagctcaaggatggcaatgttgatgacatcaagtaccgaaagactttgattaacgtcttcatcaacaagatctatctttatgacgacaagctgacgattatctttaactccggagataaccccgtgacaattaacgatttcctcctttccgagatcgaggataattctaagaaagcggaggggcttttccttgatggagtggcacctccaatcgagtcattgtatgagcacctgtcaagcccatcacgggaagaaaatgagctgttgtgtagttactgtgctattttttttcctccctcccggtaccataac

SEQ ID NO: 819 - DNA, 1497 bp, unidentified
  source 1..1497: mol_type = unassigned DNA; note = Bacteriophage uvig_408451 from the Index of /pub/databases/metagenomics/genome_sets/gut_phage_database (ebi.ac.uk)
atgaaggacaagtacgcgcagtatttgagaaaaagtcaagctgatcaacctgacgagtccatagccgaggtgcttgtgaagcacagaaccatgcttatggaattggcagacaagatgggcgtcgatgttgctcaggccgatatctttgaggaggtcgtgtcaggggagagcctctatgcgagacccgaaatgttgaggttgctggaacaggtcgaggctggagcctacgccggggtcttctgcatggatattgatcgcctgggcagggggagtatgtctgagcagggtataatcttggagaccttccggcttgcggagactaagattatttgtccgggcaagacatatgacctgactaatgacgcagacgaggaacttactgaaatgaaagccctgttcgcccggtttgagctgaaaatgataagaaaaaggatgcggagaggactgatgcagaccatccaggccggagggtatgtggcaaatcagccctacgggtataggaaatgcaccgtgggcaaactgccttcactcgaaatcaacgaggagcaggccaagttcatccgacacatctacaagcgctacctcgaaggcgcaggtgcacatattatcagcgatgaactcaatgcaatgggttctgtaccgaatagaagcggtagatggtcccggaatacagttaggcacgtgctgcgcaatcctacgtacgctggcaaagtggcctggaatcgagtcaagaggtacaagcccactaagaataacccccgacctcgcgccgagcatcaaaaaatggaggactggatccttgtcgatggtctccacccagctattataccatgggaggaatggcagcaagtacaggagatccgcaagggcagatacattccaagccaaaatcatggccaggtcgctaacgtgctcgccggcctgatccgctgtgggaactgcggccacaacatgcaacgcatgggacagaacaagtgcgatccacgcattctgtgtacggaaaaaggatgtatcccctccactaagtacgacctggttgtggagcggtttatggagagcttggagaggattcgggacgatttgcaaattgaagtgcaacaggctaaaacacctgatatctctggactgacttctgaacagcgagcagtagctgctaagctcaaaaagacagcatccaagatcgacaccttgcatgatctgctggaagatgggacctatgacagggccacatacaaggaacgaatggctaaagcggaagcagagcaggggtcactcctgctccagcaggccgacgtggagcagagaattcagcgggccatgagtcgggataaagccaacatgttgtcaaagctgacatctgttttgcagctttacccaaccctggacaacgagggaaaaaaccagattctgaagtccatagtgaactatgccgtttataggaagagccctaaaagtaaacccggagactttaccttggaaatcattctgaaggacatc

SEQ ID NO: 820 - DNA, 1617 bp, unidentified
  source 1..1617: mol_type = unassigned DNA; note = Bacteriophage uvig_154620 from the Index of /pub/databases/metagenomics/genome_sets/gut_phage_database (ebi.ac.uk)
atgtatcagagcaataatcattcaacttacgctgcattgtacactaggtttagcagagacgagccggatggtgaatcaaacagtatcgccaatcaaaaaaaactcctgctgaactatgcacattctcgcgggatagtgaatacgaagttctttgttgacgatgggtttacagggactaattttaaccgaccagattttaaggccatgatcgccgagtgcgagagcaagaagatttccaccataatcgtaaaagatatgagccgcctgggcagaaattaccttatggtcggatactataccgagatctacttccccgagaacaatatccacttcatcgccatcaacgatgacgtggactcagtgaagggggataatgaattcacaccttttagaaacataatgaacgagtggtacgtgaaagacacgagcaagaaggtgaaaagtgtgatccataacaagggcatgtctggcgaacgaatatgtaataatgtgatctacggatataagcataaccccgataatccaaaggaatggattgtggatgaggaagctgctcaaaacgttcgcaccatatttcagctttttctgaatggcaaaggaacatctcagattgcgaagtatctccactctgaaaaaattttggtgccttccgtctatgctagggagcacggtaaaatttccgcccgcgcaactccagctgacccttgcctgtgggactccaaaaccatcagggagatgctgaaaaggcaggaatacgtcggggacacggtgaatttcaagaccaaaaaagtcagttataagtccaagaaaaagatctaccttgacaaaagtgagtacgtcatttttcccgacacacaagaacccattatcgaccgcgatacttatgaacgggtacagaaaatcatggaaagccggaaaaaagttccaattgtcagagaaccagaccccttgggcggctacatcttttgtgccgattgtgggtccaggatgtatatcaccaggagtaccgtattcccgaagaaaaactgctaccattgcggcagatacaagcgatcttcagagctctgctccagccactacatccgggagtgtgtgatcaaccaactgatcttgaacgagctccagaaagtgttttccatcgtcaagaacgaccgggagcgcttccttaatgtagccattcagtcttatgcgaacagaacatcatacgacgtgaaaaagttgcggaaggataagcagttgtgcgaacagcggattcaggagctggacatcctgattaagaagattttcgagcaatctgttctcggaacactgtcaaaggaaaggctggcaacactggccgccggatacgagtcagagcagtccgagattaaaaacaagctcagtgcaatttccaaggagatcgaaattaccgatagcaaacagctgaatgcggatcgattcatcgccattgttgacaagtatactaacatagattctctcactcctgaaattatgagcgaattcatagacaaggttcttgtgcacaagcctatctatgatggtaacaacaagagacaccagaccattgagatatatttcaatggaatcggcgctttcgattacgacagttgtaatagc

SEQ ID NO: 821 - DNA, 1557 bp, unidentified
  source 1..1557: mol_type = unassigned DNA; note = Bacteriophage uvig_349562 from the Index of /pub/databases/metagenomics/genome_sets/gut_phage_database (ebi.ac.uk)
atgaaagctagcaatatgaaccaaattgacattatgtatctccgcaaatctcgagaagacgcagagcttgagaagtatggtgagggagagaccctgactcggcattataatatcctgtgcgaactcgccaagcggaataatatcgtcgtgagcgacgaatatatttttagagaagttgtgagcggggaatccatcgatgcccggcctgagatccagaaggtgctgagactcgtcgagagtggcatcgtgcgaaacgtgctggtggtagagattgaacgcctcgccaggggcgatactagtgaccaagggcggattgccaaaactttcaagtactctcacacgaagataatcacccccatgaaaatctatgaccccgacaacgagtacgataacgaatattttgagtttggtttgtttatgtccaggcgagaatatctgaccattaaccgcagactgaataacggcaagtatagttcaaccaaggaggggaaattcatcggatccgccgccccttacgggtatgatcggctgaaagttgaaaacggaaagggttacactctcgtccccaacgagaacgctaagtatatcaaaatgatctacgaatgggttctgcagggcaacggcgccatccatatagccaaaatgttgcaggatataggcgccccaacaaccaccggcgccaattggtctagcgctacggtgaggaatatcttgcagaacaagacgtactgcggatacgtgtcctggcagagaaggaagacaactaaaagtcttgaagacgggattaccaaaaaaacaaggatacgcaatgataaagcagctgaatatttcaagggcctgcacgagccaattatagacgaggagacttggcttaaagtccaggagatgagggagcgacgggctttgccaagttgcaacgataataagaacgggttgaccaatccccttgcgggcattgtgaagtgtggatactgcggcagaacaatgcagatcaatacacataagaacaagaggattcgaatgagatgtccaaatctgcagtgtgcgtgtggttccatctacattgatagcgtagagatcgaactgatttcccaacttaaagactggctgaatgggtacagcgcgactgtgggtaaggagacccgcacaacatcccgcactaatagcgtcaaggatatgatcgcaaacctgaccagcgagctcgataaaatctcagtgcagatgaataaggcatgcgacatgcttgaactgggagtttacgacaaggatatgttcatctcacgctctcaaacactcaagaatagacaggctgagatcaaggaaaaattgtctgaattgaagaccgagctcgagaccattaacgcaactgattcacaaattcagtcattgcctaaagtccagaagatcctggataactacttctcttacgacaccaaaacaaaaaacatgctgctcaaagaaattctggaccacgctgtttttacgaaggagaagggaacatccctcgtaaaagacgactcttttgacctggagatattcccgatactccctcggaag

SEQ ID NO: 822 - DNA, 1365 bp, unidentified
  source 1..1365: mol_type = unassigned DNA; note = Bacteriophage uvig_596853 from the Index of /pub/databases/metagenomics/genome_sets/gut_phage_database (ebi.ac.uk)
atgaccaaaacctccaagagaatccggtgcgctatctacgatagagtgtctactgacatgcaagtgaaagacggactgtcccttgatgcccagcgggaggctttgaccgcctatgccgttagccatggttacgagattgttggagtgtacagtgatgaggggctcacggcacgcaagaagctgcagaataggaagaacctgattcggcttctgaatgacgttaaggccgataaaatcgatctgatactggtggctcgattggacaggtggtttcgcaacgtcaaggactaccataatacacaggctattcttgaggcccacggatgcaattggaagaccatatacgaggaatatgataccactaccagcaacggtaggttcgctattaacatcatgctctccgtaaacgagaacgagtgtgaccgggacagcgaacgcatccggagcgtcttcgaatacaaaaaactccaaaaacagaatctgtgtggtaagcctgcgtatgggtacaagatggatgcacagaaacatcttgtgaaagatcccgcaaccaagcacatcgtagaggatatctttgaccactacttcacaacattctccaagaaagagacagtttcttatatcctctctaagtacggcaatcatgccccaacaatgtatcaggtcaatagaatcctgagctccgacgtctatacaggcaaaaaatatgaaatcccggactattgcgaagcctatattacgcccgaccaattccgcaagatagccgaaactagtgactcaaaaataattccacaccagactgaacccttccttttttcatcaatgattcgatgtcctatctgtggcaagtttatgagtgggttcgtgaagagacagtacctcaaaaacggggaaaagtcagagtacaaacgatataggtgcagcgcaaagtttgtggagtaccacaacggcgcatgtatctcagagtctgtgatcgagcagtacctgctcgatcatattgtggagcagttgtcttacgatatgatggaggcgaaaaagaaggagcagtccgcacccttgaatcgctccaggggcatccggcaagaaatagacagactgaaccacatgtatcagaagggccgcatttctgacgcctattacgacgaacagtataatgctctgaacgagaggttgcaaaacgcgctggccagcgagaacattgtcagtatagaagcttacagaccaatttgcgacctcctctccgactcttggcaggatgtgtacagagaacttgatgccgcccacaaaaaggctttctggcgaagcatcattaaagagatccacgtagatcctgaaactaggaagattagtggatttcagctgaatgca

SEQ ID NO: 823 - DNA, 1614 bp, unidentified
  source 1..1614: mol_type = unassigned DNA; note = Bacteriophage uvig_4360 from the Index of /pub/databases/metagenomics/genome_sets/gut_phage_database (ebi.ac.uk)
atggaacagaagaaacgcgtgaattgtctgtatcgcgtctccactatcgggcaggtggagaaagatgatataccaatgcagaggcagtactgtcgggaattcatcgcttctcacccggattgggtgcttcaaaatgaattttatgaaaaaggggtcagtgggttcaaaaagtccgccaaagagcgagacgccatgcaggagcttcagcaagaggccgtggcaggcagcttcgatattcttctcgtatacatgtttgataggttgggccggagggacgacgaaactccctttgtggtggagtggttcgtgcgcaatggagtcgaagtatggtcagccgtggaaggtcagcagagattcgacaaccatgtagacaagctgctgaactacatcagatattggcaggcaagcggtgagagtattaaaacctcagtcagggtgaagactcgcatggagcaactgactaaggacgggtgcttcacgggtgggattgttcccttcgggtacaagctccaaaaacagggcagaattaacaagaagaaccaggaggtgaatgatttcgtaatcgacgaggacgccgcagagatagtgcgctttatcttctacaagtatgtgaatgaaggatatggcgcccagcgaatcagccactacctgctggaaaacggaatcagacgcgcggacggcagcatgattcctaatacaaccatagtgcggatgattaagaacaagctttacatgggggttatttccaacggtaatgcggagtcagagattattcctgagctgcaaatcgttgacgaggcaaccttccggcgagcccaagagctcatggaaaaacggaccacacatcacgctgatacgccactcaacttgcgagggagctcactgctggttggtaatatcttttgcggacattgcaagaataggttgaccttgaccacatctggcaaaaaatatatccgcaaagatggcactgttagaaaccaggtcaagagtcggtatcagtgtcattttaaggccagacaccccgacctctgtgatggacaaagcggctatggagtgataaagctcgatgagatcgtcgacgccttggtgcggtatcagctgtctcgcatcagggtctccgcgaaagacagcctcattgcagagcaacacgaaaaagctgctgcactggcacgctctcggtacaagatgagtgccatgagattggaggagaagcagaaggaattgtccgattacgaagctgaaaccatcaacgtcattcggggcaaaagtagattgaatgttgataggcttaacagcctggtcgctaagtgcaaggaggaaatcgccgaactttctcaggaggtggacgcacagaaggctgacatggagcaccagttggagtccgccgctcaggaacaggccgagttcgagaaactggaatcctgggctgatctgtatgataattgcacatttgaagcgaagaaaatgatcgtgtcacagctgataaaagccgtttacgtctacagagattacaggctggaggtggaatttcgagtatcttttgacgactttagaaggctctgtgttggatgcgagcctaacggcggcaggattgctacagtggagtctgtg

SEQ ID NO: 824 - DNA, 1644 bp, unidentified
  source 1..1644: mol_type = unassigned DNA; note = Bacteriophage uvig_167506 from the Index of /pub/databases/metagenomics/genome_sets/gut_phage_database (ebi.ac.uk)
atgaacaattttggatacagcgcaccccgagcatttgggtactgccggaagtccacgacaggccagagagaggagagcattgaagcccagcagagagccattgtcagttatgcggcggcctccggcttcgagcttgtcaaagtctataaagaccacggaaactctggccggaatggggagaggccgcagttcacacagatggttcaggatgctatcgaaggtggagcacagttcataattgttcacaagctcgacaggttttttcgcaacgccgagaggcaaaccctggtagaggcacagctgcggagatacggggttcgagtgctgagtgcatctgaacactttgatgacaccccgcaaggacagttcatgcggaatgtgaccaaagccattaaccagtggtactcagccaatctggcccaagaggtcgtgaaaggattgagagagaacgcaatgagcgctcggaataccggcggtccccctcctcttgggtatgcggttgacaaggccactggcaagtttgtgatcgcacctagggaggcggaagccgttcagctgatcttcaggctttacctgcaggatgtcgggtacgccggcatcctggatgctcttaacgccggaggttataccactcgaaggggtcgaccctttggtaaaaattctctgtacgacattctcaggaacgagaaatataccggactttatatctggaacaggttggcacccgccgacttcgatgggaagactaacagacgccggttgaaacccagagacgaatgggtctgtgtagaaaatggtatgccacgcatcatcgatcctgcagattggcagagggtccaggacgagatggaaaagagaaggcacagaaatgcccagcataaagcgaaagccttctacctccttagcgggctcgtggtgtgtggcggttgcggcggacagatgggcggggagatgcggcggtataagtcccatggccagcccgtggaatacagatactatagctgcatcaacaagaaacgcctccacgacgacgggggccatgtgcgcgccgtaccagctgataagcttgagaaagctgtggttgattatctgcaacatgtcgtacttcgcccagagaccatggacgcgatttgtgccgcagtcctcggagccacacaaccaggaacgccgcccgccgagagagcttcagaattgcgcaaggagataggcatcctgcaacagaagattgaccggctgtacgctgctatcgaaaatgggctggatgctcctattacaatccagcgaattaatgaccttcgcaaacaacaggctgccctgcaggccgaagtggatgcattgggggaagacgtgaggaagacagccgacacagtggagcaattgaggcgcgtgtgggctaacatccgcctggaaaatatgcaaccagaacagctgagggctttcatccgaaagttcgtggagaagataatcgtgtacgatgacgatgacggaggccatcgagtgagaattgttctgaaccccgctcacgtgactcctgataagcttcctgagaacctcataactgctccactgtcagagctcgacaccttctttggctatgatcggcagcgatctactccagcaaagagtaggctctcccggctgaga

SEQ ID NO: 825 - DNA, 1272 bp, unidentified
  source 1..1272: mol_type = unassigned DNA; note = Bacteriophage uvig_339756 from the Index of /pub/databases/metagenomics/genome_sets/gut_phage_database (ebi.ac.uk)
atggataggattattgagaagatgcgctttgacgtaccaacacagccaaaggcaaagagagtggccgcctacgcccgcgtgtctagcggcaaagatgcgatgcttcacagcctgagcgctcaaatctcttattactccgagatgatacaggaacacccgggctggctgtatgcaggagtgtacagtgacgaagcactgacagggacgaaagaaaatcggtcagggttccagtcactgcttgccgattgcagggccggtaagatcgatatggtgatcgtgaaaagtatttctagactcgcaaggaacaccgtcacattgctcgagactgtccgcgagctgaagagtttgggcgtggatgtctacttcgaggaacaaaatatacataccctttcctccgagggagagctgatgctgaccattctcgcctcctatgctcaggaggagtccctttccgtgtcagagaatcagaaatggcggattcaaaaaaacttcaaggagggcaagccttggaacggaactatgctcgggtaccggaacgttaatggcatgctgacagtggtgcccgaagaagctgaaatcgttaagaggattttcgacatgtacctgagcggcatgggtatacagctcatcgccaatacgttgaaccgagagggcatctctacccgactgggtgccaagttcaaaagaagcgcgatctctaagatgctccggaacgaagcttacgctggaaacctcttgcttcagaagacgtttaaagacaaccatatcgcgaaaagaacccgcattaacaggggagaattgccaatgtattatgttgaaaatgcacacgaggctattatcccttcagaaattttccagaaagtacaggagatgattacacaacgagcagagaaatatgccccaccttccctggagaagcctgccgtatacccgtttactagtctcataacttgtacgaagtgcgggaagcacttccgaaggaagactgttagagggaagcccgtctggatatgtcccacctttaattatgagggaaaagacgcctgcgccgctaaacagatccccgaagaaatcctcgaaaagatcacaagcgacatggacatggaaaacgtcgctgggatcactgccgatgatggcaatcggctgctgtttcattttactgacggcaccgtgaccgagcgcacctggtgtgataggagccgctctgagtcatggaccgacgagatgcggcagaaggctcgggacagaacaaaagcaagaaatcagaaaaag

SEQ ID NO: 826 - DNA, 1533 bp, unidentified
  source 1..1533: mol_type = unassigned DNA; note = Bacteriophage uvig_182703 from the Index of /pub/databases/metagenomics/genome_sets/gut_phage_database (ebi.ac.uk)
atggataagtatgccatgtacctcagaaaaagccgggcagatatggaggcggaaaaactgggtgaaggcgagacccttaccagacacaaaaagatccttactgagttggcagccaaaaagggcctgtatgttgagaaaatctaccaagaaatcatttcaggcgagaccattgcggccagacctgagattacccagctcatacaggactgttacgctggaatgtacaagggtattattattattgaggtgacccggcttagcaggggcaatcaggccgacatgcagaccattatggacatgttgaagtatgccaacaatcgctctgggatattggtcatcacacctaccaaaacatatgacgtagcacatagccctgatgacgaagaatatatggagtttgagctctttatgtctcgcagggaatataagatgattaggaagcgaatgcagaggggaaagatccaggctgtgatcgagggcaattacatgggatcatatcgcccatacggctatgatgtgctgaaaacgaggacaggaagaacactcactcccaacaaggacgaagctcctatcgtccaaaagatgttccagtgggccgctaacaataatatgactgctggtgaaatcgcgcggaaactgaccacaatgggagtgcctacctatacaggcgccccggagtggaacctggggacaatcaagactatactcacaaatcccacgtacattggtaaggtccggtggaatgacagaatgatgatgaagaccttggtggacgggaaaatggcaacttctagacccaggagtaaccacggggaccagtacatggagtgtgatgggaagcatgaggctatcatcgacgaggcgacctttaacgccctgaagaaccgatttcactcagacaaaactaaagcagattgcaaacttctgaatccacttgccggactcctggagtgtgccgtgtgccactatgctatgccctatcatgtataccgggatcgaaacgcactgcccagattcgcccatcgacagagccaaacttgcaaagtcaagagtgtgcacgcatctgatgtgatggatgccctggtttgttgcttgaagaggtacatagccgacttcgagatgaagatagataatctgccatcagaagatgaaaacactatccaggacgaaatgaacgccctcgagaaagagctgttgaagacggagcggaaactgccaaaacttttcgatgcttgggaaaatgggattataacagacaatgagtttgctgaacgcaaggccttgaacaacgagaagatcgaatccctgaagaaacaaatcgctgatctcgaggattccatcccggaaaaagaggattacgaagaaatgatcatcaactttcacgcagcgttgaatgcactcctggacgactccctggatgccgatatcaagaacgaatacttgaagagcataattgaccgcatcgagttctcccgcgagaacaattccgagttcattctggacgtttacattaagagtgacggcgctatggtc

SEQ ID NO: 827 - DNA, 1566 bp, unidentified
  source 1..1566: mol_type = unassigned DNA; note = Bacteriophage ivig_3237 from the Index of /pub/databases/metagenomics/genome_sets/gut_phage_database (ebi.ac.uk)
atggtgatgaaggacgacagggcatatgtgcgagtgtctactttgaaagattcccagaaagacagtcccgagcaccaggaagcgtttatccgcgaacgcgctagccgagagaatattaccatctctaaggtctacgaggatcgagacacggctacgtctatagtggctcgggaggatgtccaaaaaatgatcgctgacgccaagcgcggagaaattcggtccatctggtttgccagtctgagccggttcagcagggacgctcttgatgccatttctctgaaacgaattctggttaatgccttgaaaatacgggtcgttagcattgaggatggatacgactctgccgtcaaggatgacgagcttctgttcggtatcaagagtgtggtgaaccagaacacatcaggcgacatctctcagagctctaggcgggggatcaggcagtcagccgccaaaggaaattatatcggctccatcccaccatacgggtacagaaaggtcgttgtggacggtcggaaaacattggaggtcattcctgagcaagccgagattgtgaagaaaatcttcgagctgtacctgaatgggaacggcgaaaaaaatatcgtcaactacctcaacggagacaacgagaagaatactcctattccctcatatcgcggtggggtttgggggctgaccagcgtacagcggatactgcaaaatgaaaactacaccggttatactgtatacggaagacataccacagaggtggcttataatgatttgtctgatctcatggacaggggaaaaaaactggtaatgaaacccaaaagtgagtggcagaaaactccgttccagacacacgaggccatcattagcaaggaagtgtttgatcgagcgcaagaaattaggctgctcagaggaggtggcactagaggcggcaggagatcctttgtgaatgtgttttcaaagttcatcttttgcgccgaatgtggcactgcaatggttagcatgggatccaaaaccaagaacaagaacgggaaggattatcgctacttgatgtgttccaggagacgaagaaccggcgagattggctgctcaaatggcaagtggttgccttattatgagttccgcgatgagctgataaaggacatacttgaacgcgtaagagaatccatccgcgtgcttgaagaggagggggcaagcgaaattaattcccaactcccagagtccaacacggagaaggacaagaggaaacttgaaaaaaggatagaggagaacagaaagctcctcttcgaggtccggcgacagcatatgctgggtgagattgacgacgcacagtacgaattcgaaaaggggcagtatgagaaggacattagtgattcagaacaccggctcgcgatcatcgaagcaaacgaacgcagaagtctggatcgggaaaaggtgatcagggagacaaagcagtacttgaaggagctgacagaaatgaaaacctacgatgatgtggagaaaacccgaatgttgctgatgcagatggttaagagaatcgaggttaacaaggacggcgaagtcgatgtgcagacatatgtg

SEQ ID NO: 828 - DNA, 1719 bp, unidentified
  source 1..1719: mol_type = unassigned DNA; note = Bacteriophage uvig_297200 from the Index of /pub/databases/metagenomics/genome_sets/gut_phage_database (ebi.ac.uk)
atgacaaaaaaagccgccatctatttgagagtgtcctctattgaccagaactacgaacgacaggagatagagctcaaagcgttggcaaagtgtctgggatacgaggtaaagtacatttttgaagagaaacggagcgcggtgctgaaaatggataccagagacgaactcacacagatgcggaagctgactaaaaatgagatagatcgcatattcatctgggacattacacggctctctcgacgagctatcgattttatcactctgattaatgagttcaccgataagggcatctgtctccattttaaggataaaaacataatcaccctcgatgaggacggtaaacaggacatgtttgtgtctatgtacctgtacatcctgggcctctttgcccagatggacgccgagaacttgaaggcaaagatgaggagcggccgcgaacgcggactggcaatcggtcatgcatatactggctgcgccccgtacggatataaacttatcaacaagcagctctatattgacgaaaaggaggctgaaacagtcagggccattttcaacaattacgtagatgggaaaagtatccagcacataatcgacatattgaatagcaacaaaattcccactagaaccggtatcctttggaccagaaattcaatctatgcaattatcacaaaccccgtgtataaaggcaaaccagaactgacatctattaccaaacgcgacgagaacaagaaacctctcgagaagattactagggtctttaaggcaccggtgattatagagtctccaatctgggacgaagcccaagtccaacggaaaaagcataaaagttttatcgacaagagtaaagaacgcgaagccctcctgcgcggaattctgcagtgcgggaattgtgggaaagcctattgtacagctattaatggatccggggttcccacctatatttgctcagataatagggcgaacattaaccaaaagctcaactgtaagaacggtggcgttgcttgttacttccttgacagcatctgctggcagactatcaaggatatctatgcatacaagaacttccaagataccttcacgaaagagaaggcgaagaatcagcagcttctccaggaaaatcagacgcaaatcaataacttcatcgacaagcagatcgagctggacaaggagaacgagagagtgaacaaggggtacaggataggaatctacacagattccgaagccataagggccaaaggcgagattaataataataaggctcggtacgagaaaatgatcgaggaactcaaggcccagaactccattttgaccgctaagatcaagcaggacttcagccactataagattcctactgtcgagctttcatacgaagaaaagaaggctgtgtgcaaggagttgatagaaactgctaaaatctactcctatccccctaataatcgaatcgtgcagctgcaactgaaaatggggctgatattcaacattgttctgaacccaaaaagaagactgtactacattatcgataattcaacggtgacctttaataatccccaaagtgctccaatttttcttcgggaggaactgaaagacaaggactttacagtcacctgcgacaacaacgattatttcaatgaagagatcttcggcgagtatagcttcgcccagatgtggaacatcatggataagtacggctatattcaggatcaccctaaggttaagaaa

SEQ ID NO: 829 - DNA, 1563 bp, unidentified
  source 1..1563: mol_type = unassigned DNA; note = Bacteriophage uvig_470108 from the Index of /pub/databases/metagenomics/genome_sets/gut_phage_database (ebi.ac.uk)
atgccaaaaatcactaagatcccagcgtccatcagtagatacacctccgcaccgatcgacgctcccgtgaagcgcaaggtggccgcttacgccagagtgagcaccgacagcgaggagcaacttacctcctacgcagcacagataagctactatacggagtacataaaaggccgggaggactgggaatttgtcggagtctacactgatgaagggattagcggctgcagcacaaagaggcgggagggtttccaaagaatgataagtgatgccatggctggaaagatagatcttatcatcacaaaaagtgttagccgcttcgcgagaaataccgtggactcactgaccacaataagattgctcaaagaaaacaacgtggagtgttatttcgagaaggaaaatatttggacattcgacgggaagggagagttgctcctgactatcatgtcttctatctcacaggaagaggcccggagcatctcagaaaacgtgacatggggacataggaaaagatttgccgatggcaaggtaagcgtcgcctattctaggttcttgggctatgacaaaggttcagatggcaagatggtagtcaatcccgaacaggcagagattgtgaagctgatctatcgcctgtttttggagggcatgactccacacaccatagctattcaccttacggagaagggaattaagacgcctggcgggaaagataagtggaatgctactactattcgccgcatccttacaaatgaaaaatacaagggtgatgccttgctccagaaggaattcactgttgattttctgaccaaaaagacgaagaaaaactgtggcgagattcctatgtactatattgaagacgaccacgaggcaattattgatcctgctgtgtttgatatggtgcagcaggaaatggagaggaggaaaacaggcacttcccggtacagtggggtgtcaatctttagttctaaaatcaagtgcggcgaatgtggaggctggtacggagccaaagtgtggcactcaacagaccaatataggaaagttatctatcgatgcaacaataagtacaatgacgagcgatgcaccacaccccatatcatggaagaggaggtcaaagcagtatttctcaagtctctgaacaagctgcttgcaaatcgggacgaactgatcgagaatgtcaagctcatttgtgacaaactgacagacacctccgagctcgaggcggaaaaggaaaagtatgccgaagagatgtccctcgtcgctgatatggtccaggccgctatgctggagaacgcacggattgctctggatcaggaggaatataggcagaaaaacgatgtgttgtctgcccgatttgaggcggccaaaaaaaagcacgacgaattggccatgcgaattgaggaaatcgagacccgcggtcagaacctgcggcatttccaagagaccctggagtcccttaacgggcaggtgacagagttcgactctgacttgtgggggtccctggttgactacatcaccgtttacgaaaacggggaaaagaccgtaactttcagagatggtagcgtgatt

SEQ ID NO: 830 - DNA, 1608 bp, unidentified
  source 1..1608: mol_type = unassigned DNA; note = Bacteriophage uvig_32054 from the Index of /pub/databases/metagenomics/genome_sets/gut_phage_database (ebi.ac.uk)
atgaaacgagtttataccctctatcgagtgtccactaaacagcaagtggataaggcgaagaatgacatccccatgcaacgcatagagtgtcgcgaattcgcacagaaacagggatgggaaattgtgaaagagctcgaggagaaaggagtcagcggctttaaggttagcgctgcagatagggacgccatacaggacctcaaggaggctgccgaaaaaaagaagtttgatgtccttctggtttacatgttcgaccgcatcgggcggatcgacgacgagaccccatttgtggttgagtggttctgtaagcacgggatcgaagtctggtccgtagaggagggagagcagcggttcgacagccacgtagacaaactgacaaattacatccggttctggcaagcatccggtgagagtggtaagactagcatgaggataaaaaccagaatccaccagctgcggattgagggggcgtacaccgggggtccggtcccctacggatactgtttggagcagaaaggtagactcaaccgcaaaggacagcctatacccgacttcgctatcgagccacacgaagctgagattgtgagagaaattttcagaaagacattgtgcgatggatatggcagtcaccgcatggcccagtatcttaacaataggggtcttcgcacacatggcggggcccggtttcactctattgccattatcaggattctgcgccagaagttctactgtggatacatcgacgacgaaacctccgagggcctgcaaaatctgaagatcatcgatctggatgtgtttaaccaggtgcagtcaatcctggatcaaagggcggagaaggatactgaaaagcgacagattgctctgaggacacaaggcgaagcaatgttgtctgggaatattttttgcgctcattgcggcggcagattgaacgtgattagatataaagatcattatacacgaaaagacgggtctgaatactctgtgaaccagatcaagtatgcgtgctaccacaaaagtcgcaagctgtgcgattgtgaaggccagaccacttatctggctgaaagggtcgatgagatcgtgagccaggtcattagacaattgtttgctacgatgaagggcgctcctcagcaggagcggctggaggccacgctgaaacatcagatcgcaagtaaccgagcccagcagaagaagatcaaccatgaacttgagaaaaggagatctagactcggaaaacttcaggaggaaatcgcaaacgcccttagcggggaatcaatctacagcccagaggatgtggcccaagccatttcaaagataaaggaaggcatatccgcactggagcaacagttgtatgacctcgaaaatgacgccttcaaacagaggcgggccatgcagatgatcacaccttcatataatcaattcaaatcttgggccgaggaattcgagcaggcctccatagagcaaaagaagatgatcgcttgtcagctgtttaagaagattgaagtaggccgggaatacaacgttacctttgagctgaatatgacctaccagcagttctgctcagagtgggatggtctcgccactatttttgaacagcaggacctcattgcacaa

SEQ ID NO: 831 - DNA, 1473 bp, unidentified
  source 1..1473: mol_type = unassigned DNA; note = Bacteriophage uvig_399343 from the Index of /pub/databases/metagenomics/genome_sets/gut_phage_database (ebi.ac.uk)
atggatatgcagggcaaagctcgaactgccgtcgtctacgctcgcttctcatgctcaaagcagagggaggctagcatcgatgaccagctgagagagtgtcgagcctggtgcgagagagagggggtcgaagtagtccgggagtattgcgactatgccgtgtccggacgaacagacgagagaccggagttccagagaatgatctcctctgccggggagtccgacctggttgtagtatacatgatggacaggttttctagaaatgagtttgacgcccctatctacaagcgcgaattgcagaggcacggggttcagctcgtgagtgcactcgaacgaattcctgaatctcccgagggcatcatatatgaaaaacttctcgagggcctcgctgcctgtgagagccgaaaaacatcagtgcgcactaggcggggcatggagggcaacgcgttgaagtcaatgccaaacggcggccaacggccatacggttatcgcaatgtgggcggaaagtacatcgtggacgaagcagaggctgcagtcgtgcgggagatctttgaacgcagggctagcggcgagaccaatcaccacatcgccgcagaccttgccgctcgcggtgtcgtgaatgctcaaggccgccccatgcgggatcaagtggttggaaagatcattaggtccaggcggtacgtcggggagtaccggtggggaacgatagtcacccccaatgcttttgaagcgattgttgatgaagccttgtgggagagcgccaacgccaaagtcgcagctcggtctagagaccgggagaggcaagattacagggagtatccactggtgggaaaggcactgtgtgcagtatgtggccatgggctgagtggggagtctgcccatggacggggcggagttcgatatgattactatacttgcagcgccgggggtgcccggaatcacattcgcagaacaagagcccagtggctggaacgagccgtagtgcaagggattcgggctatgctgagcgatcgcgccacggccgaacacatcgctggaatggtggtggagtcaaagaccggtgcggcggtggaaagacgacgcgcaggtatccaggcagacataaggaaggcagacgacgctatgcgaaacctgataagggccattgaggaagggctttacactcctgcgatgagagaacgcatggacgagcttcaggccgcaaaggcccatgctgaagccgaactggcgatggtgcaggaaacaaccgtgaccgtcgaggaattcaccgagttcctcctgagcggtacatccatgagtcatcgacaaattatcgattgcttcgtgtggtctattgttcttgataacgatgatgccgttgtgaccctgaattgggatactagacaggcacagaaaaacgagcccgctagaattgaacttgtgaggaaaaacagtgaatggctccctgagcagggctccaacttgcagcagctggga

SEQ ID NO: 832 - DNA, 1386 bp, unidentified
  source 1..1386: mol_type = unassigned DNA; note = Bacteriophage uvig_290255 from the Index of /pub/databases/metagenomics/genome_sets/gut_phage_database (ebi.ac.uk)
atgagttactccagattcaatagccatcttgtggggatgagggttgcgaagtacattaggtgtagccaccccgggcaagtgaaagagggtgagacactggaagctcagaatcagatcctggatgacttcatcgcgacgaacaagatgactctcgttgatacatttgtagacgaggccatgactgcccggaagaagtataccaagcgaaaagagttcatgcgcctgctggacggggtcaaagcccacaagttcgatatgatcatctttactaaactggatcgctggtttagaaatatcggtgactaccacaaaattcaggagattctcgaggagaatcatgtgaattggaaggctgtgacagaagagtatgacaccaccactacaaacggacgactgtacatcaatataagactgtccgtagcccaggacgagagcgacagggtttccgaccggattaaagatgtgtttagttataagctcaaaaacaagacttatctcaccggaaaccttcctaggggtctcaagcttgatgaaaagaaacacgtggtggtcgacgagaagtggcggcagtacgttgacgatatgttcgattttttcgaagcttgtggatcaaagcgcgcaacgctgctgtacctgaatgagaagtatgaccttaacatttgttacgatactatctaccataacttgcagaacccaatctacaagggcctgtaccatgatgaccccgagttctgtgaggctattatcgaacctgcaaggtttgaccgattgcaaaaattggcacgccataatattaaagtctatcctagacgccagtattatatctttgctgggcttctgatgtgccccttgtgcaatcactatttgcggggaaactcaacatacagaaaactggcatctggcgagaaaaaagtgtacaaagcctatcgctgcaggcagtacagcgcctcttaccggtgcgaatataagtccggccaccgagaggatagagtggaaacctatctccttaaccacctcgatgacgctcttaaggactatatagcttcttatgacattgcatcaaccgcggccttggagatttcttccaccgaaaaaattgcaaaggtggagaagaagttgaagaagctttacgaactgttcctggatgatctcatcgacaaagatagctacagagccgaatacaacaagttccaagatgaaatagccgaactcaaaaagatgccggtggccccagtcgtcgatctgacagagttcaaaaagctgctgcggggcgattggagggaggtatacgacacctttaccgaacaggaaaaaaacgccttttttaagagtttcatcgactatatctacatctacgaggacggctcaatggacatacacttcctt

SEQ ID NO: 833 - DNA, 1719 bp, unidentified
  source 1..1719: mol_type = unassigned DNA; note = Bacteriophage uvig_242919 from the Index of /pub/databases/metagenomics/genome_sets/gut_phage_database (ebi.ac.uk)
atggctaggaaatcccgcaagaacatgcctgtcgccgtagctgagccaaccgacaatttgactgccaaagctgtcctcagcatggataaagaggccaaaccttatcaggtgggcatctacgcacgcctgtcttttgagagcgaggccaacaaggagagggacaccgtggacacccagattgcgtatatccgggagttcatcaattcccaggacgatatggtggaggtggaagtgtacgccgacatctcagtaacaggaactactttcgaacggcctgagtttgaccgaatgattcaggatatccgagccgggagaattaatactgttatcacaagagaccttagcaggctgggcaggaattatgtggaggctggcaactatattgaacgcgtctttcccttcctcgatgtgcgatacatagccataacagatgactttgacaccgccagacctgggaccgacctgtctgttcccctgaagaacatcgttaacgagtactacagcaaggacctgtccaagaaggtcgaaacaggaaaacattctatttgggcgcaagggggcttttccgaggggactccgccctatgggtactacagagcaacagatggctctcgcaaactcctcattgatgaggaagtgagtgataatgtggtgagaatcttcaacatgttcctcgacggcgaaggctatggttcaattgctaaaaccatgcaatctgaaggtattctgtcacctccgaagtacagattttacaaggcaggaaaaaccgagtttgctgaaaaggctcgggagtggcactacagccatgtgaaagagattcttcagggcgagtattacatcggtaacatcgtccacggaaaacagaggaaagcgctcgatacaggacggaagaacaagaagaccgacaaaagtaagtggcaaagagttgaaaacgcccacgagcccatcatagacaaagatacattctatcgagttcaggaacgcatcgaactcattaggtccaagcaccttgaaggctctaagcccaatccagaggccccaaaaaaaccagataatatcttggtgtacaagactaagtgtgcctgttgtggagggagcgttttgataatacggcaccacacttatagcgaccgattcatgtacaagtgctctaaaaggcgaaagctcacggcactctgcgaaaacaagagttcctatgagtacaatgaggtaatggactccgtgttctcagtgattagacagcatatgaagctgtgcatcgaaaagacgaagttcgtccaaaaaatgaataatcgcaaagaaaacatcctgcagtacgatatctacacaaagcagattgcaaagctgcagaacgacgttcgccggatcaccgccaataagagtggcctgtatgaagattatcgggagcagctgatcacggcagaggaactgtgccaataccagaaagaatatgagagcagggtcaatgagatagaagctcagataaccgaactgctctatcgcaggtcactttacgagaaggactttcatattgatgagggttgggaagagaccgtaaacaagtacttgagcaaacggaaacttactagagagttggtggaggcattcgtcagtgagatcgtgttcacagacaacaacattgaagtaaagctgctgtatgatgattttttgaaagagctcctggaggtggcggaggaacgggaagtcgggtccaatgga

SEQ ID NO: 834 - DNA, 1449 bp, unidentified
  source 1..1449: mol_type = unassigned DNA; note = Bacteriophage uvig_138748 from the Index of /pub/databases/metagenomics/genome_sets/gut_phage_database (ebi.ac.uk)
atgaaaatggccgcttattgtagagtgagcaccgaaaaagaggagcagctcagttcactggaaaaccaaagggaattttttgaacagtacgccgacaaagagggagatactttggttaaaatctacgctgatgaagggattagcggcaagagtatgaacaagcgggaggcattcacccagctgctcgaggactcccagaccggcgccttcgactacgtggcagtcaaagatatctctaggtttgccagaaatactagcgacttcttgtatggcattagaactctgcgatctaatggcgttgatgtgcgctttctgtcaaataatcagacggtgataggggagtcagagtttgtattgaccgtgttcgctgcattggcgcaagaagagtcctctaatctttcaaaaagagtgatattcggaaaacggcagaacgcgaaaaaggggcgagtccctaacgttgtctacgggtacaacaagatcgacacatacacattggagattaatgaaaaggagtcttatattgttcagctgatgttcaagtggtacattgagggtgaaggtacgaggcggatcgccattaaactgaacgaaatggctatcccaaccaagaagcaggccaagtgggtgcctaagactatacgcaggattttgcagaaccccatctacattggaaaaatcattaacaataagtccgtcactaaggacttcctcagcggaacacgggaagcaatcccaccggaggaatggtatatccatgagaggcccgaactgcgaatcataagcgatgacgatttcgaactcgtccagcaaaagttcaaagagcggcaagaacagtacaaaaacgacaatcccggtaacagattttcaaaccgccatttgttttctaatctcattaagtgtggcgagtgcggcaagagtttcaccgcaaaagtgtaccagtggaagaacagatatgtgagatatcgatgctgcgttcacaataataatgggaatgctcattgtacaaacagcgtgacagtggatgagcaagagctgctgaatgaagtaaaagcctacctgcttaccgccattgaggataaaaaagcctttgccgacaagcttatgaagcagtaccaggctcagaccactaacgtcgatgtatctaagcttacagatacccgccaaagcctggaaaagcgccggtccaagttcaaggaaatgtttgcagctgacataataacaatggatgaacttaaaaaggagatgtccgcgatcgatgagggaatgaggtccattgacgaggaactcaaagtctatgacgagatccagaaaaaggccacccacattgacgacatccacaaggacatcgagcagatcctgatgcagaacgagtatacgaatgacgatatgcgcaggatcatcgagaacattgtagtgtatcctgataagagtgtggagatctttatgaaa

SEQ ID NO: 835 - DNA, 1818 bp, unidentified
  source 1..1818: mol_type = unassigned DNA; note = Bacteriophage uvig_448583 from the Index of /pub/databases/metagenomics/genome_sets/gut_phage_database (ebi.ac.uk)
atgaccgtagtggaaaggctgaggtcacgcggggttaccccacgcgccgtgctgtacgctcggttttcctccgataaccaacgagaagagtcaattgaagcacagctgagggcgatgcacgaatactgctccaggaatagcattgtcataattcacgaatactgtgaccgcgccaaaagtgctacaacggacgatcgaccagaattcctcaagatgatcgcagcatctcgagaaggaaatttcgactttgctattgtgcacaagctcgaccgcttcagccgaaataggtatgactctgcttattacaaaagagagctcaagaaaaatggcgtgcagttgctgagcgtactggagcagatggacgattcaccagaatctattatcctggaaagcgtgctggaaggcatgtccgaatattactccaagaacttggcacgagaagtgatgaaagggatgagagagtctgccatggactgcagatacatcggtggatggataccttacggctttagggtggatccccagactcatcggtacattatcaacgattatgaggcagaggctgtcagaatgatctttcgggacgtagcggatgggtgcggctacaatgtcgtacttaacaagctgaatagtatgggatatcggacacggctgggtaacactttcagcaaggagaccctctacgagatgctcaggaatgagaaatacaacggcgtctatgtcttttctcgcgccgccagtaaagacgagttgggcagacgcaataaccacctggacaaaccgatcgaggaccagatacgcatccctggcggtatgcctaagatcgtggatgatgagacctttgctcgcgtccaagccatcttgacaagccgaaagcgacacgggcgcagggacggcaagagaaagtacctgcttaccgggatggttttttgtggattgtgcggccatagatattgcggagactctatgcagactggtggggagaaaaatagaagcgtcattgggacctatttctgtaataaccgaaagaaccacggcgcccatgcctgctcaaactcaaacattcaccaggaacccttggaagaactggtgttgaggaagatagaagagatcgtgttcgatgagagcaggattcctggaatcgttcaggcatatcgggaactttgtcaacaggaggatggcgaggacaaggagaagatccggacactcagacagaatctcaagacggtggaacagaagatcgccaacattgtcaatataatagcgaacacaggaagcgccgcccttgtgacccagctgacacagctcgagagggagaaagagcttctcgatgtccaaatccaggaggaagagagggatacgaaagaaaatgatctggacgaggaggccatcagagctgccttccggcaagcacagaagatgtttcactcaggaactttgccccaaatggagcagatcattaacttgtatctcgacaaagtgctggtttatccggactacgtggagattcatctgaataacgttcccacaaacttgcttaatccctcccaaaccaaagatgaaccagctctgggcggattgcatactttctacatcgagaaaatgtgtgagaaaaacgctcctcagaacagaactcggaagaatgggcagtatggttacaacatcttggtgaagcttaatcggaaggagcagaagaaggcgaaaagtcgcagaaagggtcaaaaggagactcgggcacaggatgggctggattcttccaaaaccggcgggcttgacaaaagtaaaagtgaaattgtggccgttctgttctccccactg

SEQ ID NO: 836 - DNA, 1611 bp, unidentified
  source 1..1611: mol_type = unassigned DNA; note = Bacteriophage uvig_596866 from the Index of /pub/databases/metagenomics/genome_sets/gut_phage_database (ebi.ac.uk)
atgcctaatgctgtcatctacgcaaggtattctagtcacgcgcaacgcgatgcgtctattgaccaacagctctctgtgtgtagagctttcgctcagcgcggtggaatagacgttgtagatgtgtataccgatcgggccctgactggaaccaatgataaccgccccggcttccgacgaatgttggcagacgccgccaagggagggtggaactatgtgatagtctatgccctggacaggttcagcagagatcggtacgacgccgccacaagcaaacacaaacttaagcaggctggcgttaagctcttgtccgccaccgaaccgattgcggagacacccgcgggtatcctgatggaatcaatgttggagggctacgctgagtactactcaagggagcttgccgcaaaagtgcggcggggccagatggacaacgccaagaaatgtatggtcaacggatctctgccacttggctattgcaaaggcccagacggtcgctacgctgtggagcctacagaggccgcagtagtccaagagatcttcagaagagttggtgccggcgagcctcttgccaacattattgatgatcttaacgaccgaggactgcgatccaaaaagggccagccctggaataagagttcttttaaccgaatgctggccaacgaaaggtacactggaatctacatctatcaggatattcggataccgggtggcatccctgctatagtgactcaggcagaatttgatgccgtgcaaagggccgctatctccaaaaaaaaccccagaagggcagtcatgccggatgcccccatgagccgccggaggcaggacggggtgtacctcctgaccggtaagctcttttgtggagattgcggctccccactgataggggtctccggaacggcacgcaatcagagcctgcaccattattacgcgtgcaagggcagaatttcaaagacttcacccgggtgcgggctgaagaatatccggagggaagacatcgaatatgaaatcgccgcagcaattaagcaaactatgctgacccctgagacaatccaggcgattgctcaggcaacatacgattatcagtgcgaagcctacgctaatccagacctcacactgctggaggatcagcttcaggagaccaatagagccctgaaaaatctgatgagcgcaatcgaacaggggctctttaccccaacgactcgagacagactcttggaattggaactccaaaaggacaatctgactgctagactggccgtggcaaaaagtagggcagccgatcttcccacacgcgaggaaattattgctgcattggactactacgctaacggggaccttaccgatccactctatcaggaggctctgatcgacacatttctcgttcgagcttacgtgcatagcgatcactatgacatctatttctcacccgacgccaagaccaagacagagtttcctattggcttcaccgacgccaccaaacctgtgttcgctcttcttaatgggagccataggcttcctgaggggccccctaccaacgtcattcggacttccccaacggaggtagtttgtatcgccggactgtaccggttcacggtgtctagaccaagtcgc

SEQ ID NO: 837 - DNA, 1587 bp, unidentified
  source 1..1587: mol_type = unassigned DNA; note = Bacteriophage uvig_42013 from the Index of /pub/databases/metagenomics/genome_sets/gut_phage_database (ebi.ac.uk)
atgtctaacgagaaagactacagcgtgttgccggaggtgaccatcatccaggaatcagcaaaaattgagagcgaagagcataaacctaagaagctgagagtttgcgcctatgccagagtgagcaccgagaaggaagaacaggagtacagctttgagaaccagagggactattatatggactatatttccaaaaggtctgattgggaatttgttggaatctactccgacttcgggctgtccggcaaaaataagaagagaccacagttcatcaagatgattgatgattgccacgccggcaaaattgacagaatcatcaccaaaagtattagcaggtttgcccgaaatacgattgattgcatccagactgtgcgggacctgcgcgaaaaaggaatcggcgtgtactttgaacgggagggtatcgacagcctgtccccgcagtcagctcttgttctctccatcatggctatagtcgcggaggaggagagcagaagcatatctaataatattaagtgggccattcagaagcagttcgctcagggtcactatctgattcataccaagcacttccttggatattcccgggaggaagataacagaatcattatcataccaaagcaagctctggcggtccgaagcatctaccaactgtatctggacgggaaaagtattcaccaaattgcactcgaaatggaactgcgcgaaattgagtctcctgagggtaacaagaattggggcgattccactatactctcaatcctgaagaacgagaaatacaaaggcgattgcctgctccaaaagacctattcaccagacttcctggcatctaaaagatacaagaatactggacagttgcggtcatactacgtgaagagtcaccacgccccaattatttcttctgccatgtttgacgaagtccagaacgagatgcaaaggaggaaagatttgcgaacaggatcaaaagcttatccctccaagtatagcggaaagagttgtctgagcgggcttctcatatgtgggcaatgcgggggtgtaatgcggcggcatgtgcagtaccggaagggcgggggcatcggctactgggtttgtcagcgccacgaccaggggagttgctcaatgatgcaaattaaagaaaaggtcatcatcgatggattgcagatggtgatcaggcagatactgttccagaaggagcccttgtatacggaaatgactgatacaatcatcaactccgctcggaaggcccataaaagttccattaaaagtgtaaacgcaaagattaagcgcgtccagcgccagattcagcagatcaaggacgactacatcgaagatgccataacatacgaggagtactgtcaccttagccgacagttcatccatactgagcccttcctggagctcgaaagggaagagatgatacaagagaataagtgtttggcacctatcgaacagcgcatagaagagatctctcagagacttaaactccagacactctacgagcattttaatgaggatctgcacatgggcgtgcaaaagacccgcaaacaatggtccggcattcttcaggagcctacatatcagcgcaggtctccc

SEQ ID NO: 838 - DNA, 1416 bp, unidentified
  source 1..1416: mol_type = unassigned DNA; note = Bacteriophage uvig_452057 from the Index of /pub/databases/metagenomics/genome_sets/gut_phage_database (ebi.ac.uk)
atgggaagcaaaaccgcagtgatctatgcacggttttcatgcagtaagcagagggaggccagtattgaggatcagcttagagtttgccgcgaatggtgtctgcgcgagggatacgaggtggtgaaagagtacagtgattacgcattgtccgggaggtctgatgacagacctcagttccagaccatgatcgctaatgccggggaaagcgacattgttctcgtgtacatgatggacaggttctcccgagacgagtacgacgcccctgtgtacaagcgggagctgcgcaaacatggagtggagctgtacagcgcgatggaagctatgcctgacgggccagaaaggattctcatagagaagatctacgagggcttggctgccgttgagtccgctaagactgcaatccgggtcaaacgcggaatgaccggtaatgcattgaaatgcaagacaaacggggtgcgcctctttggctatgacgaaggcgaagatggttgttacgtcataaacgaagatgaggcggttctggtacgggaggctttcaagcgcaaaattgagggagaacccgtgaaccacatcgcctctgatttcgctaagcggggagtgaaaacctacgtcggcagaccctgcggttataatatgatctaccacatgctcaaatctgaaaaatacatgggggtctacagttggggagacgtgcgagtagaaggcggtatgccagcaattgtggataaaggtacgtttatgagagctcaggagatcaagaccaagaaacgacgaaaggacgagaattggtgcgattatgctcttgccggccgcgttatttgtgcctcatgcgggaggaatttctatgggatgtcaggtaactctagaagcggcaagaggtatgactattatacatgtgggtcatgtaaggaggtgaaggtcgtccgaaaggactggctggaaggcgagattacctcccggatcagggaaatgctgaaagatagagacactgcaacacggatcgctgagatggttacagacgcccaggatgacaagactaccagggaggcccggaagtccgctcagaacgccaagcagagcgccgaaactggccttgctaatattctggcggcgatagaacaaggcataattgcccccggaacacaagagagaatcgcgcagctcgaaatccagagagacaaagccgagcgggacctggcctctcttaaagatcgcacgatcgatccagaagattttgtggatttcctcatgtttggcgccacccttgacgacaagcaattgctggatgcctttgtctatcaagtgatggtaagcaacgaagatgtgattgtggtcctgaattataacacgaaggagaatgaaccggcaaggttcactttcgagagggtacgaacaaacctgagatggtgtgcaatc

SEQ ID NO: 839 - DNA, 1857 bp, unidentified
  source 1..1857: mol_type = unassigned DNA; note = Bacteriophage ivig_4185 from the Index of /pub/databases/metagenomics/genome_sets/gut_phage_database (ebi.ac.uk)
atgttttgtaagtgcggcatcatcgagctgcacagaaagatccagaaaggagggtcagccgttaagaaggacgtgaaggtgatcaagggagatacaaccctcaagagaaccgctagtggctgtgtgcagcgcagcattaagcgcgtggccgcatattgcagagtctccacagacaccgaggaccaaatcaacagctataactcacaggtggagcactacaccgagttcattcaaaaaaataaggagtggactttggcaggcatctatgccgatgaggctataaccgggacacaagtcgaccggcggattgatttccagcgactgatcaacgactgtatgaatggtgacatagacatgattattaccaagagtatcagtagatttgccaggaacactctggacacactgaagtatgtgcgcaaactgaaggaattcaatgtcgctgtattttttgaagaggagaacatcaatacgctgactatggatggagagctcctgctgaccattctcagctctgtggcacagcaggaagtggagaacatttccgcgaatgtgaaaaagggtttgcggatgaaaatggagcgcggagaaatggtaggtttccaaggatgcttgggctacgattacgaccccgagacaaagagtatttccattaacgagaaagaagccgaaatcgtgcgctacatcttcagacgctatattgaaggggttgggggaatggttatttcaagagaactggaagagcaggggtatctttctcctcgaggcaataagcgctggacagaaacaaccgtgttgggaatcatcaagaacgagaagtacaaaggtgaccttatgatgggcaaaacgtacactgtggatccgatctctaaacgaagactggacaacttcggcgaacaggacaagttttacatcgaaaatcatcatgaaccaataatttccgaggaggatttcgaaaaagctcagggaattcggctcaggaggtctaaaaataggaatactgtcgcaaacaatggaggcaagcgagaaaaatacagccggaagtacgctttttcttcaatgttggagtgcggattttgcgggcacaaccttagcaggcgaaattggcacagctcatccgagtatactaaggtgatctggcaatgcgtcaatgcgaccaagaacggcaaaaagtactgtcctcacagcaaagggatcgaagaggaagccatagagaaagcgttcatggagtcttataggcaggtgtgtcataacaacgttgaaattacaaacgagtttctgaagacagtcgaagaggagctgaaagataacagcctggctaaggacctcaaaaaaatcacgaatcagttggataaaattctcaagaaggagaaagacctcgtagaacttcggctcaacgaaagcatctctatggacatctatcaggacaagtataatgagatagcaatatccaaggaaaagttgctggctgagaagcggacgctggaggtgacacttaccgatgagaaggccttgaaaaaaaggctggaaggctttaagaaactccttgagtctaacaagtatctggaagaattcgaccgagccgtcttcgagtccatagttgataaaattatcatcggcgggactaacgatgaaggtgagatcgatcccgccatgataaccattatctacaaaactggcaagaaagacagtcaggatgggagactcttcaaaagtaggcggaagaacgccaaggaggttaatgaggagactgataacaagctttacccacattcctcagatgaggtcaataatctgtactcctaccccattgacaatacctgtggcgatggtgggattatagtaaaaaaaatcgaa

SEQ ID NO: 840 - DNA, 1323 bp, unidentified
  source 1..1323: mol_type = unassigned DNA; note = Bacteriophage uvig_58086 from the Index of /pub/databases/metagenomics/genome_sets/gut_phage_database (ebi.ac.uk)
atgatagttaacgaaatcgtgccacaggaattggccaataagaggctccgcgtctgtgcctacgctcgagtcagcgcggataatgaggacatgatgcattccctgtctgcacaggtgtcccattataacgatatgatcgcctctaaccctaagtggatttttgctggaatctatgcagacggcggactgagcggaacaaaaaccaatcggcctgaatttcagaggatgattcaggattgcaagaacgggaaaatagacctcatcgtgactaaaagtatctcacgctttagtaggaatacaatagtgatgctggaaaccattaggatgttggatgagatgggcatagacgtctactttgaggaacagcagatgaacatcaaaagtgggaagggcgagcttatgcttaccatcatcggctcttttgctcaggaggaagctcggcaggtgagcgaaaatatgaagtggcgaattaaaaaagattttgagaagggcattctctggggtggcaataacccgtatggctatatcatcgacagaaaagagaaaagactggtcatcaatcccgagcaagcaaaggtggtgagactgattttcgaggagtaccttgacgggaaaggtgcgtctctgattgccaaaaaactgaataagatggggttcaaaacaatgatgaactcagagtggaataacaacgttgtaatggcaattctcaaaaacgaagtctacacgggcgacctgctcttgcaaaagacctatcgcgagaactacctcacaaagaaaactctcaagaacaagggcgaactgcagcaatactacgtagaggatgaccacgaacccattattacccacgagatgtttgaggagacacagcgaatacggaacgaacgcattaaaaagttcaaaaataagatctcctactcaaacaaggcctaccccttcaccggaatcatcaagtgttcctgttgcggaagcacttttaatcataagaccactaagtacaataagctgtggatctgtaaaacgttcaacatgaagggtaaggagtattgccaagagtcaaagcaaatcgatgagtctaagctttatgaggccattaacaagtatttcgggtgggactgcttcaaggaaaatgatttcaaaacaaaagtggagtatctgattgcaaagccaaataacgaaatagagatgcacttcaaagacgggaatgttgctattatcaaatgggaagatagaagtcggagcgaaagctggacttccgaaatgaaggagaaggccaggcagaaaaagatcgaacagtacaagaaaagaggaggtgggttgaatgga

SEQ ID NO: 841 - DNA, 1611 bp, unidentified
  source 1..1611: mol_type = unassigned DNA; note = Bacteriophage uvig_75655 from the Index of /pub/databases/metagenomics/genome_sets/gut_phage_database (ebi.ac.uk)
atgaggcgcggggctaccctgcaggaacaggaagatggaataatctatgctagatacagctcacatgctcagaaagacgccagtattgaacaacagattagagagtgcatggcttttgcccaggcacagggaattagaatcgtcgaggtatacgctgatcgagccgtgtcagggaagacagaccggcgcccagattttcagcgcatgatgcgagatgcggaaaaagggaagttccggtacgttgtggcgtggaaatcaaatcggatgggccgaaacatgttgcaggctatgatgaacgaggcaaagctgaacgatatgggtattcgcgtgctttacacggaggaagacttcgacaataccgcggcaggaaggtttgcgctccggtctatgatgaatgtcaatcagttctactcagagaatatggccgaagacatacgaagaggactgaacgataacgcccttcagtgcaaagtgaacgggtctttgccattgggcttcgtccgaggtgaggacgggcgatatgcgttggacgagccgaaagctgccatcgtgcaagagatttttatcagagttgcctgtatggaaccttttgtggacatcgcaaacgacctgaatgctcggggcatcaagacaagcaggggcaagccatggggtaaaaactctttccacgccctggtgacaaatgagcgatacctgggggtttacatctacgatgacatccgcgttgaaggcgggatccccaggattattagcgacgagctgttttacaaggtgcaagaggtccttaagacgaagaagaatcctcaggggcgcccgcggagttacggagaatatctgctcacaggcaagctctattgtggtcattgcaagagtcctatggtgggaatatccgggaccgctcggtctggcgccctgcactattattatagttgtcaaagacacaggctggagaagtcatgtgataaaaggaacgtcaggagagatgtgatcgaagaggccgtggcaagagccattcagggctacgcactccggcccgatattatcgaatggatcgccgactctactgtagagtatgccaaaaagcaagaggcagccagccacgtagctgtgcttgaaggtgaactcgcagaagttaaaaggtctatcaaaaatctcatgtccgccattgagcagggaatcattaccgataccacaaaaggcagactgctggagctcgaggccgaacaggccaggctcactgctcagatagcagctggacgcgcagacataattgtcattcctcgggaggatatcgtcgccggccttactatgtatagggatggcgacataaaggataaacgctaccaggctaaactgtttgatactttcttggtagcagtgtatctgtacgacgacgacatgaagatcgtcttctccttctccggcaagcagaataccgtgagaatccccctggatgcctccgtggtcgccgacattgaaaaccctagcagcgcaaccgggagctatgttcccccttccggtccacccaaagagtcccatacaaaccaagcgccaactatctacatggtgggaggcgttttcgtgctcgcttgccccctcaaggccgagaag

SEQ ID NO: 842 - DNA, 1521 bp, unidentified
  source 1..1521: mol_type = unassigned DNA; note = Bacteriophage uvig_442715 from the Index of /pub/databases/metagenomics/genome_sets/gut_phage_database (ebi.ac.uk)
atgccatactgcatgtatctgaggaaatctcgaaaggactccgaccatccaggccaagctgacgaggatgtcctggcaaggcacgaaatgcttctgcgcgagactgccaaaaggctgggactgaacgttactgccatctatcgagaggtggtcagcggggactctatcgctggcaggccagttatgcagcagttgctccgagaggtgtccgcgggagattgggacggcgtgctggtcgtcgagattgagcggctggccagaggcgacacccaggaccagggaatggtggctaaagcctttcaatactcaggcaccaagatagtaacccccatgaaggtatacgacccaaatgatgaattcgacgaagagtactttgaattcggactgtacatgtcccggcgagagctcaagacgatcaaccgccggctcatcagagggcgcgaagcctcagccaaacaggggaaatacattgggggcgtgcccccattcggatacgacaagcaaaagctgcccgaccagaaaggttacaccctggtgcctaatgcagacgcagatacagtgagactgatctatgatctctatcttagctcaagtgaaatgggcaccggtgatctcgctacagtattgaacaattccggttaccggacacagaaaaaccacttttggactgcgaccaacatcctcaagattctctctaatcctgtttacatgggcaagatcaagatgggctaccgcccaaaagtcaagatattcgaagacggaatacagaaggtgattaggcctgtgaaagcatttggagaatatacactgatcgacggattgcatgatggcctgatctctgaggaacgctggtaccaggcagctgagaaggtgaaaagtagcgccctcgtgaacacacctaaaaagtatacgcctcagaacccttttagcgggctgatgaagtgccagctctgcggttatgccgtcaagcgacagacaaatgcaagaggtggcagtatctattgtgttacccccgggtgtccctgtcagtacacagatatcagcgagcttgaattgcaactgattgcatccctggggcaaatcctgagcgaattccaaaaaactgagtctgagagaactgttattcaccacgagattaccacaatagaacagcagttgacccaactgaaacgagagcaggaacgccttcagaggcagttggacaatctcttcgaccttcttgagcaggggatctatgataagagcacttttacatccaggagaactcatcttgagcagcagcttgctgaaaccgaggaaacactggctcaactgaccaccaacagagatgagatacaacacaaacaggcccgggccgctgcgatgatccccagaattcagtcagtgttggatacgtacctgtacctggatagtgccctcgagaagaatcggatgttgaagacgattttgcggcgcattgattatcttaggctcgatcgggatactccgccgtctcttactctgtatcttaattgggaggac

SEQ ID NO: 843 - DNA, 1605 bp, unidentified
  source 1..1605: mol_type = unassigned DNA; note = Bacteriophage ivig_244 from the Index of /pub/databases/metagenomics/genome_sets/gut_phage_database (ebi.ac.uk)
atgtttgataatatcctcgacgaatactgtatctatctcagaaaatccaggaccgatctcgaagccgaagcccggggcgagggagagacactggccagacacgaaaaaacacttctggaactgtccagaagacttaaaatttccattaagaagatctaccgcgagatcgtctctggggagaccattgccgagcggcccgtaatgcaaaaagtgctcagtgaggtggaggacgggatttggaaaggcgtgttggtcatggaggtggagcgactggcacggggcgatacctctgatcagggcacggttgcacaaagtttcaagtacagcaacacaaagataattactccaatgaagacctacgatcctaacgacgaatacgacgaggaatatttcgagtttggactgtttatgtccagacgcgaattcaagactatcaatcgccgcttgcagcggggccgaatgtcatcagtcaacgaagggaaatacttgggaagtatagctccctacggttatgctagatataaacttgttaaggaaaaagggtactctctggagatcatcgaggaggaagctgaggtcgtgaaaatgatctttgattggtacgtgaatggtaagcagatgcccgacggaacaatagaggcaatggggaccagcctcattgcccacgagctgaatatcctccaaatacctagtgccaaaggcggactgtgggtgactgagaccatcaacacgattatcaggaatcccgtgtatatggggaaaattaagtggggctccaggccattgaagaagaagaaagtcgacgggaaaattgttaagaccagaccacggatgtccattgaccagatgatcctcatcccaggtcgccatgaagccatcgtaacagaagcgctttggatcaaggcaaacgagaaactcgctctcaatccgtctaagcccatcagccctcgcaaaaagataagcaatccacttgcgagcattatgatctgcggcaagtgcaacagaaggctgatcaggaggccctatccaaacaggaacgacactctgatgtgtcctgtcaaagaatgcaaaaatgtttctagtgaactgatattggtcgagagccgcattatggagggactgaagaactggcttgcttcatacaaagcagattgggaaaatcggcgagtggagaaaaaggaagatacacaagtagacttgttgggtaaggctattaagaagatagaaaaagatattgcggacctgcagacccagcttgacaaccttcacgacttgcttgagcagaaagtgtatactgtcgaaaagttccttgacaggagccagatcatatctgagaagatcaagaataaggtgctggacaaggaatcactgcttaacaagctgaacgacaatgagtcccagatcaccaataaggagattgttattccgaagctggagcacgtgctggatatctattataagactgatgatcctgccctgaaaaacgagctcctgcagagcgtgatcgagaaagtggtgtacacgaaggagaaaggcgcccgatggcatggatcactcgatgactttgaaattaaaattttccctaagctgccccggacacatcac

SEQ ID NO: 844 - DNA, 1578 bp, unidentified
  source 1..1578: mol_type = unassigned DNA; note = Bacteriophage uvig_271148 from the Index of /pub/databases/metagenomics/genome_sets/gut_phage_database (ebi.ac.uk)
atggcgaaagttaccataatccctagcaagatcaaccccatcacccttacccccgtcggacaagtggccaaacgcaaggtcgctgcttatgctagggtgagcactgactccgatgagcagtacactagttacgatgcgcaagtgacatactacacgaacttcatcaatggcaagccaaactgggagttcgtcaaggtgtatgctgatgaggggatatcagggaccagcaccaaaagacgggatgagttcaaggaaatgattgagtccgcgctcaacgggaaaatcgatctgatcataacaaagagtatctcccgctttgccagaaataccctcgatacgatttccattactcgccagctcaaagccaagggtattgaggtgtacttcgagaaagaaaacctgtggtcattggatgacaaaactgagtttctgctgaccataatggcttcaattgcccaggaagaatcacgcagcatctcccagaacatcactattgggaagaggtggggaatgaaagaaggaaaggtttctttcgcatataagaattttctggggtataagaaggtagacggcaagatagtaattgacgaggcccaggctgagacagttcgcctgatctacatgatgttcctcaaggagggaaaaacatgtacaggtatcgccgaatttttgaaatcaaaaggaattccgaccccttctggtaaaagttgcaactggactaaaaacacagtctacagtatcctgacgaacgagaagtacaagggcgatgccctgctccagaaaaagtacactgccgattacctcgaacacagagtcgtgcctaacaacggggagcttccacagtattatgtggagaataaccacccagctataattgaacgggaagtttgggagatggtccagactgaaatgatgagaaggtccatgttgggagcagcatattctggcaatagcatcttcgcctctaagctgatctgcggcgactgcggcaaaccctacggtaaaaaaaagtggcatagcacctctaagtacgcacgagagatctataggtgtaatgcaaagtacaataaggggcagacacagtgccaaactccctctttgacggaggaggacatcaaggctagattcatcaaggcatacaatcttgtgatgtgtgacaaacagcaagtgatcgaagacaccctggctgtgattgaacttttggctgataccacagacttggatgccgaaattgctaatctgcagaccgagattgaacggatttccagcgacgtcagtctgatggtgcgagaaaatgcaaggacccaacaggaccaaatcaagtttgctgcccgatatgaggagctgacaaaagagtatgagactcagaaggcagccctcgaaaaagcagtaaaggagaaagcctacaagacaggcaaagcgaccaagatgcgggcctatcttgagacaatgaaacaggccgatgactttctggaagagtggagcgacgaagcgtggattctgatggtggaaaccgcaactgtgaaccgggacaaaacaataacgtttaagttcgccaatggcaaggagatcgccgtt

SEQ ID NO: 845 - DNA, 1605 bp, unidentified
  source 1..1605: mol_type = unassigned DNA; note = Bacteriophage uvig_460604 from the Index of /pub/databases/metagenomics/genome_sets/gut_phage_database (ebi.ac.uk)
atgtccgatgggaagtgtattgtgaagtatctcaggctgtctttggaagacgaagatatgttggatgagtcaaactctataacaaaccagcggattgtcattggacagtacatcgccagtaagaacgagttcaaaaatacagaggtactggaattcaaggatgacggctactctggtaccaattttgacagaccaggatttcagagcatgatggagctggtgcgggacggcaaagtctccaccatcattgtcaaagatctctctcgcttcggtcggaatcatattgaagtggacacttacttggagcagatcttcccctttatgaacgtacggtttatcgctatcaacgacaacgtggatagtatgaagtacgagtcaggcatgccagggatcgatgtgggatttcgcaacatcattaacgaacatcacagcatagacacttcagtgaaggtcaagcgcaccctcattcagcgacagaaagccgggaagtacatgggtgcacgcgctccttatggctaccttaagccggatgaagacgtcacttccttggtaatcaaccctgaaacagcacccgtcgtgaaaatgattttccagaaatatcttgacgggatgaatattactcaactcgcccggtatctgaatgagcagaaaataatgtcaccaggccaatataagcgagaggtcctgaagaccggagttaaaaaaactaccgaaaagtatatctggtatccggtgacagtgaggctcattttgatgacagagacttacaccggtaccactataggcggaaagtggaaggtggcaagtgtgggctccaataagcacttgaaaacgaaggaggaggactggattgttgtggagggcacccatgaggctattgtgagcaaagaggtgttcgacgcggttcaggaaaaattggagctgaattctaggaaacggagcaaaacacacaacaacaactaccccctgaagggtctggtgaagtgtgggggctgcgggcagaatctgcagcacgttacccgatgtaatccccatttcaagtgccctaggaaattcaatgccgctaaccaggattgtgtaacagataatctgtacgacgacgagttcaacgagatgatctttagggccatcaagctgtttgccaagatctcagacgacgccgaaccagttctggagctccaaaaagcagaattgaaaagcaaagtcaatggcgctgccaagaaaatcagagatgcgaaagatagcatatccaggtataagcaccaaaagaccgaactgtacatgcgctacgcgatggaagaaatttccgaagaggagttcacgcgcaagaatgacaagctggataagcagatcgagaaggagacgctcgccatcgctcaaatcgagaccgaacagtctgaggccgcagaacgactgttcgagcttcctagcgatgggagacaatgccttacagatttgatcgagggaaacgaacagctcactagagagatagccgcaacctttatcagaggaatcaaggtgtacaacgacaaaagaatagaaattgagtggaattttgctgacgaacttgtgaagtatgtcgaacaggttcagaaaatttgcagt

SEQ ID NO: 846 - DNA, 1560 bp, unidentified
  source 1..1560: mol_type = unassigned DNA; note = Bacteriophage uvig_171430 from the Index of /pub/databases/metagenomics/genome_sets/gut_phage_database (ebi.ac.uk)
atgaagaagattaccaaaatcggtaccaacgagccattggcggaaaagaagaagcttaaagtggcagcctactgccgcgtctctactgcttctgatgagcaactgatcagcctggaagcccagaaagcccattatgactcatatattcggtctaacgatgaatgggagtatgtaggattgtactatgatgaaggcattaccgggacgaagaaggacataagggctggccttctctccatgatcgcagactgtgaggatggcaaaatcgagttcataataacaaagagtatctcaaggttcgccaggaacacaactgactgcctggagatggtgcggaaacttacggacctgggtatttccatcttcttcgagaaggagaacatcaatacaggtagtatggagagcgagttgatgctcagtattttgtcttccctggccgaaagcgagtctgtgagcatctctgaaaatagcaagtggtccgtccagaagagatttcaaaacgggactttcatcattagttaccctccttacggatacgaaaatgataacggtacgatggtgatcgtacccgagcaggccgaaattgtgaaagaaatatttgcagcctgcctggccggcaaagggacccatgccatcgctagagagcttaacgatcgcggtattaagacgaagaagaatggaaagtggagcgcagggaccgtgaaagctatcctgactaacgaaaaatatacaggagatgtgatattccagaaaacctattccgattcaagctttaacaggcacattaattacggggaacgagacagattcttgtgtgaaaatcaccatgagccgatcattagccacgaagattttgaaaaagtccgggccgtcctggaccagagagcgatggagaaaggcaacggcactgacacataccgctatcaaaatcgctactgtttttcaggcaagattaagtgtggcgagtgtggcaccacattcaagcgacgccaacactataaacccagtggaaattacgttgcatggacctgcggcaagcacctcgaaaacaagaaggagtgttcaatgctctacatttctgacgagagcatcaagctggctttcctgacaatgatgaacaagctcacatatggacatcaggtcattctgaaaccacttctgagaactctgcggggcatggacgataaagaccggctcctcaggatacaggagttggatatctgcattgaagggaacaccgacaggaaacagatcctgacctccctcatggctacaggagttcttgaacccgcagttttcaacaaggaaaatgccgctctggtcatggaagagcagaaactccgggcggagaaggagaaacttgtgaattttgttgggggagataaaaccagaatcaaagagctccagaaactcatggcttttaccactaagggggtgatgttgactgcattcgaggacgaaacctttcttgcctacgtagagtccatcacagttgagtccagaacaaagatagtgtttcacttgaagtgcggcctgaatctgactgagcgactggtgaat

SEQ ID NO: 847 - DNA, 1587 bp, unidentified
  source 1..1587: mol_type = unassigned DNA; note = Bacteriophage uvig_585929 from the Index of /pub/databases/metagenomics/genome_sets/gut_phage_database (ebi.ac.uk)
atgaacaacatgcgcatcgtggagatcccagcctcaatgcgcgagaacgccggcagaaaaaacacagtcagaaaattgcgcgttgccgcttactgtcgagtgtctaccgaagaagaggagcagcaaggaagcttcgagatccagaaactgtactacaccgagaagattaactctacacccgaatgggaagtggccgggatctacgccgatgacggcatttcaggtgttcacacgaaaaagagggatggattcaatcaaatgattcaggattgcaaaaagcgcaagatcgatttgatactcactaagagtataagccggtttgcgaggaataccctggacagtatccagtatgtccgaatgctgaagcagatgggtatcgctgtagtgtttgagaaggagaatataaacactgcgactatgaacagcgagatgattttgaccgtgctttccgcattcgctcaggccgaaagtgaatccataagccagaacgtggccagaggcaagcggatgggatataaacatggtaagttcgcattcccttatggccgcattatcggatataggaaaggggctgacgggaagccagagattatccccgagcaggcagagatcatccggctcatattcaattcctacctgcagggcgacagcttgcaaagcattaaagcgaagctggaaaccgctggagctctgaccgcaagaggcaataccgcctggtccgcacaatccatccaaagaatcttgcagaacgaaaaatactgtggtgacgtgctgcttcagaaaacgtttaccgaggatgtgttgacaggggttcataagaaaaacactggccagttgccacagtactacatcgaaaactaccacgaagggattgtatcaaagcagatatttcgagaggtccaggcagagattgctcgccgaaattctaaaagtgccgccaatcaaaggaagaggcgaagaggccggtataattccaagtacgctctcaccgagaggcttgtctgcggggattgcggcagcccttacaaacgggtgacgtggaatatccatggacgcaaacagatagtttggagatgcgtcaaccgaatcgagtatggcactaagttttgtggatcaagtccctccgtgccggaagaaaagcttcacagagcaattcttaaggccgtgcaggatctggccgcaaatttcactgacgaagtcgcagcccaaattaacgggatactccactctatccagactggtgagtctattaagcctaatctgcaggagcagttggaacagacacagcaggagtttgaccgactcctggagatgtctctggatttcgatgaagacacaccttttctggacgaccggttgaagaagctcaatagcaaaattaagaggctcaaaaaggctatcgacgatagcgctgcccaacaggagaaagcttcacaacccgaaatgctgctctccgcgaagaacctgcagatccaggaatatgatgacgcgctgacagcccggattatcgaaaagattacagtaaggtctcggaatgagatcgagatttggttcatcggcgggtatgagaaagccatgccactggag

SEQ ID NO: 848 - DNA, 1497 bp, unidentified
  source 1..1497: mol_type = unassigned DNA; note = Bacteriophage uvig_120053 from the Index of /pub/databases/metagenomics/genome_sets/gut_phage_database (ebi.ac.uk)
atgaagattcgccgcgtgcagcctagtcccatcctccagaaaaagcttagagtggcagcttacgcaagagttagcgttgataccctgcaccattctctcgcggctcaggtgagctattacagtaacttgattcagaagaatcccgcctgggagtatgccggtgtctatgcggacgaagggatcacaggaacgtctacaacccaccggactgagttcaaaaggctgatcgccgattgtaacgctggaaaaatagacctggtgctcgtcaaaagtatcagccgattcgctagagataccgttgattgtctgaatacggtgcggcaactcaaggagaaaggcattgccgtccgatttgaaagggagaacattgattctatgtccgaggacggcgagctgttgcttaccctgcttgcaagcttcgcccaagaggagtctcgctcaatcggggataacatccggtggggagtgcgcaggcgctttgccgaaggcattccaaatgggcacaaagcgccgtacggctatcagtgggacggtgaaatgttcaggatcgtgccgtcagagggcgaaatcgtgaaggaaatctatcggaggtacctggctggtgagtcagcttatgccatcgccaacactctggcaggcagaggcattaccgggcgccagggtcggccaattgagcagacaaccgtaaaagatatcctctctaacatcagttacacaggcaccatggctcttcagaagaactacataacagagggacatattagaaaaagaaacaagggcgagttgcctatgtatcttgtcgagggtattttcgaactgttgatctcccgagacgactttgataaagcccaggagattcgcaaacgccgggccgagagagcagtgaatcgaaacccagtcttgatgcctctgagcggaatggtaaagtgcggctgttgtggatcagggttttctaggcggaccgctggcaagtaccggaggtgggcatgcaacaccagagaacgaaagggcagagaatcctgtgactcccgccctatcaaggaggaggagctggtggctgccgttagaactgtgatggaaaaggaggactttgacgcaacgaaactccgaaggaaagttagcaaaatagtgatacacggagatagaattgacttccatttggtgaatggacggataaaaaagactgcgaggatctacaatggacaacgggggagcaacccctttactaataaggtatactgcgcttcatgcggttccaagtgcgaacgggatacatggactaagggcactaaagtctggagctgctcccaaccacgaacaaagtgtcagctgaggaggctccccgaatctgaactgcgcgaagccgccgcatcctttttcgggaatgggtatgagggcaagattgtacagaatgtcgagcgcatcataattagtgacgacgaagttgtgttccacctcaaggaaggaggggcctacaggtggcagagaccctgcggg

SEQ ID NO: 849 - DNA, 1929 bp, unidentified
  source 1..1929: mol_type = unassigned DNA; note = Bacteriophage uvig_365399 from the Index of /pub/databases/metagenomics/genome_sets/gut_phage_database (ebi.ac.uk)
atgaacattgactatagccggctgtcaagggatgaggataaggccaactacatcagtatagagaatcagaagaagattattcagcgatatacggaggaaaacggcattgtcatagacaagagcttcgaggatgacggatacagcggctacaccatggataggcctgcttttaacgagattaagtatcttatcgactccaacatggtggacacccttatcgcgaaagacctgtctagaatcggaagacacaatgcaaatgtgctgctgttcctcgaacgcgcgaaagcccacaacgtgagaataattcttatagatgacaactatgacagcgccaaagactctgacgacatgattgggataaagacctggtttaacgagcggtacgtggtcgacggctccaggaaagtcagacgggcactcggcgtcatgcaggagacagccagcctggttgggcaggttccctacggttacgtgaaagacgacttcatcaaaaatgcttaccacgtggaccctgatgcagcaatctatgtacaaaagatctttgaactgtatgctaacggggctgggtacctgaaggtggccaaaattatgaccgaaatgggagctcccacaccgaatgtcatgtacgcccgacgccagcaagagaaaggattgtcctccaaacgacccatctctaaaacttggactgtggatatgatccgacgcatggtcactaacgatttttacatcgggacactgcggacgaagaagggtgaaaccaagggaattaacggaaagaagaagcgaaaggaaaaggaagagcactgcgtattcgagaatgcccaccctccaattatcaccaaagagctcttcaatctggtgcaggaactgaacgagaagcgcagcaaagggaatggctataagggcattcggaaatatgaaaatccttatgctggcttgcttgtatgtggtgactgcggcaggggtttgaccgtcaacaattataataaggatggcattacggcctacgcatgtagaaattaccgggagaatggtaaagatttctgcagcgcgcattcaatcaaaatgcaggagctcaatattattgttaaggactacctctacctttgcagaggagccttgaaggaaatgatcgaaagtctcgattctatactcaaagagcaggtgaaacaggtaaccggcaaagataacagactgaacgtgttggaaaagaacattgaggccaccaagctggagctcaaaaccattatggaaaggaagatcaaagacatcacttccaatccatctatggcagatatagtgagcgagatgtatgataagatgcaggaagagaaaatgatcgcaatcgattcaatgcagaagcagatcaaggagtacgagaatatcgataagagtaagagtgaaatcaagcggaacttcaagagtgctctcgaagtgtttgactcaatactgaaggccgacgaattcactcataggcagctcaacacaatcatagataacatctacgtctatgaggataatgtggtggaaattcaactgaagggtgagctgaagtctatctttaagaatcaagtcatgatccgcatgtccaaggaggagcggatgaaacttaacattatcaactatatcactaacgtgtccgcctttgggatgacaaaacttattgctgagatccgcaagaatgacagtatctctcatgacaatctgaaatctattcttgaccaattcattgagaaaggatacgttatagaggttgaaaaaaataagaggaataacacactgcccccatatatttgtgtggaagaacgcgacaaaatgatcgatggctttgagattaggacagatatgtgttccatacatcgatggtccaacgttgggacttcattggagacactgtcaaaaatgagcacctggatccagagatacatc

SEQ ID NO: 850 - DNA, 1614 bp, unidentified
  source 1..1614: mol_type = unassigned DNA; note = Bacteriophage uvig_432464 from the Index of /pub/databases/metagenomics/genome_sets/gut_phage_database (ebi.ac.uk)
atgcaagagaattacattgtagggatctacgcaagactcagcagagacgacgagcgagccggggaaagcgtctctatcgaaaaccagaaggaaatgttgtccaggtatgtgcgcgagcaggggtggacactgtatgactactattgtgatgatggtgtgagcggaactacattcgataggccagggctgaatagactcgtgcaagatgctaccgaccataagatcaatctggttctttgtaaagatctgagcagactggggcgcgattacatcgaggcgggaaagtacacggacttcgtttttccgagccttggatgccggtttatcgctctcaatgacggtgtggataccctgcgcaagaataacgaaatgctggtgatcctcaagaacgtcatgaatgacctgtacgcccgggacacatctagcaaaattaaagcagtgaagctgtccacgttcaaaagtgggaagtatgtgggctgttatgcccccttgggatatcgaaaatcagaggctgacaagcacgttctggaaatagatccggtcactgctcctgtggtccgccacatctttgacttgagacttcaaggttatggattccgcaagattgctctccagcttaacgccgagaaagtgcccgcacctaggtcattctactatatggctgaaggccgcgaaaacctgagaggcgagaccccattttggaatgacgtaactgtgaaaaccattctgcggaacgaggtgtatattggtcacatggtgcagaataagactggaacggtcagctacaagaaccataaacaagtttctaaacctgaatccgagtggatcaaggtcgagaacacacacgaaccactgataccacaggagacttgggatgccgtacaacggatggataatcaccccgcacggggcagatctggcaaaaatggcaccatcgcgctgtttgggggactgcttcggtgcatggattgtggctcatccatgcgctacatgagagattataggaaaaaggtctccgagaaagaaccagagtacaaggcctatgtgtgtaataggtatgccagtgggggtaagaacgcatgctcatctcactacatcaaccaaaaggtcctgacacagattgttatgaccgacatcaggtgcaaggccatgtgggcccagaattctcgcgagacattgaggactcagctgctcgctcgagagcagaacgcgtccgtggagcggactaggaccctccaggccgagttgaatgccataggcaaacggctccccgagttggacaagcttatacagagtgcctatgaagataaagttctgggccgcattcctgaatccgtgtgcgtaaaccttcttaaccagtacgaagcagaacgaagagagaaacaggagcggcgaaaggaactcacagagcagttggctgcacgcctggagaccgagtcaagtgtggacgcctggctggatatgatgcaggactacgcgcagctggaagaacttgatcgacctaccttggtgaggctcattcagaagatcgagataagtgagaggtaccccgttgacgaccatgaggaaagagacattcatatctactacaacttcgtcggctacattgaagct

SEQ ID NO: 851 - DNA, 1842 bp, unidentified
  source 1..1842: mol_type = unassigned DNA; note = Bacteriophage uvig_204911 from the Index of /pub/databases/metagenomics/genome_sets/gut_phage_database (ebi.ac.uk)
atgaaaattaaggacaagcgctttaaaattacggccttgtacgaacggttgtctaaggacgacgaggtccagggcgagagtaatagtatcgtgaaccagaaacgcatgttgacacaatacgccgagcagcacggatacgttaacattgagcattacacagacgacggttggacaggtacgaactttgaccggccggattggaaaagaatgctggcagatatcgaggcaggaaaggtcggaacagtcatagttaaggacatgtcaagaatcgggcgcgactatctgcaagtgggcttttacaccgaggtcatgtttagggagaaaggggtacattttatcgccatcagcaacggagtggatagcgaacgcagggagagcgcagagttcgctccctttctcaatatcatgaatgaatggtacgtgcgcgacacatctagaaagatcaccacagtgttgaaggctaggggcatgtctggcaaagcacacactactaaccggtgttgttacgggtacaagaagtccgccgacaaccccgataagtggattatcgatgaggaggccgctgaagtcgtgcgacggatcttcaatatgtgtcttaatggaaaaggtccatatcagatcgcccgcgagctggcagaggacaaagttgagagacctgagtactatcttggcatccgcgggcgaggggttaacaccaagagttttgatatggagcacccttacatgtggcgaggagggaccgtgaagaccattcttactcggatggaatataccggctgcactgtgaattttaggacgaaaaaggaaagctataaagataaacgccccactaaagtggactcatccgaatggattattttcgaagacactcaggagcccataatcgacaaacacacctgggagacagtgcagaaattgctcgatactcctcgaagaaagggagtcttcgaggaaaacaaccctctgacaggaaaagtgttctgcgcggactgcggtgccaaaatgtatcatcaccggaatgctcaagggatttggaaaaagaattacttcaaggcgggcgagatgatctatcatgcaccagaagacaggtatgattgtagcaacaatattagaggcagacagcgatacgagaagctctgctgctcccactctattacaactaaggcccttgagaccttggtcctggaaacaatcaaaagaacctgcgactatgcggtagagaatgaggccgaattccgcgaaaaggtgtgtagcattagcgaagagcaacagggcgaactctcagtgcggttggaaaaaaggctggcccagaagcagaaacgggtttctgagattaatagactgataaagaagctgtacgaagataacataagtgggaaactgaacgataagcgattcaacaccatgctctccgattatgagtcagagctggaggctctcgaagaggatatagagcgggataacgccgagctcgagggcatgtgtgcaaagaaaaccgatgtagacgtgttcatggaactggtgaaaaagcatatggcttttgatgagctcaccccagctatcctgaatgagttcgtggacaaaatcatggtgtacaaggcagttggctccggcgctaatagaatgcaggatgtggacatctatctgaactatatagggaggttcgtcgtcccagaggttgtagtggaacttacggaggaagaaaagctggccgaagctaagaggcaggaaaagctcgaaaaaaagcgagcctccaataggaagtacatggcgaggaagcgagaagaagcccggaaggcctgggctgaaattgaggcagagaaagccaaggtcgtaggtcac

SEQ ID NO: 852 - DNA, 1626 bp, unidentified
  source 1..1626: mol_type = unassigned DNA; note = Bacteriophage uvig_97244 from the Index of /pub/databases/metagenomics/genome_sets/gut_phage_database (ebi.ac.uk)
atgaagcagaagcactatattgcaggcctgtattacaggttgtctcaggaggacgaaaggcaaggtgaatccgtgagcattgataaccagaggacaattctccgcaaatatgcagaagagcgcgggttcactatccatgacgaatacatcgacgacggtgtatctggcaccacttttcagaggcctgaagtccaacggctcctcgacgatgccaagactggggtaatcaacacaattatcgtcaaagatctgagtcgattcgggcggaattacatagaggttggtcagtacgttgattatgtgtttcctgcttttggaattcgctttatcgcaatccaagataatgttgataccgaaaacagagactcaggcgcaatggaaatgatgccaattatgaacgtgttcaacgagtggcacgccgccaacacatccaaaaagattcgcgctgtcaagaaggcccatgcgaaggaaggcatctacaccgctaagaaggcggcctacggatataagattggagccgacaagagacgaaccccagtgatcgacgaagagactgcccccatagtgaaaagaatttttgaaatgtatgcctcaggcatgtccccactgaagatttctgagacccttaacctggaaggcgtcatgagtccggccgtgtatgcccataccgtgctggggcagaagccccggccttacgggataggcctttggcttgcctctacaatacgagatatgctgaataatataatctacataggccatatggctcaactgagatggacaagcttgtcttacaagaaccataagaggttcagaaaagatgagagcgagtgggcagttgtttacaataatcacgagccaatcatatcacaggaactgtgggataaggtgaaggagaggaaaaaaagcgtggcgcagggacgaaaaacgaaaattggctatacacaccccctctccggctttcttttctgcgccgattgtgggaataagatgaaactctgtacaagtatctcacggaaaggaacgcggctgtatcactttgactgtgggcatcacattcgctacggcaaggcttactgcttctcacactttatctccgcaaaagtggtggaggagatcgtgctgggagacatcagagagatggctcagcggattgtgcttgacgagaaagctgttagagaagatttcatccgacacaatgccgagttggctgaccaggctatcaaaagtacgaaaaaagaactccaggctaagcggaagcgcactgaagaattgagcagactgatgcaggtcgcatatgaagaccgcgtaaggggtaaaatgcccgaggatatttgcatcggattcatccagaaatactctgacgagcagaagaagctcgagaccgagatcgcggagaaggaggccaagcttaccgaaactgagaacaccattcaatccgcagacgagttcgtacggaatatcaagaaatacctggaagccccggaacttagcagggagatgtgctatgagttgattgatcgcatcattatcggagggtcccctaaaaccactggtaaagagagagagatcgatattgtctacaaggtggacatagcaagcgtcctgaggcacaaactgaacaag

SEQ ID NO: 853 - DNA, 1299 bp, unidentified
  source 1..1299: mol_type = unassigned DNA; note = Bacteriophage uvig_81090 from the Index of /pub/databases/metagenomics/genome_sets/gut_phage_database (ebi.ac.uk)
atggaacgcaccattaagagggtcgacaggaagttgccaaagcaggaaaaactcattagggcagctgcctactgccgcgtctcaagtgataaagacgccatgttgcactctctgtccgcgcaggtcagctactttagtacaactatacaaaatcaccctggatgggtgtatgtcggggcctacgttgacgaggggataaccgggacgaaggaagaccggccaaagtttgtgaagctgatggaagactgtcgggctggacggatagacctcatcatcactaagagtgttaccaggttcgcaagaaacacagtagtgttgcttgattccatcagagagctgaagagtatgggcatcgatgtgttttttgagaaggagaatatccatactctgtccgccgacggagaacttatgattagcatcctggcatcttatgcccaggaggagtcaaggtccgcatcagaaaatcagaagtggagagtgaaacggaacttcgaggagggaaagccatggaggtactttatgcttggctatcgcaacgttgatggggaaatgaccattgtgcccgaggaagctgagattgtgaaggggattttccgggattatctcgctggggtaggcatcacaactatcgtgaacaatttgaacacttctggttttgtgacgcaatcagggtataagttccataactcagcagttgaaagaattctgcgaaactacgcgtacactggtaacctgatgctgcagacaaagtatcgggagaatcacctcacaaagcgaacccttgtgaataatggcgagctccccaagtaccatgccttcgaaacccatgagcccatcatctctctggaggtcttcaacgcagtacaggaggaaatgaaaaggcgcgccgagaagtacgcgcctaaagctaaacgacagcagtatccgttcagcggtctgatggtatgcgccaactgcggcaaaaattatagaagaaaagtgaccaccaccggaccagtgtggatttgccccacatacaactcctctggcaaagccagttgtgcctctaaagccatacctgaaggaatacttatggacacaactgcctccgctttgggcgtcgataagtttaatgaggcattcttccacgagagggtcagcaaaatggttatcagcgtgggcaactgtatcacataccacatgaaagatggtaccgagattcaacgcgtgtggaaagaccgcagcagacgagaatcctggacccctgaaatgaaagagaaggctcgccaggctactacggaacggtggagaagcaatggc

SEQ ID NO: 854 - DNA, 1683 bp, unidentified
  source 1..1683: mol_type = unassigned DNA; note = Bacteriophage uvig_227260 from the Index of /pub/databases/metagenomics/genome_sets/gut_phage_database (ebi.ac.uk)
atggcctatcggaacagatatgatgaatatctgcgaaaacggcaaggggttctcccagacgctaagcagtggaaggccgccgattacgctaggatcagtcgagaggatggcgacaaagaggagagtgacagcatagggacacagttcgatatcatcgacgactacatagcccacaatgacgacattacgtttatcgatcggtactctgatgatgggtggtcaggcactaattttgaccgcccagattttatgaggcttatggaggacattaaaaagggtaagatcaactgcgtgattgtgaaggacttgtcacgcctgggcaggaactatattctggtcgggcagtacctggaaatgatcttccccatgctgaacatccgattcatttccgtcaatgacagaattgactctatcaaggacccagcttcaatcaacaacgccctggtgagcttcaagaacgtgatgaatgacgagtactgccgagacatttccaataaggtccggagttcacttgataggaaaagatccaagggcgaattcattggctcatttgcgtcctatggttacatgaaagaccccgatgaccatcatcatctcattgttgatcctgtggcagcagaggtggtaaaaaatatttttgactggtttctccaaggtatgagcattatcggcatagccaaaagactcaaccacatgggaattcccaatccttccgcatacaaaaggcaatgcggacttaactataagcatcccgcaggccagctggattccgcctggcccgacagcagcgtgaagcgggttttgaagaatcgcctctacgtcggggatatggtgcagaacaagaaccggacaaagagttacaaggtgcaggtttctgtcgctgtaccggaggaaaattgggtgatcgtaccgaacatgcacgaggccattattgatcgcgagaagttcgaaaccgtgcagcaactgttgatgcgagacactaggacttcaccaggcattaatcacgtgagtattttcgccgggtacatacgatgtgcagattgtttgagagctatgggcaaaaaaagtgtcgctcaaagctacggtaagtatcattactatgtgtgccagacctttcgcaaggctggccggaacttgtgtaccaaacacaccatcagggaaaaacagctgtacgatgccgtgctggcaacaatccaatctcagatcgatctggccgtaagcatggatcagctggtgaatgacctgaaatcccagaatgtccgggcagctaaaagtagcagacttgagaagatgctgcagctcaaggaagaggaatatgaaaaagtgtcaagatgtcgaatcgacctttatcctgattggaaagcgggaatcctgtccaaagatgagtacttgtctttgaaggcaaaaatcggagaacagctcgagcaaatagagatcgccatagctaacatcaaggaggagatcagcaagtaccagtctgcgcctgtcagcgaaaataagttcatctcttcttttctgcgctatagaaacattcaggtcttgacaagggaggttatcgtggagctgatagagatgatctatgttcacgaaggaggaacgattaccatccagttcaagtaccaggacgaatatcagcgcctcctcgaccttatagatgaacagggattggcctccgccgcgggg

SEQ ID NO: 855 - DNA, 1578 bp, unidentified
  source 1..1578: mol_type = unassigned DNA; note = Bacteriophage uvig_581146 from the Index of /pub/databases/metagenomics/genome_sets/gut_phage_database (ebi.ac.uk)
atgctgtacgaactgtcaccctctgacatcagccacataattatctacctcaggaaatcaagatccgacgatccatatatgagcgttgaagaagtgctgtcaaagcacgagacccagctgcaagaacatgccgtgagcgtgtttggacagaggattccggaggaacacattttccgcgaagtcgtgtctggcgagactatcgcggaccggccagttatgaagcaagtcatgaagctgcttgagaccggctccattaaaggggtgctcgttatagagccccaacgactttcaagaggcgacttggaagactgcggcagaatcataaacgcctttcgctatacaaatactttggttctgactcctccaaaaaactataatttggcagatgagtatgaccgaaaattcttcgaaatggagcttacccggggaaacgattatcttgaatatactaaaaagattctgaaccgggggaggatcgcctccgtcaagcaggggaactttatcggaagcgtgcctccatatggctaccggaaggttcagatcgggaccggcaaaagtacatatcacagcttggaggtgattcccgaacaggccgatgcagtaaagcttatgttcaagctgtacctggcaggcaacggttttaccaatatcgctaaaaaactcgacgagctgggtatcaaacctcttaagagtagtgtgtggtctcccgctgccatttctgatatgcttgaaaatcctgtctacatagggaaaattcgatggaattggaggaagacggaaaaaaagatcgtgaacggacagattgtgaagacacggccaaaaacttccgacgtctcagaatgggtctacgtggacggaaggcacgaaccaatcattgatctggcaacattcgaggccgctcaggagaggcgcggtaagacccctaaggtgaagaaaaacaatgagctgaagaatccgttcgcgggactcctgttttgtggtacatgtgggaaggctatgtctcttaaaatctacactcagaaaaacggctccaagtgcgagatgatgctctgtaataagcaaagctggtgcaataccaagagtgtgaagtacgacgtatttgtagatagaatcattgaaaccttggaaaacacgatcgccgacttcgagttgaagctcgagaatgatgattctagtactgcggacctgcaggagtccatgattagcaacctccaaaatgagctgaaaagactcaaagaaaaagacatccgccagaaggatgcttacgaggatgggatctacacaaaggaggagtatgcaagccgcaatgctaagcttcaggaggagattgcaaaagcctccgctgccctggaacaggccaggacatctatacctgccacaattgattatcgcgagaagatcgcgcggttcaccgactgtctcgcagctctgaaaaaccccgatatgtcagccaccgagaaaaacatcttgctgaagagctgcatcgacaaaatagtataccataaccatatggagtccaagcccggaatcggcagatacgttgagaatgtctttacgatagacgtgttccttcgattg

SEQ ID NO: 856 - DNA, 1626 bp, unidentified
  source 1..1626: mol_type = unassigned DNA; note = Bacteriophage uvig_64010 from the Index of /pub/databases/metagenomics/genome_sets/gut_phage_database (ebi.ac.uk)
atggctccagccctgcgacgggttgtgagaaccatgccgcaaatcgctgtggtacagattgacgacactccccaggtcaagaagaccaaagtagctgcttacgcacgcgtgagtaccgaaaaagaggagcaagaagattctttcgaaagacaggtggagcattacacacatctcatcgaatctaatcccgagtggacaatggttgaggtgtataaggacccaggcattactggaacaaaggccgagaaacgccctgattttctgaggatgatcgacgattgtagggcaggcaagatcgataagattctcgtcaagagtgtgtcccgattcgccagaaacaccgtcgacgccctgaactacattagggagctgagggacatgaatatcagcgtgcagttcgaaagcgaaaatatcgatacgctgactcccggcggcgaagtcctgctcaccattttggcagccatggccgagcaggagtcccgcacaatgtcaaataacattaagtgggcgtaccagaaaaagtttgagaaaggggaggtgacaattaatactggactcatgctgggctataccaagaatggtaaagatgaagatgggagggcagtatacgctatcgtggaggaagaggccgaaattatacgaagaatctaccgcgaatatctcaacgggtcaaccgttactcaaattatccacgggcttgaggaggatggcgttaagaccaaacgaggtacggaaaagtggtatcacaccgccgttacatctatactgacaaacgagaaatataccggcaacgcttacttggggaaaacctataaacccgacgtcctcagcaagaagcgatatagaaacgacggagaaaaagccccgatgtactacgcagaaaacagccaccctgccattgtcactatggaaatgttcaacatggtgaagctggagatggagcggagaaaaacggagaaggagaaggcggtcgggaatactaggtatacgtcaaagtacccattcagcggaatccttatatgcggaacttgcggttcccgcctccgccggcacgtacggaaaacaggcagcgggaaacttgtgcctagctggggctgtagtaacagaattcttaatggtagggaagtatgtgactcctatcatgtcaacgaggatgtcctttatgccacctaccatgccgcggtgcaggctatggtggaggacgcgggtagtatcctttcaacactggagtctgctaccgaaaaggaacttcagccatctaataaggccgctctggatgaggtggagcagaagatcatcgaccttcaggagaaggtgttggcccttcatcggcagaaacgcgctcaagcagtcaacgacgcctactacaatgcacaggtgaacgattattcccagcaattggctgctttggaggaccggcagcaagccctgcagactgcagatgcgaggtacgccacagttcggatgtggctggcagactttcagcagcacatgcaggaaggcgacgcaacagacgacagagatggaaagatgatgaaatccctggttgaatctattataatatggcctgatcggatggagatccactttaagtgcggagtgaatatcgaacaaaaatacgtgaaa

SEQ ID NO: 857 - DNA, 1470 bp, unidentified
  source 1..1470: mol_type = unassigned DNA; note = Bacteriophage uvig_87948 from the Index of /pub/databases/metagenomics/genome_sets/gut_phage_database (ebi.ac.uk)
atgtccgataagcccactcctaagaatctggaaatcggagcagcttatattcgggtctccactgacgatcaggccgagctgtcccctgacgcccagattcgggttatcatggaaactgcgaaggcggacgggtacatcatcccgaaggagttcattttcgaagagaagaagggcatctctggtcgcaaggctgataaccgccccgaatttcagcgcatgatcgctgtcgcaaagagtcagaaaccttccccctttaagagactgtacctttggaaattctccaggtttgcaagaaatcaggaggagagcacattttacaaggggatacttaggaaaaagtgcggcgtggagattaaaagtgtgtcagagccaatcgctgatggaatgtttggacgattgattgagaccataatcgaatggttcgacgaatactactcatacaaccttagtggcgaggtgcttcgagggatgaccgagaaggctcttaggtctggctaccaggctgtaccatgccttgggtataaagccgttggagggggtaggcctttcgttctggatccagacgccgtgccgatcgtcgagtacatctttcaagcctatagccacggaaaagacatgttgacgattgcccgagatctgaacctgcagggctataagaccaacagagggtgcccattcgagctgcggggcgtgcagaggatactcgtcaataggttttacgttggcgacgtgacctggaatgggatcactttccatggtacgcacgagaccatacctgctgtgacatctgtgtttgagtcagtccaagcccgcatccagtccgagtaccagccccgacacagaaagcaagctagcgcaacagcacattggcttagtggcctgctgaaatgcggagtgtgtggtggcagtctcggcttcaataggactaaagacgaaaagcgccgccccagctttttccaatgttggaaatatagcaagggagtgcatcctgactcatgtagcgtatctgttagcatcgccgagagggccgtgctggattccttgagatcagccttggaatctcacgatgtgacctatgaatatattccacccgagaatcctgtaacactgacagaggaggccctccttaaggaagcccttagccggctggatgtgaaagaaagacggatcaaagaggcgtatgaatctgaaattgacaccctggaagaatacaaaaataacaaggttcggctgaaatctgaacgcgcagagatactgagtcaactcgaaaagctccagcaaggtcagccaagcgctcccgatccccagcagtccaaggagaaacttctggcacagatttcaacagtctacgatttgattctcgacccagacgtgtcctatgtagagaaaaacaacgccctccggagaatcttgaaaaagattgtcttcgacagaaagacaggcacgttcactttcttttactataccctc

SEQ ID NO: 858 - DNA, 1608 bp, unidentified
  source 1..1608: mol_type = unassigned DNA; note = Bacteriophage uvig_392002 from the Index of /pub/databases/metagenomics/genome_sets/gut_phage_database (ebi.ac.uk)
atgcagactggcaagatcaccgccctgtacgtgcggttttcttatgacgacggaattgacgcagaatccggcagtattgaacatcagaaatcccttctccggtcctacgcagagagcaatggattcactaacttgagctattacgcagatgatgggtatactggaacaaattttaacagaccagatttccagaggatgcttggggacatccaaaaaggcctggtgagtacagtcatagtcaaggatatgagccggctgggcaggaattacctgatggtaggtcaatatgtggagatggaattccctaagcacaacgttagattcattgccattagcgacaatgtggattctgccaagggtatgaatgacttgctccccattcacaacttgatgaacgaatggtacagccatgacatcagcaagaaagtgcgcgccatgatacgacaaaaggggaattcaggtcaggcaatcgcgtcaaagctcccctacggctactataatacacctgaagataaacagacctggctgatcgatgaatctgccgctaatgtggtccggaagattttcgacctgtacctgaaccagtcatttgggatgtaccaaatcgccaaaatcctcaaagccgaaggagtgccaaaacccacttaccatcgaagattggccaaaggcattaaagtggaggcagatgacctttgtgtgtggagcgcttctgttgtcagagggatcttgcagcaccgagagtacattggcgacaccgttaactttcgaacagagatcaccagctacaagaacaagaaagtcattcacaattcagacgacaagtggcgcatattcccaaacacccatccagcgatcatagatcgggaaacctttcaaaaagtgcaggacaagatcgccaaagagatacgccacacgagaaacgttcacagttacctgtttgccgactacctgtactgcatggattgtcattccagaatgcacggccgccagtgttatcttaaggggaaacgctcactgccggcttatgagtgcagcacatataggaagtctaaagggtgctgctttcacggagtccctgagatgtatctgcaagcggaggtgctcgccaggattcagaaggtccttgctttcgctaagagtaaccctgctgagtttcggcaaaatatcagaaaggctctcgaggagcagtccgatggttccaaggcagtaatccaggaggagttggataaagcacagactaggaccgctgaaattgataagtatatccagggactgttcgaggccaaggtacggggcgaaattgacggttctttgttcgcgtccttgaagaaaacgtatgatgaggagaaagaacagctgaacaggctgatcattgaactcatcactaagctctcacgagaaaacgaagctaatgagaaggtgcagctgctctatgccgcaatacgcaaatacgacgctgtgtgggaactcacccccgaagttctgacagactttatcgagaaaatcgaggttgggcaggtgtctgccgagaacaagaagatatccttcgagcttagggataatcagatcagtgtatttttctggggcgtgggaattattgacttcatc

SEQ ID NO: 859 - DNA, 1578 bp, unidentified
  source 1..1578: mol_type = unassigned DNA; note = Bacteriophage uvig_229002 from the Index of /pub/databases/metagenomics/genome_sets/gut_phage_database (ebi.ac.uk)
atggaattgagaaaagatggactgtactttgcctatctgcgaaagtcacgggaggatagagacgcagagcagcatggagaagtagaaacgctggagaggcatcgaaaaatgttgtgcgatatggccagtagatatgggatcacggttgccacatggtacaaagaagtcgtctccggggagaccatcgccgcgcggccagagatgctcaagatgctggaagctatcgaggacatgaggccagacggtgtgctggtggtggaactcgagcgccttgcccggggcgacacccgggatcagggcctgatcatggaaactttcaagtatgcaggaacacaaattattacccctctgaaaatctacaatcctaacaacgagtcagatgaggagtatgcagaattcggactcttcatgtctcggagagagtataagaccatcaatcgaaggctgcagcgcgggaggaacataagcacctctgaaggcaagtggattggtaacaagcctccttacgggtacgaacgggtgaagattccaaatgataaagggtttactttgcgccccattcccgaggaagctaccgtcgtccgactgatctacaatatgtatgttcacggaacaccggagagcggaaacatacctgtaggcacagcaactatagggcacatactggacgacatgggcgtgaagccaccgaatggcagttattggccgacctgtactgtccggagaatcgttgagaatcccgtgtatattgggaagcttcagcacgggtacaggccccagcagaagagaacggtcaacggcaagatcactgtgtctaggccaatcaacaagaattgcgagctgtataacgggttgcacacacctatcattgaccaagaaatctttgcgttggccggccaaaaaaggaaagagtcttaccgcaaacccttcttccacggcataaagaatcctctcgctggtcttatctactgcaccgagtgtggaaagagtatgtaccggagacccgcttcacccacatgtagggatgacactattatgtgttcaacccgcggttgcaaaactagcgcatcctattactacctcattgaagatagacttctgagggcgctgaatcagtggcttgatgagtacagaggccagattgaagacacaagcctggaactgaacagagctcagctggagcgctacaagacacaattggccagcgctcaggaggtggagacaaccgcacagaagcagttggaaaaagctatggacctcctcgaaaaagaggtatacagtattgagatgtttcaacagcgcgccaccgccctgaacgaaaaaattgccctggccagacgggagacaaaggagttgtccgagaagatacgcaagcttgaaaagctcactgcagacaagcagactattgtggctcgatgggaacatgtgctggaggagtatcctaacgttgacagcccagttgtgaaaaacaccatgctcaaagagatcatcgagagggtggaatattccaaaccctacaaaggcaatcgcaaatccggtggaatggataagttcacgcttaagatctttccacgattg

SEQ ID NO: 860 - DNA, 1572 bp, unidentified
  source 1..1572: mol_type = unassigned DNA; note = Bacteriophage uvig_548354 from the Index of /pub/databases/metagenomics/genome_sets/gut_phage_database (ebi.ac.uk)
atgattctcctcgaaaatttgatcatgtatttgcgaaagtctaggagcgatgatataagcatgagcgtcgaagacgtactggccaaacacgagcatattctgcaggagtattgtgagcgggagttcggcgctagacttccagagaaccggatcttcagagaggttgtctctggggaaacgattgcagatcgccctgtcatgaaggaaatcatgaaattgcttgagacaggcactatcaagggtgtgctcgtcgtggagcctcagaggctgtcccgaggcgacctggaggattgcgggaagatcataaacacattccgctacactgaaactttgatcataacacccaccaagacctacgacctgagtaatgagtacgaccgcaaatttttcgagatggaactgactcggggcaacgattatctggagtataccaaaaggatcctgaatcgaggtagagaggcttccgttcggcaagggaatttcatcggatctatcgccccttacgggtacaagaaaattgtcgtgggaagcggaaaggacaagtatcacactctcgaaatcgataacgaggaggccgacgccatcaggctgatgtattcactgtttgtgaacgaaggatacggctttgctcgcattgcgcataggctggatgagctgggctttaagccccggaatagcgaaaactggcagcccgccgccatcaaagatatggtggaaaatccagtgtacatcggaaagatcagatggaattggaggaaaacccagaagagaatggagaatggcgagattgtgaaaattcgcccaaaaaccaaggattcttcagagtggatcttggtagacgggaaacacccagccataatttccgaagagttgtacaatgaggccttgaagagacgggggaaaaacccctgtgtgcgcaaatcactggaactgacaaatccgtatgcaggacttctcttctgcggcacatgtggacgagctatgtcacagaaacgctttgttaaccggagaacccatacacagtccgtttgtgactctatgctctgcaacaaccaggcaaattgtcacacaaaaagtgtgaagtatagcgcgtttgaacaacgcgtgattgaactgcttgaaaacgctgtcgccgatttcgaaattaagctcaaggacaacaacacgaacgtgatccagctccatgagggcatcgtacaaaaacacttgcgcgagctcgagcgactgcacgagaaggacatgaggcaaaaagacgcatatgaagacggggtctacacgaaagaagagtacattaagagaaacgcacttgtgcaggaacagatagcgaaggccactagcgctttggagcaggctaaggcttccaccccgaaggtgattgactacgcagataaaataaggaggtttaccgattgcatcaatgccttgaaaaaccctgacatctctgcatccgaaaagaatgtgctccttaagagttgcataaagcggattgattactacaacgacggtgaaagtaagcccggtgtcggcagatatgtagagaatgttttcgagctgaatatgctgttgaatatt

SEQ ID NO: 861 - DNA, 1548 bp, unidentified
  source 1..1548: mol_type = unassigned DNA; note = Bacteriophage uvig_100661 from the Index of /pub/databases/metagenomics/genome_sets/gut_phage_database (ebi.ac.uk)
atgaatgccgtgatctacgctcggtattcccctggacccagacagactgatcagtccatcgaggggcaggtgcgcgactgcatggcctatgcgaaggagaacaacatcaccgtgcttaacgtttacgcagacaaacatattagtggaagcgatttcacccaccgggcagagtttaatcatatgatcgccgatagtgaaaagcgacagttcgaggctgtcattgtatggaagatcgatcgatttggtcgcgatcgcgaagagattgcgcttaataagattcggctcaaacgcaacggagtgaggatcctgtacgcaaaggagtccatcccggatgggcccgaaggtatcattttggagagtttgatggagggcctggccgaatactatatcgaagacctgcgccagaaggtaaagagaggccaaagggaaagtgcacttaaaggaaaggctgtgtccggccaggccccctacgggtattatatcgatgaggacaagcattaccaggagaagaaggaggagtcatgggtcgttaggtacgtttttgaacactcatcagctggcgaaacagccactgatatacttgctcaactgcagcagctgggggtgaaaaatcgaaaaggtgaaagcattacgaagaacggcatctacacgatgctcagaaatcgcaagtatattggcgagtgtacatacgacggaatccccatccccattccagccctcatagaccagaaactctgggacagcgtgcacgcaagaatgaaacatcggcctcggaaaccagcagcgttcaaagccccagagaggtatttgctgtcttgcagaattttttgcggggaatgcggctccctgatggttggagaatctggcagggggaaaagtggcaaaatctaccactattacaagtgcgctgcccaaaaaaggaagggaggttctgactgtatgctgaagacatacaggaaaaatgacctcgagaattatgtgatccgatgtacagtccaggacgttttgcgagatgatgtcattgattacatagcagatgaggtggtcgccattagcaagaagtcagaccaggaacagaggctggccagctatcaggcctccctgcgcgatgcccagaaatcattgaaaaacgtgatggctgctattgaaaatggtatactcacccctagcacaaaagatagactgatggaattggaaaaccaagtcgaggagtataagaccctcatcgcgaaggagaagatacggaaaaccaccatcactaaagaccaagtcgtctactggcttaacctgttccggtctggggacctggcagatgagggcttcagactgcgccttctcgatgtgtttgtgcattccgtgtacatctacaacgacaaggtagtgattgcttacaactattctgacgacgaccacagcgaaccattggaccctgatgtgttcagatgttctaatattcaccacagagtgagggaccgggtaccttattccaacttcctgttttttccgcacactttcgtctacgtttcttatgagaagataccaagcgcc

SEQ ID NO: 862 - DNA, 1407 bp, unidentified
  source 1..1407: mol_type = unassigned DNA; note = Bacteriophage uvig_107826 from the Index of /pub/databases/metagenomics/genome_sets/gut_phage_database (ebi.ac.uk)
atggctaggagcatcacgcacattccagccaggcaaaccgtggttaccactaacaataacctgcagattccgaaaaaaaaggtggcagcatattgccgggtctcaaccgatcagctggagcagctgtcttcctaccaaaatcaactgatctactatcgggagtacattagcaacaataaggcctacgagtttgtcgggatctacgctgatgaaggcatttctggtaccaacactaaaaagcgagagcagttcaacaagatgatcgctgactgtaaaagtggcaaaatcgatatgatcatgactaaaagcatttcaagattcgcaagaaacaccttggattgcctgcagtatgtgaggctgcttaaggatctcggaatcgaggtgtttttcgagaaggaaaatattaatacgcttgattccaaaggcgagattttgctcaccttgttgtcttctctcgctcaagaagaaagcaataatctttcccaaattaccacatggggtatccgccggagatttgaacagggcaaggtgaccgtgaatgagaaaaagtttcttggatacgacaaggatggggaggggaacctgattattaaccggcagcaggctaagattgtaaagcgaatctaccaagaatacttgaacggtaagggtcccactaggataatgcgcgagctggaacatgacaaagttaaaggcgtgacagggtccataaagtggtatacaactacaatcgataagatactccgcaatgagaaatacaaaggggacgccctgctccagaagacttacactaccaatttcttgaacaagacaagagccaagaatgaagggcaggtgacacaatactatgttgaggagtctcaccccgctataatcccacctattatgtgggacgccgtacagctcgagatcgaacgccggaaacagtacgtcgaagaacacaagctgcagaagtacgattatggatttgaagacacagccttcgcgggacatatcatctgtggcgaatgcggaaggtcatatcagcgaaaaatctggcatagcaatagtaaacctgtcaggctctggcagtgtggctcaaagtatcaggagaagggcaaagtaggctgcaacaacagccacatctatgaccagaaactgaatgagatattcatcagtgcgttcaacgccttggtgaagaacaaggagacattcctgtccaagtggagaggcgagttgcagggagcagacgttcttaaagcctatcgcatgaagcagttcatagagctgatcgcagaaatcaacacgattgaggaagttgataaagaactggtgtttaaagtcctcgacaaaatcaccgtgattgacaagggaaaggtgatagtcaagtttctggacgggaccgagctggagtgtttgatggagagt

SEQ ID NO: 863 - DNA, 1656 bp, unidentified
  source 1..1656: mol_type = unassigned DNA; note = Bacteriophage uvig_254024 from the Index of /pub/databases/metagenomics/genome_sets/gut_phage_database (ebi.ac.uk)
atgtcatctatgctccgggccgccatctatgctaggtttagtagcgataagcagcgcgacgcgtccatcgaggatcaggtcgccgccggcaataggtacgccgctatgcgaggttacgaagtggtggctgtgtacgctgactacgccattagcgggaggtccgacgatcgccctcaattcctgcagatgattgacgacgcgaagaagggcatgtttgatgtcgtgattgtctggaagatcgatagatttgccaggaacatgatggatcagttccattatgaaagggaaatgaagttgcacaacgtgacactcgagagctgtcaggagaatatcagtggaaacaccatagaagcggacatcaataagagtgttctcgccctcgcagcacagttgagatctcatcagataggagtggatactatgcggggcctgttgggcaaagccgagcaatgccaatatctgggggtgtggcggttcggatatagtcacgacggtgacactattactctggatccagctacagcccctctggctgagaaggtacactacgattatttggccggggttcccgtaagctcaattgtggaatggctgatctctaaaggtgtaaagacgtatgctggcaatgaccctggttaccagttcgtcacaggcatactgaaaaattgggcatatgcaggtgtctacatttggggcaagaaaaaggatgacagaggaaaggtgatcaaggacgctcagggacagccggttccattggtcagggttgaaaacgggatgcccgccatcgttaccccagagatcaagcgagcatgtctggaccgccttaggttccggaaacacgggaaaacgaaggcaaattacgttcttagcggcaaactgatctgcacggagtccggaaaacttatgcacggagagtcaggcacttctagattgggggtggagtatttttactatgtgtgcaaagcaaccaaacgacggtattccgtcaaaaaagaattgatcgagaccacagtcgctgatggggtgcgagaaatgcttgaggataaggatctctgcaggcgcctcgccgagagacatgtgcagttcctcagtgaaaccgaggacaatgcacctgcaattgaggccgcaaaggctgagctgagagccctggaacgccagagagacaacataatcgacgctgttgccggaggggccccttttgagatgtttaaggctaaggcggataagattaatgccgagatctccgctacaagccggagagtggaggacctggcggcccggtcaggcaccgcgacactgtccgagattgtggaattcttcgaagatgtgtccgctggcgccatgactgacgaacaaattatctcagcatttgtaggacaagtggctttcgacggagtgagggctgtagcagtcatgaactttgataaccgaccagcagagcgatacgaaatcgagtgggtgttgaagggcgcccagaagagcactaacccctcctctcgccgcgggttcgtgcattctgtcagcgggtcaccggaaaaagaggaaaccgaagagataaccacctcttgtactcccctgggctacacaaaaacaggtcaccccgtttaccggcttgagcatggctttggtttgctcctgaccattaaaaaagccgcc

SEQ ID NO: 864 - DNA, 1548 bp, unidentified
  source 1..1548: mol_type = unassigned DNA; note = Bacteriophage uvig_182389 from the Index of /pub/databases/metagenomics/genome_sets/gut_phage_database (ebi.ac.uk)
atgaaagctgaggaagtcttgatctacttgaggaagtctcgaagcgattctcctgacgaaactgtcgaggaggtactggcccggcacgagaggcagctgcaagagtacgcagtcagatcctatggactgcctgtgccagaacaaaatatctatcgagaggtggtctccggggagactatcgaggacagaccagaggttcaaaaagtgcttgcccgcattgagaatcccgatattaagggagtactcattattgagccccagcgcttgtccaggggcgactgggaggacggcggccgaatcctttcatccttccgctactcatatactctcatcattacaccccataaaacgtacgacctccaggataagtttgactacaagttcttcaaaatggaactcagtcaaggtaatgactaccttgaatatactaaagaaattctgaatcgcggcaggatcgcttccgtgcgagagggaaactttatcggcagtattgccccgttcggatacaagaaggctgtgatcgataagagtcataccctcgttcccgacccacaggaagcccccggggtagaaatgatttttaacctgtttgttcacgataatataggttgggcgaaaatagggtacgccctcgataacgccggtattaaacctagaaaatctaagttttggaatccatcacaggtgaagaccatcctggtgaacccagtgtataccgggaaggttacatggaaccattacaagaccatcacaatagtggagaatgggaagcttaagaagtgtagaccaacatctgacgattacttgattgccgaaggcaagcaccaggctttgatttccgaggacctttttcaaaaggcgcaggaaaaactcggccgcaacacccgagagcccttctcccgggagcttgttaaccctctggccgggctgctgtattgtaagaattgcggcacggctatgacacggaggacgtataggcactctgatggaagcgtccggagcgcacctaggctgctctgcaacaaccaggtgcggtgcggaacaaaaagtagctccttcgatgatgtgtacagtgcattgatcagcgcattgagagaaatgatttcagatttttcttttaaactgtctcacgatcagagcaggtcattgttcgagatccaaacaaacataatcaacaacctgaataacgagcttgagaatcttgagaaaaagcaggacgaactctatgatctgctggaagacggtatctacagcaaagaggtgttcctgaaacgcaatgagaagttggctgagagcagatcagagctggaacagaaaatcaagaaggcgaaggaaaatactgcccggcccattaattatcaggaacggattataaagttcgagcaggtcctgcaggcactgcaggacgatgacatccctccgaaggaaaaaaaccgactgctcaagcagataatccagcgcatcgactatagcagagatagtaccaatagaactcggtgggacacctccaaaccgaccctggaaatccatctcaaagacttccagaac

SEQ ID NO: 865 - DNA, 1584 bp, unidentified
  source 1..1584: mol_type = unassigned DNA; note = Bacteriophage uvig_102394 from the Index of /pub/databases/metagenomics/genome_sets/gut_phage_database (ebi.ac.uk)
atggccaagaagcagaccaacggaaatctggcccttgagcaacagcgggtcattgtgatcccggcccacgacgagatagtcgcgagaaaactcagagttgctgcttatgcccgcgtttcaagctctagcgaggatcagctcaatagctatcgagtccagaatcagtactatagtgagctgataagctcaaacccagactgggagatggtggatatctacgcagacgaaggaattactggcacctccgtggaaaaacgcgaggacttccagagaatgatgcaggattgccggaaaggaaagattgataggattctcgtcaaaagtatctctagattcgcccgaaacaccaaagactgccttgccgccgtgcgcgagctgaaggaactgggggtgtccgtacaatttgaagagcaggggattgatacctctaaagtgagctctgaaatggttaccgcaatcatggcgtcattggcacagaaagggtcagagagcatttccggcaacgtccaatggggttaccagaagcgcatggagagcgggaagtttaacacatgtaaagccccgtacgggttcactctgcatgagggcaaactttccataaaggaggatgaggctaccgttgtcagattcatctttcagctgtatttgaacggccttaatggatatgaaattgctaatacactgagtcaacaagaaattcctccagggcgcgagatgggcacttggaaggactccagtatctactacattctcaagaatgaaaggtacgctggaaaagccatggtgggtaaaagttattccaccacgacttttcctcataaaaaagtacggaaccacggcgagagggagatgtatctgctgagcgactctaaccctcctatcgtatcccccgaagtgtttgatagggtccaaacacttttgcaaagtcggaagaacgctcatattgggagcacaaaccaaactttcagccgcaaactttactgcgccaactgtggcagatccctcaaaagaaagttcacaaatgataagatgtactgggtgtgtaacacccacttccagaacgcggcatcatgcccaacacccccttaccacactcccgatatcgagcaggcattctgtcgaatgtattacaagctcaagcaccatggcgaccccatctttacccagatgctgtctaatttgcagaagatccggtattcaaggatgttgtggagcgaggatgttatttctctcaataagaagatctccgacatccttagtcaggtgcagttcctgacccagctgcagcaggcaggtggtgtggaccccgatacttttatcagctctaacaataagctgtctgaacagctgcggaggctcaaacaggaaaaggccaggcttctggacacagactcagacgacctcgctgaccgaacgcgggacctgatggatgcacttgaagatggcccagactttctggattccttcgatgctgaacttttcgatgcccttgtggagaagatcatagtggactccaatgagcgactgcggtttaggttgaagaatggactcgaactgttggaacagatagagcgcacgagacga

SEQ ID NO: 866 - DNA, 1392 bp, unidentified
  source 1..1392: mol_type = unassigned DNA; note = Bacteriophage uvig_585001 from the Index of /pub/databases/metagenomics/genome_sets/gut_phage_database (ebi.ac.uk)
atgaatagctcatactttcgcagtcaaccggagctttatgggctcagggtggccaagtacattaggtgttctcacgaaggccaagtgttgcacggcgatacactggaagcccaggacactcttctgaacgagttcatcgaggtgaaccacatggttttggtcgacacctttgtggatgaggccttgactgcccggaagcggttcgctaagcgaaaagaattcgtgagactgctggatggagtaagaacacacagttttgaccttattctcttcactaagctggatagatggtttaggaatatttccgactatcataaaatacaggaaatcctcgatgccaatggagtgcagtggaaggccattacagaatcttacgatactacaacgactaatgggaggctgcacatcaatatacgcctctccgtcgcacaggacgaatgtgatcgcgatagcgacaggatcaaggacgtttttgcatataaactcaagaataagagttatatctccggccggctgccccgcgggctcaagctggacgcagacaagcatataattcatgaccccgagtggaagcaatgggctctcgatatgttcgaccactttgagagctccggttctatctactctaccttcttgtatctgaccgataagtacgggccactgctgagatatgacggtgtcagcagagcactgaaaaacagtctttataaaggcatgtatcgggacgatccagagttttgcgacccactgatcgatcctgaacgcttcgacagactcttcgacttggcgaaaaaaaacgtccgccaaagaaaaaccaggcgatattacatctttacaggcctgctcgtgtgctcatcatgccagcataaccttgtcccttacaccattccacacaccttggccgacggcactcgaaaggactacatattttaccgatgcggataccattccagcagccggctttgcgatcggtcacggacgtacagggaggaatacattgaacagtaccttctggaccatgtgaggcctgctctgtcccgctatattgccgaatatgatgtaatctcttctggagcttccaagaaagaccccgcagctgaggctgcgaaaattcggcacaagcttgagaagctgtatgatctctttctggacgacttgatcgaaaaagatctctaccgacagaaatacgatgacctccagacccagctgaaagattgtttgacagtgcctagcgcccccgtcagagatttctccgcgattcaggagcttctgagcaagaattgggaggatatgtactgtaccttctctaaaacggagaaaaacgttttttggaagagtttcatcaagtcaatcgtggtttatgaggatggtagcatggacatcaacttcctg

SEQ ID NO: 867 - DNA, 1581 bp, unidentified
  source 1..1581: mol_type = unassigned DNA; note = Bacteriophage uvig_255241 from the Index of /pub/databases/metagenomics/genome_sets/gut_phage_database (ebi.ac.uk)
atggcgaagaagaagaaaagcctgggcggaaacgccatcgtgtatgctcggtattcctcccactcccaacgcgatgttagtatcgaacagcagatagacgcatgcaagaagcatgccgaggaactggggcttaccgtgattgccacctatgaggatcgggctgtcagtggcagaacggataataggcccgcctttcagcggatgatgcgagatgctgaggccggcaagttccgatatgtcctggcttggaaatcaaacaggattggccggaatatgatgcaggctatggtcaatgagtcacgactcatggattgtggagtaaaagtgttctacgcggaagaggactttgacgacagcgccgcagggagatttgctcttcggtctatgatgaacgtcaatcagttctacgtagagaacatggttgaagacgtaaaacgcgggctgtatgataatgcgaagaagggacttgtgaatggggctctgccacttggttataagcgcggcaccgacggaaaggccgaaatcgacgaaccaaaagctgcgatcgtgagagagatctacacaagggtcgctgccggcgagctttttgccgatatagccgccgacttgaatgcccggggcattaggacagccagaggacgcgagtggagcaaaggcagctttcacgtgttgtgccataacgaacggtatagagggatctacatctatggagacgtccgaataccagggggtatgcctagaattatctctgatgaactgttctacgacgctcaggaagcatacaatatgaaaaaagataataggtatggcaggaccagggttggagcagacaattacctgctgacaggtaagctgaggtgcggccattgcgggtcttatatggtgggggttagtgggacaagtaaaaccggagatgcacactactactactcttgccaaaagcaccggctggagcatgcctgtaacaagaaacctattagacgcgacatcattgagagcgctgtggcccaagcgatcatgacacactgtttgaacgatgacacgatccggttcattgtggattcaactatctcctactttaagcagaaagagcacgagctgcacatagaggaaatggaaaacgagctcgcctccgtgaatctctctatcagcaacttgatgaaagcaatagaggcaggcattataactcctactacacgcacccgcctcatggatctggaggatcagcaaagccgcctttccgcaaagattaatactgcaaagactaaccgagtgcgcattaacagaaacgatctcatcgcaggtcttcagctgtttaggaagggaaacatcaaggataaaaaattcctcgccaagctgttcaacaccttccttatcgccgtttacctctacgacgacaatcgactgaaaattgtgttctcttttgctggcaacaattcacgagtggaattgcccctggagctggaccagtcatatccggaggaagatttcgactgtattcccttggacatggacgtaggtagatccagtattaagcaggtcaggaccagcccccttctccctcaccataaaaagagacgg

SEQ ID NO: 868 - DNA, 1698 bp, unidentified
  source 1..1698: mol_type = unassigned DNA; note = Bacteriophage uvig_376366 from the Index of /pub/databases/metagenomics/genome_sets/gut_phage_database (ebi.ac.uk)
atgaagaaatctaatgagctgcctaagagtatcatctattctagatacagcagtacaaaccaaagggaggaaagcattgactcccaaatcaggataatcaacactttcgcaaagagtaagtacaacatcataaagacttacatcgatagtgcacaatccgctactaccgataacagggaatcattccagcagatgattaatgacgttaagagcggaaatctccccgacgtgaagttcctcctcgtgtcaaagcgagatcgattcgcacggaaccgctacgacatggcctattacaagaacatcctggctaaagctggcatcagcatcgtgagcgccactgagcacttggatgatagcccagagtctgtaatcctggagtccgtgctggacggtatgtctgagtattactcccttaatctggggcgggaatgtattaaaggcctcaaggaaaacgcctatacctgcagaacaaccggaagcacaccaccccttgggctgaaagtcaataaggataccctcaaatttgagattgatgaaccaaacgccgatgccattcgccttctcttcaagcggtttgtagaagatgggtggtcctatcagctgatttgcgacgaacttaatgctaaaggttttcgcactacacggggcaatctctttaattcaaagagtaccttgatagattacctgaacaacgagaaatacgtggggagattgacttacttgaagtccaagaaagacccgctcaccggaaaacgcacgtgcaaaagaaactacaacagagacgagattattgtagttgagaacgcaatacctgcgattatagatgaggagaccttcaaccgggcccaggaaatcctgaaatacaggaaacgcaacgcttcatcctttaggactaccaataagatgaatatgcttgtcggcaaggtcatttgtggaaagtgtggttctcacatgaatatcaatacccgcaagtccggcaagaataaggaatattattccacgtacagatgtagcgccaagaaggagaaaatggctaaaaggtgcgacaatcgggaactgtctgcaacacatctggaacggtacgtcatctctcagctgatgttctatctgaaacaggacacgatagtcgaccgcatcaccgatatgctcaacgaagtgttggagcacgagtttgacagccacgactccgagatcagtcaggtgaaccaacagcttatgaacgtggacgtcaagattaagaatacaacaaatgccatcgccgagggcggtgtttcactgccaagtctggtggaatcacttagagctctggaggatgacaaggctatgctgaagaaacgattgcacgagattaattcagcggtgcccgtgttcaaaaaaattgacaggaacgaggttcttgaactgatcgaaaaggcaaaagagtacatgctttctgaaaatgatgagctcatacgatccgtcatcaatctctttatcgagaagatcaacgtgggcgagaacggggtggaaattatctattatctgcatcccttttcttatatctcccatgaactctggaagacatacgtaacccggcaggagctgattagctataaaggcttcagccctaaaatcatgaagggacggtggtctaggaaagccataattagcttgagtgagagcaaacctactcttgccagactgatttcattggttgcg

SEQ ID NO: 869 - DNA, 1494 bp, unidentified
  source 1..1494: mol_type = unassigned DNA; note = Bacteriophage uvig_6107 from the Index of /pub/databases/metagenomics/genome_sets/gut_phage_database (ebi.ac.uk)
atgaaaaaagagcttatcaatggggtgatctatgcccggtactcccccgggccaaaccaaactgaccagagcatcgaaggccaggttcacgattgcgaggagtacgcaagccggaacaatattcggatcattaagatctatgccgaccgacacctctccggcaaggatagcgtgcatagaaatgaatttcagcagatgctgcgcgatgctgaatctcagcaattcagtaccgtgattacctggaaaattgatcgctttggcagaaatcgggaggagatcgccttgaataagtataggctgagaaaatccggtgttagcgtgcgctacgccctcgagaacattccaactggccccgagggcataattctcgaatcaatgcttgagggaatggcagagtattattccgcagagttggctcaaaaaattcgcagaggacagagagagtctgtggctaaaggcaggatcctgggagtaaagggaacctacggatataagaaggacaaggacctgcattttgtgatcgacgagcctgccgccgcagtcgtcagggaaatttttcagcagtacgcagatgggatgatgcagaaagatataatcagtctgctgaattcaaagagcattaagaaggcagacggccgccctttcacccccaacgcgattcgaaggttgctgtctaatcggcagtatatcggggagtaccattacggggacaacgtcaacatggacgccatacccccaattgttcctgttgagcttttcgaaacagtgcaagagcgactggcaacaacttcaaaagtgaaggtcgctgctcacgcaaagagtgatgtgaattatctcctcagtggcgttgtgacatgtgctgagtgcggatactcttatcagggcgaatacgggacaaacaagcggggtaaccgctactactactataagtgcagaggcaaaaagtccagagctgtgacttgtcatggtaaaaccttcaggaaagagtggcttgaggattttgtggtccaacacacaatcaatgacgtcctcactgatgacatgatcagcctgattgccgacagggtggttgaattgcagcaggaggacagtgcgtcatatgccatacacgctctggagagccagctggccgcctgcaccaaaaagttgaacaatctccttgctgcgatcgaagaggggatagtcacacctaccgcaaaagaacgcctgcttgccctggaaacggaaaaggatgaactttcagtcgccttgtccgaggaaaagctcaagcgggtaccgttcacccgagaccacgtagtatactggcttgagctgtttcgggccggtgacattaactccttcgccttcagagaaaaactgatccacacgtttatcaaccacatagtgatcgatgatgatatgatgttcatcgcttacaacgtgtctggtaaagaagcgtgtgtgccactgaattctgtgatcgaaggagttaggttgcatagcaggactgtcgac

SEQ ID NO: 870 - DNA, 1650 bp, unidentified
  source 1..1650: mol_type = unassigned DNA; note = Bacteriophage uvig_368726 from the Index of /pub/databases/metagenomics/genome_sets/gut_phage_database (ebi.ac.uk)
atgcagacttactacgccgatgagtacttgcgactgagcgtcgccgatggagataaggccgaatctgattccatcaataatcagcgcgagctgatcgacctgtttctcaagagtcacccagagattaagctccacaaagaacgggtcgacgacgggtattccggtgtggacttcgataggcccagctttcgagaaatgatgaacgacattcgcagcggaaaggttaattgtgtgattgtaaaggacctgagccggttcggaaggaaccatattgagatgggcaagtatcttcagcagatttttcctttcatgggggtgcggtttatcgcagtcaacgacaattatgatagcctctactccgacccgagcacagacaatctcatcatcccgctcaagaacctcattaacgactcttactgctctgacacctctattaaaatcagatcccacctggatgtggctcgcaaaaatggtaagtgtgtgaatccctttgccgtttatggttataagaaggacgcagaagataaacacaggcttgttatcgataaacccgccgcagtggtggtgcgggacatctttaataagaaattggatggaatgtccatgtccgccatcgccgacagtctgaacgacgacggcgtgccttcaccttttgaatacaagcgcatgtgcggcgagaacttctactgtggcttcaagagtaaaaaccgctctttgtggtcagctaccgccgtgagccggatattgcataacgcggtctacaccgggagactcgaacaaggaaaacgagtacgacccaactacaagatcaaaaaatctattctcagggacgagagtgagtggatatgtgtggataacgcccacgaaccaataatttccgagaaagacttcaagattgcgaacgacctgatactgtccgatacaagaatagctccaggggccgagaaaacttacatctttagcggtctgatcttctgcggggattgtaagcagggaatggtccatagggtggtccaaagcaatggcaaaaaatacgattattacatttgctcaacgtaccgactcgattctaaggcgtgctccatccacaatatatcagaacgcgccctgctcaaggccgtagaatgcgcagtaaaaaatgagattcaggccgttctgaaggtgggcgaaatgctgaaatatattgctgatcttcctagaaagtcattcgaggcaatcaaacttgattctcagttggcagaccttaacaaggaactgaagcaaaatgaacattttaaaacaagtgccttcgagaagtatgttgatggcacaatatcagagaatatgtatagggagtataccgctatctatgataaaaaatgtaacgatatccgggcagcaatagagaaaaggcagaaggcgatcaacgaggtgatggaaaatcacactccaaaaaccgattggatcgactacttcatcgagaacagaaatattgaacatatcgaccggcttctgctggtgcgattggtcaagagaatctacatctatagcagtaagagaatcgagattgttttccatcacgacgctgattataaggctgctatggactacattttgtgcgctaagaagatgaacgggcccgacggcaaggctctgctcgaggaggccatt

SEQ ID NO: 871 - DNA, 1737 bp, unidentified
  source 1..1737: mol_type = unassigned DNA; note = Bacteriophage uvig_206729 from the Index of /pub/databases/metagenomics/genome_sets/gut_phage_database (ebi.ac.uk)
atggaagtggagattatcaaagccaaaggggcaggcgaagatacctccacaggccggaagatcgatcggctccgcgtggctgcatattgcagagtgagcaccgatgacgaagaccaaatcaaaagttataactctatggtgcggtactacacagatttgatcaagagtaacaagcagtgggtctttgctggcgtttttgctgacaaggcaatcaccggcaccaagacagataagcgggaggaattccagctgctgatacaggaatgtctgtccggaaatattgacctggtgatcgcgaagagtattcccagatttgctaggaacacactggacactcttaagtatgtgcgcatgttgcgagagaggaacatcgccgtatacttcgaggtggagaaaattaacacccttaaggatggtgaatttctgctcactattctgagcagcgtggctcagcaggaagtggagaatacatcagcctacgtcaaaaaaggtctcaagatgaaaatgaaaagaggtgaactggtcggctttcagggctgtttgggctacgattacgatgtcgttactaaaagtctgagcattaacgaggagggagccgagactgtaaggtatatcttcgaccgctatgtagcaggggccgggtctaccatgatcgctagagagcttaatgaacagggtatttctaccataaaaggaaatctctggacgtcttccagtgtaatggggattatcaacaacgagaaatacaagggggacatcttgctgggcaagacattcactgtggacccaattagcaaacggcggttggaaaatcttggcgaagaagacagattctacataaaaaatcaccatgaaccgataatttccgaagaaaagttcgcaagagcccaggaaatcagggagcgacgaaatgggggacgcaaaaagggcgtggcccccggcaaaagggagaagttttctagacagtatgccttctcatgtatgcttgagtgcggattctgtggcgcttccttgtctaggaggcgctggcactcatcctcaaagtataagaagaccatttggcagtgcgtcaagagtactaaacacggtaaaaggttttgtcctgatagcaaggggatcccagaacaggttattgaggacgcgttcatcgagtcttatcgaatgctgtgcaccgatcataaggacgtcctggaagagttcattaaacgggtcgagaaaacgttgagcgaggatagcattgaggacaaaatcgaaaaactcaacaagaatgcatacaacatccaatacaagcgcaagaagctgttggagtcttacctcgagggcgtggttgctaaagacatatacgaggaaacagatatgggatacgagaagaaactgtctgaggtgaacgcccaactgggtatgctcgaacagcagtatgacaatgaaggtagcctccaacggcgcctcgtggatttccgcaaggcccttagcaagaatcaaatcctggagggatttgacagagggatatttgagtccattatagagaaggtcatcgttggcggatacgacgagaatggggagaaggacccttataagatcatctttatctacaagacggggttcaagaacgagattggaaacgccaaggagcgatttggaaagaaatccaaagccgtcgaaaaagcgaaggagatgtgctcacatatcgcagatgaagttaaagacgtgtgctcatatgtgtccgataatactcgc

SEQ ID NO: 872 - DNA, 1413 bp, unidentified
  source 1..1413: mol_type = unassigned DNA; note = Bacteriophage uvig_539964 from the Index of /pub/databases/metagenomics/genome_sets/gut_phage_database (ebi.ac.uk)
atgccattcgaggactatattgatggcgccgcttacaccagggtgagttcaggcaagcaggaagagttgagtcccgcagctcagaagaggttgttgctcgactatgccaagaagcataagatcttgattcgcccagaacacatctttatggaaaacgggatctccgggcgcaatgcacaaaagcggcccgaattccaaaagatgatcgctctcgccaagcagaaaccttctcctttccaagtgatccttgtctggaaattttccagatttgctcggaaccaggaagagtctatcgtctataagtctatgctgaaaaagcagtgtcatgtcgaggtgatttcaatcacagaacctctcattgatggcccattcggtagcctcattgaacggattatcgaatggatggacgagtattactctattaatctgtcaggggaaaccctccgaggaatgaccgaaaacgcgcttagaggagggtaccagagcactccctgtcttggatacgcggcagttggaaatggccagccctttgtcgtagtcaaggaggagaagaacgttgtgcagttcatttttgagaagttttgctactcctatatggagcctaccgccatagccagggtgctgaacgagaaagggataaagacaaaacgcggcggattgttcgaaaaaaggtccgtgacatacattctgagaaaccagttctacatcggcaagattagctggaacggtgtggagcatgatggggcccacgagacttttatcagccaggaactgtttgatctggcacaggagagactgaatgctacttttaaacctaagaaacggagggacattagcgaatgcaagcactgggcttcaggattggtaaagtgtagcatctgcggggccaccctgagttataataagtgtcgatatccgttctttaactgctggaagtacagcaagggtttccacaaagaaacaagctctatatccgaaaagaatcttgtgaagggaatactggattactttgagaaactgctggatggtgaggacttcagctttcattcactgccggcctccgaaccagtgtctctcagagagaattatgaggatgaacttaaaaaattggatgctcgggagcagcgggttagactggcgtatgaaaatggcatagactctcttgaggagtatcgagaaaataagatccgcttgcaggcagagaggcgacagctgcaagagctccaaaacgcatgcaaagaaccagagcccatatccaaagccgacttccttgagaaaatccacacggtttacgacatccttaaagacgatggcattagttacgagatcaaaggcacgttcctccgctcagtggtagaggagattatctacgacaaggagaaaaacagtctggccttccacctgtaccgctcc

SEQ ID NO: 873 - DNA, 1683 bp, unidentified
  source 1..1683: mol_type = unassigned DNA; note = Bacteriophage uvig_70532 from the Index of /pub/databases/metagenomics/genome_sets/gut_phage_database (ebi.ac.uk)
atgaaggctaaaattgtgcgcatgctgctgagggtctcatctgatcagcagctcgaagccgacggcgatctgtcagtccaaagggatattctgaaggagtatatcaaccgccacccagactggatcctcgacgagaaagagtatttcgaagggagcaatagcgcatacaagaataccgccgaagagagagatactctccaagagatcctgcaggatgcaaagaacaatgagttcgacattctggtgccctacaaagatgatcgggttgggaggcttatgatgaatacaccggagtacattctggagttgaagaaaaacaatgtggacgtgtatagtgccaaagacggctgcatttcccctaaaagtgcagacgatatcgaaggtatgatgatgctggtattccgctactttaacgctcagaagtctagcaaagatactgggatgagggttaaggacacgatgaagaaactggtcgagcgcggacgatttgtgggcggtaaagccccttatggatactcccttgagccaagtggggaaatctccaaacatggaagagtcttgaagtgtcttgttgttattcctgaaaaagcaaaggtagttcagtatatctacgatttgtctctcaacaaggaatacggctcttccaaaatagcgagcatcctgaacgaaaatgactactggaagtcccttgctcccaacgactattggaaagggggcacgattacatcaatcctgacaaatccaatctacaccggacgggtggcctataacagaagggagcggatcgatggacattaccggacaactgacagtaaaaactggctgataagccccgtggtgaatgaaaagataatcattatagatgaggctacctggaacatggtacagcttaaacggtccaagcgcaactttaagtactctaagagtcttgaggaaagaggcatcaacgtcatcaagcggaatgatggaatgctcagccttgtcgacgtgcttcactgtgggtactgcggctctaagatggtgaatggtagcaagtataattattgggagatcaagggcactggcgagaagcgagcctcaaaaactccagtgtatagatgtcaggctgccaaggaggggataccccacgactccaccaagcagtttcgcgccgataagattgagccaataatttttgagtcactcaccacttacattgagttcttgcagaagaacacgaccgttttggatgtaattcagaacaagcagattggtgaaaaaaaggcgaaagaaaaagagttgctgcaagccaaacgagaactccagaaaattcaacataaaatcagctccatggaggacaaaatgcccgatgctatagtgggcgattacgaccttacccctaaacagctgaatctgtatatccagaaagagaaggacaaggaaagggaccagaagaacatcattaagttcaaacaagaggcactggacaagttttccatcacaaatgaagagtggagcaagctttgcgaaaacatcccgacatggaaggaagtcttcatgaatggagataacttctcaaagagagtgctcgtgaattctctcgtcgaacgaattgacatcaagagtgactctatcaaaataaggttcaaaatcaacctggatgactacctgcctgagagcagaatgaccaataacgacatggtg

SEQ ID NO: 874 - DNA, 1533 bp, unidentified
  source 1..1533: mol_type = unassigned DNA; note = Bacteriophage uvig_418756 from the Index of /pub/databases/metagenomics/genome_sets/gut_phage_database (ebi.ac.uk)
atggctaagcgagcgaaacgctccgcgccgaagaagggtgctagggcagcgatctacgcacggtatagttcccacaaccagcggggcgaatcaatcgagatccagctggacaatgactatgcgtattgccacgagcacgaactggaggtggtgaaggtatacatcgacgaagccaagactgggcgcgataccaatagggcagatttccagcagatgcttgaggacgctaagaggcaccttatggactacgtggttatctacaaagtgcctcgcattatgcggaaccgggacgaaatggcctttgcacggatcatgctccgcaaatgcggagtggaaattctctatgctggcgagcagattgccgaaggatcttcaggcgtacttcagcttggtatgctggaagtgctcgcagagtgggagagcgccgtggacagcgaaaggataactgaaggaatcgccaaaaacgccgagcggtgtatggccaacggacagaggctgtacggctgggatattgttgatgggttctatgccctcaatgaacagcaggctacagtaatgaggatgatgaaagacatgctgctttccgggtctatgatagcggatattagaagagcatgtgagccatacaggactcagtttgggaataagtttacccagtcagccatcaccaaaatgctgaagcgaaaacagaacgcaggcatctatgtctatgcagggtacgagatccctggcggaatgcccgctttgtggagcttggaggagcagcaaatgatttggaagattcttgaaaaaaatgctagacctcggaaaagagaaaataccgaaaattatgccttgactgggaagcttttctgtggcaagtgtaagacccccatgattggaacatccgggaccagtaaggctggcgcacgctattactactaccgatgcaaaaaatgcaggcgaaacgtgcgaaaagacattatcgaggccaacgtggcagacgatgtcatcgcagcccttagtgacgaggccactcgggaaaagattgccgatatggtcgctgagattgagcaagacacgggagctaagccccaatctgaaataatcaggtctgagctgcatgacatagagctgagctttgatagaatatggcaagccatcgaaggcgggtatgccccacctggcggtaaagagcgcgtcaaggaactgacgaaacgaaaggagctgctcgaggatgagctgcgggtggccgtgtcaatagagtccgtgacagttgacagaaatcgcatcctcttttggttggaggacattgcccaggaagaggatccagagacactgatcgaagtcttcgtgagcaaggtagtcctggttggcgacgacgatctgcatatcgctttcacctttgaaggcggggatgatgatattggtcagatcgtggacgatagtggaggcgtcagagttaacggtccagagctgctccatgagatggatcgcgccggatctagattccgattgtactaccccagagctgaacaaacacacctcagcgct

SEQ ID NO: 875 - DNA, 1572 bp, unidentified
  source 1..1572: mol_type = unassigned DNA; note = Bacteriophage uvig_187460 from the Index of /pub/databases/metagenomics/genome_sets/gut_phage_database (ebi.ac.uk)
atgcccgtgaccgagtgtatcgccgtatacatcagactgtcttctgaagataatgatgtggacgggtcaatcaaggctgagagcaatagtgttagcgcacagagaatgcttattaatgagtttatcaagaagcaggatgagttcaccaactgtccagtggtcgagtatgtggatgacggctacagcggtactaattttaacaggcctggctttcaacgcatggtggaggacgctaaggctggacgaattaagagcatagtaatcaaggacttctctcgcttcggaagagattatcttgaggttgggaattacctcgagaagattctgccagtcttgggtattaggatcatcagtatcaatgacgggttcgactccatcaacagcagcggctttacaggcggtatgtcagttgccctgaaaaatatgctgaacgcgatgtactcccgcgacctttctagaaaagtcaggtccgctatgaaaacacacgctaaaaatggggaatacatgcccgcctttcctaagtacggatatattaaagacccggaggacaagcaccatcttgtgatcgattctgaggccgccgaaaccgtcaagcttattttcactatggcagccgatggcaaaacaaaggggcaaatcgcaaaacatctcaacgaaacccatgtattgacttgcagagagtatatgtgtcggaagggtattaagatgcatagggaaaatgagaaagagaagaagctctggagtgtgaccactataagcgatatgctgaaaaacgaagtctaccttggcaagataatatggaacaagaaacgggtggcccggactgggagcaacaagctggtaagtaatgataaagaggaatggatagtcgtggaaaatgcacacgagccaattatttccgacgagctcttccgaaaggccaacgaaaaagctttcaccaaccaaaaaagggtgttgacgaagcggggcgttgcttgtcccatttttttctgccccacttgtggacgcaggctggggtttacatcacgcgaaacaggctatagatgcatgcaggcacacatcagtggactgtctggatgcgctgagtcaaaaatggaccgaaaagaagccgaggagacagttcttgatgccgccagaaacatggcgcagctgatttcagaaaacttggagaaaaagaagtctgaatggcacaaaacgatcctcaaggaagaaaatatcgccacgctggaatccgaaaagaaacgactgagttccaggaagatgaagctgtacagcgattatcggtccgaggtgctggataaggaaggatatatggaggagctcgaaaaaaccacatcccggatctctgaaatcaccctgcagatcgctgagttggagaacgagatcgcggtggcgaaaaagaagtgcgacgaggcaaccgagaaagaaatggaagtcaacgagatagcagcactccaggacttcgacaaaatacagctttcaaaaatcattgagaaggtgttcatctacgaacctggccgcatggagatttcctggaaaatggatgacattttttacaaggaggaaaaggcc

SEQ ID NO: 876 - DNA, 1512 bp, unidentified
  source 1..1512: mol_type = unassigned DNA; note = Bacteriophage uvig_441829 from the Index of /pub/databases/metagenomics/genome_sets/gut_phage_database (ebi.ac.uk)
atgacatacgccatctacctcaggaaatcacgaaaagacgacgagacagggtatgccgatacgctctctcgacacgagaagatgctgatggatctggccgatcgcatgggaatcgtgatccacgaacatgatatctatcgagagattgtctcaggcgaaagcatcgaagctcggccacagatgcaacggctgctgaaggccgtcgagatgaggacctacactgccgtactgtgtattgaacttgaacggttgtctaggggcaatggggcagatcaggcgaggatcctcaaagcttttcagttcagcaacactaagataattaccctgaataagacatatgacctcgctagtgacgacgaatttgatgaggaattcttcgagtttggcctctttatgtcccgccgcgaatacaagactattaaacggcggcttctgagaggacgattgcagagtcaacaagagggctattttaccgggtccacgcttccttttggatatggtaagatgaaaaatcccgagggcaaaggatatattctcatccctaacgaacagaccccaattctgcagatgattttccgccgctatgctagcggtgacctcctggctgacatagtgcaagacctgaacacagcaggggttaaaactgcctcttccctgaatgcagagtggtctacaaacagggtccgggacatgttgcgcaatcgggtgtatatcggggagatcaacgtgaataagtacgcgaagaataggcggatggaagatggtagaataattgagaccaagcgcagaaaccccgacatgaagacagtgcctgggaagcacgagccgatcatcgatagagaaacctgggacaaggtgcaggcaagattcgccagattcacacccaggaccaacatcgatcggtcattgaagaatccactcgctagcataatgagatgtgcagagtgcggcaagatgatggctagaaggacgtacacccataagggcgtaagcattccaattattgtttgccagtccaacagatgcgtcactaggcagagcaacttggagatggtcgagaatatggtgatcgaggctttgaagaaagaacttgagcgacagcagactatcctggcctcatacaacaccgaaaagcaggataactccgacgataaaactctcgaattcctgcaggccgagattgcgaaaaaagataaaatgatggagcgagtggacgaactctatgagctcggcgactacagtagaagtaagtacctggaacgcagccaaaaacttcaggcccagaaagccgatctgatgaaacaattggaagaagttgaaaaacggatatctgagcgcgataataacaggaaaaacgcagtgcccattctgaccaaggttctggacgagtaccatacactggacgtgaagggaaagaatgacctgctcaaaatgatcatcgagaccatcacttaccgcaagcacgagtctggatccgatatcgagcctgagctctgtttcaagcttcttata

SEQ ID NO: 877 - DNA, 1653 bp, unidentified
  source 1..1653: mol_type = unassigned DNA; note = Bacteriophage uvig_517008 from the Index of /pub/databases/metagenomics/genome_sets/gut_phage_database (ebi.ac.uk)
atgtattttaaccagaaaagcattctggcagcagattacttgcgcctttcccgggaggatggcgacaaacttgaaagtgatagtatccgcaatcaaaggtctctgatcaacgactttgtcaaacagcatcccgagatcacattggtcgatgaatacgtagatgatggttattccggcacaaattttgagcggcctgcattcaagcgccttctcgaggacgttaagaagaagaagatcaactgtatcatagtcaaggacctgagccgacttggtcggaattacattgaaactgggagatatcttgaaaagatcttcccattcttgggcgtgagattcatcgctgttactgatcactatgacagcgccgccgagagtgacgacgctgatcagattatcgttccttttaaaaacctgattaacgacgcgtactgccgcgacataagcattaagataagaagccagctggatgttaaaaggaaaaacggccagttcatagggagctttgccggctatgggtaccagaaggaccccgaaaataagaatcatctgattatagatgcctacgctgccgacatcgtgcgctacatctttaatctcaaaatggacggttattcttcacaaagaattgcggagaaactgaacgaaatgggagtgttgcctcccatggagtacaaaagatcatgcgggatgaattataactcagggtttaggtctggcgccaagccaaagtgggctgtgactacagtcaatagaattctgacaaatgaactctataccggcaccatggtgcaagggaaaaaccggaagattaactacaaggtgaaggagtgcaggccagtggcggaggagaactggataagagtggagaagactcacgaggcaatcattgccgaggaggtgttccagtacgtgcaatcactgatggaactggacacacgaaccgctccggaggaggagagcgtgtacatcttctctggttttctgaggtgtggagactgcggacagaatatggtaaaacgcagtactaccaagaacggaaaacgctattactattaccactgctccacctacaagaatggggacggatgttcctcccaccttatttctgaaaaaaccgtgcacaaagtggtcctggacgccatacagcgacagattgctctgctcgtgaacgcagagaacatcatccagaactctggcatgaaaaattataagaagacggagctcgattcccttgagaaacaactcttggtgctccatgaagaagtagagaagtacaaagatctcaaaacccgattgtatcaggacatgctggataacattgttacacgggaggagtaccacgagtataatcgacggttcacggacaagctgcataacgctgagaaggcagaacgagaattggagcaacggaaagaaaaagctactgccgagggaaaaagggagcatccctggatcgaagattttaagtgttaccagaatatcacgcagctggatagaaaggcagttgtcacattgattgacaaggtcattgtatatggaaaagataggctcgaaatctgtttcaagtacgcggatgaaatccaggaaatgaccgaggccgcccagaatatccgggaaatggaagaacgagagggcaggttcaagtgcggcgcc

SEQ ID NO: 878 - DNA, 1578 bp, unidentified
  source 1..1578: mol_type = unassigned DNA; note = Bacteriophage uvig_368153 from the Index of /pub/databases/metagenomics/genome_sets/gut_phage_database (ebi.ac.uk)
atgaatgctgtaatctatgctcggtattctagcacaaatcaaaccgagaactccatcgatggacaacttcacgagtgccggaagttcgcagactaccatggctacgccattatcgggacttatattgatagggccaagagtggcacctcagtggaaagcagggatgaatttctgaagatgatagctgacgccaaaaaacagcagtttgcttacgtcatcgtgtatagatttgatcggtttacacgaaatcggtacgattctgtgatatacaaaaaagagctcgccaattccggcgtgcgagtcatatccacatgcgagaatgtcgggatgggggacgaggctatcattctggagtctatctatgaagccatggatgaagcatacagcagaagattgtcaactattaccaggcgaggcttgagagagtgtgcatataaaggagaatggacacgcaggccaccttttgggtatatcctgaaagacaaaaaactttacattgatgaacgcgaggccgcatatgtcaagtacatatttgacgattatctccgaggtactaccaagaaaaacatcgccaagaaactgaccgatgatggcattaggacgaaagagggcattgaattcaagagcaccagcgttaccgctattcttaataaccccgtgtacaagggagtgggccgctattccgatatctacttcgacgtgcccgcaatagtggataaaaagattttcgacaaagtaaccgtaaaagagaagaatgtgcggcatatgtacggtcagaaagctgacaagacgagctatattctgactggcaaactttactgtggtgtgtgtgggactgccatgacaggagatagtgggacctcccggaacgggtctatccacaattattatacttgcgacgcgaagaaaaagcgcagaacttgtaaaaagaagtctgagcggaaggaatttctggagtggtacatctgcgatcagacagtgagattcgtactcacagatgagaaaatcccagagattgctcacaaggtcgctgagctcgcgaaggaagaccagaagaacaacgaactcgacagcgccacccgccgctccaaggaagtggagaaggagatagagaagctgacgaacaagctcatcttgaccgacaatccgctgattatcaaaaagatcaacgagagggctgacgttctcgtgaaagaagccgcggccctggaaatcaagatcgcacagtgcaagctggccgccgcccacgttttgagtgaagcagacattgtccaataccttacagacctgagagacggtgactcattcgacgataagtttcgcaggactatcattaacacattcgtcaaagcggtttacctcttcgatgataaactcgtgatctactacaacgttgactgcaacaacgccgtttcatacgatgacatgaagaaagacattaagagtctgcaggaatttgtgtataattctggaagtgactcctcagtcttgggagagcctcacatggaactgagcgagcatattctgttcatctatcacaagcattgtttcggcgcaataatcaagataaggagagag

SEQ ID NO: 879 - DNA, 1551 bp, unidentified
  source 1..1551: mol_type = unassigned DNA; note = Bacteriophage uvig_310206 from the Index of /pub/databases/metagenomics/genome_sets/gut_phage_database (ebi.ac.uk)
atggctacggttaaagaaattgctcctcacgcccttcagccagagcatctgagagtggccgcctactgtagagtgtctagcgactctgaggatcagctgcacagctatgcagcccaaatccgcaattacactgaggtgatagcccagcacgacggttgggagttggtggacgtctatgccgacgaagggctcacaggcaccaggatggacaaaagagacgactttaaccgaatgatgagagactgtcggaagggtaagatcgataggatcctggtgaagagtgtggccaggtttgctcgcaacacaaaggaatgcctggccagtctgcgggaactctccggtatgggagttacagtccgcttcgaaaaagagaatattgataccggtaccctgacgactgaactgatggtcagcgtgtccgggagtctggcgcagcaagaatctctctccatatccgcgaatcagcgactgtcatatcagcacaggatggagtgcggcgagttcatcacttgctcagcaccttatggataccggatcaaagacaagaagaatctggaaatactgccggaggaagcagcggccgtccggtgggccttcgacgcttatctcaaaggaaatagctctaagtggattgctgagcaactgactgctaaaggcatccccacacaaaatggcgcagagaagtggcaggaaacatccattcgctacctgcttaccaatgaaaagtacattggcgacaccttgtgtcagaagtcctacagttgtggcttcccattcgtacagaaacggaatcgaggcgaaagaatgcagtattacgtagagaactctcatcccgctattatagatagggataccttcgagaaggttcaggagctgttgcgcaagaaagctcagaaagaaaaacgacgacgggaaaggagcccttttgccctgaaaattctttgcgggaactgtggaaccatgttcctcaggcgcacttctaaaaatggatatgtaacctgggtctgcagaacacatgatcgaagcgccgatgcctgtcatgtcgggagaattcccgagagtgagatccgggcagcttttcttcgcatgtacagaaaactgaagtgcaacgccgatatgatcttgaagccagcaatggagcagatgaacgcccttgacgctatccttcaacagaataaccctaaaacgttgaccatcaacagagctatcgcagaagcaactgaggaatcacacaagatcagcaccctcagggtgaacggactgctggatgccgacacttgcaccgcgcggatgaacgtgatctcagcaaagctcgcccagcttcggagggagcgaagacgactcgcagagaacgaggcgctcgacgaggtgatggatgcacttcggaaggttaggcaaacaatattggatgggcccgagcagatggacgattttgacgatgatcgcttcgagtcccttgttgagaagattatcgctgaatcacagacagaaattaggtttcgcctctacggcgggctcgaattgcgggagcgcctggaggtggccgtgaga

SEQ ID NO: 880 - DNA, 1518 bp, unidentified
  source 1..1518: mol_type = unassigned DNA; note = Bacteriophage uvig_541528 from the Index of /pub/databases/metagenomics/genome_sets/gut_phage_database (ebi.ac.uk)
atgacccactccaatgatggccttttcgctctgtacctgcggcggagtagagcggatattgaaagggaaaagtttgaaaaatttgacacactcaagtcccatgagcaagagctgactaagagtgccaaagcccagggaatcattctggacaccccatattataaagagcttgcaagcggagagcacatagccgacaggcctgtgtttcaagaattgatgcagaaagtttccgatggtaagtatcaggggataatggtccacgagatttccaggctgggtcggggcgagcccagggagtacggacacattcttttcactattaaaagtctgggcattaagattgccaccctgtacagagtgtttgatcccagtaatccagatgattaccggcagatcaagaccgagatgtttctgagcaacatggaattcgacaacatagtatggcgcctggatagaggctcaaaaacaaaggctgagatggggtgtttcatcaagccgacccctccctttggctacgaccggtataagcgcccgcaggacggatactggtctctcatccccaattcagacgcaccacttgtgaaacaaatctttgactatgccgccgaaggcaggtctctggggtatatcgccagaacacttaatgaaagcggcattcgcacacctactggcaagtactggacggcaagcaggattcgaaccataatcacaaacccccattacaaagggttcatccggtatggatactataaacgcaaagaagttccgtccgaagggtacaagacaaaaaaaatctactccttcaataacaactgcatcttggtgaagggccttcacgaggggatagtctcagacgaagagtgggagaaggctaatagctttcttaatagcagccccgtgaagaaggacagggaactgaagaaccctctggccggacttcttgtttgtaaaaagtgcggtcatcctatggttcgctttcttaacaaggtgcggtccaatgggaatctgatcgagcactaccgacatccacaattcaatggttgcaagatgcatggatctagaatgtcaattgtcattgatttgctctgtgacgcattgaaagaggtgagtagtgacctggaggtaaaaattcagaacgatcacaaagacaacacccaggagctgaaagaatctttggaggcacagctctcaattatcgagaacaaaacgaagaaaataatggaactctatttctccgatgccatacctgtcgaagaggtcaaggaaatgcgcctggaagctgaccgaagaaagaaacagctcgaggaggaattgagcaagctgtccaagccaaaaaaaactccaaaagagatccgactgtcaatccataaggctatcgatctccttaaggacgagaacgtgtctgctgaggtgaagaactctttcttgaagtctttcatcagcaagatcgagtatgagaataccgcggaaagaaacgatcactctcccggcaagatcaagctcactattatcctcaaa

SEQ ID NO: 881 - DNA, 1575 bp, unidentified
  source 1..1575: mol_type = unassigned DNA; note = Bacteriophage uvig_539021 from the Index of /pub/databases/metagenomics/genome_sets/gut_phage_database (ebi.ac.uk)
atgctcgacccaaacgggatctactttgcctacctgcgaaagtcacgggaggaccgcgaggcggaacttcacggctatggcgagacactcaagcgccatcagcggatgctggaggacctcgccaagtatcataagattaagatcgcgaagttttactccgaggtcgtgtcaggtgaaacgatagctagcaggcctcagatgctggctatgctggacgacattgagtcacttagtcctgacggcgtgttggtggtcgagatcgaacgattggccagaggggacacccgggatcagggcctcgtactggagaccttcaagtattctggcacacgcattataacccccatgaaaatctacgatcctaccgatgaaagggacgaggaatacgctgagtttggtctgtttatgtctcggcgggaatataagaccatcaaccgcagactccgggatgggaaaattgcatcctttaatgaagggaaatggacgggaaataaggcaccatttggatatgaaagagtcaaactggcaggcgaaaagggtttcaccctgaagatagttcctgaggacgcagatgtggtgagactcattttccagctcttcatctacggcagcaatgcatccaacaacatccctgtcggtacttcaaaaatttgccggatcctggataacctccatatctccccaccaatcggagagacttggcagccgtgcactatcaggcagattctctccaaccctacgtacattggcaaagtgcacatgggacgaaggagcactcagaaaaagacactgaacggcgtggtgaagatcagccgccccatcaataagaacgccaaaattgccgacgggctccaccccgccataatcgatgatgccttgttccttaaggcccaggaaaagaggaaggctaactatcagaagccctttttcgagggaattaagaacccccttgccggattgatctactgtagtgtatgcggcaagagtatgtaccgcaggcccgccggtaaaaggtgcaaagaggacatgatacagtgtactactcatggatgtccgacaagcgctagctattatcactacatagaggaaaagctgctggtctctctgaataagtggctcgaggattacagaattcaggtgaaggacatttcaccagagtcctatgcccagcagttgaatcttctgcaaagtcagctgaatgctgcacaaaatgagtctgagacctccaaaaaacagttgtctaaagctatggatctccttgaaaaagatatctactccgttgaaatgttccagcaacgagcctccgagctgaacgagaaaattgcactctcttcacggtctatcagcgatctcagtgttaaaatagacagcattcgcacaaaggccgtacagaaagaagaagtgatcgctagatgggagaggatccttagtctgtatccacaagttgatgaccctgcggtgaaaaatgctctgatgaaggaactcctgacaagaattgagtacagcaaaccccacaaagggaacagacaaaatggcgggatggaccaattcaccttgaagctcttcccgcgcctg

SEQ ID NO: 882 - DNA, 1527 bp, unidentified
  source 1..1527: mol_type = unassigned DNA; note = Bacteriophage uvig_467692 from the Index of /pub/databases/metagenomics/genome_sets/gut_phage_database (ebi.ac.uk)
atggcccggaaaaccgacaagcctttgtccaatattgccgttatctacgcaagattttcatctcacaaccagcgcgaagaatcaatcgaacagcaggtcgctgagtgtaaacttttcgctgctcagcagggactggaagtcaccgagatctacagcgactctgcccaaagcggccggacagagaacaggtctcagtttctgcggcttcagagagacgcgaagaaagggaagttcacaaacattgtcgcttataagagcaacaggatagccaggaatatggtgaacgcccttacattcgagaacgatatggagaagttgggcgtgaagctctattatgcgaaggaagaattcggcaacaatgctgcaggtagattcgctctgagaatgatgatgaatgtgaatcagttctactcagaaaacatggccgaggacattcgaagaggcatggaggataatgcaatgaagtgcaaagttaatggacctgccccgtacggttacaagagtggaaaaagtgggacttatgaaatagacgagcccgcagcagctgtggtccgcgaaatttttacaagggtggcgtgcggggattcttttgtggacatctacacagaccttaacaacagggggctgaaaactcgaaagggaaacaagtgggggcgatccagctttcaatcaatcctgaagtgtgagaaatatacgggggtctatatctacgacaatattcgcgtggaagggggcatgccagaaataatctccaaagagatgttcttgaaggttcagcgcattctgggcaccaagggaaatccccaaggcagacaccgcattaacggcgattatttgctgaccggaaagctcttttgcggagagtgtggacatcatatgatgggtttgtcaggaactggcaaaaacgggcttctgcactactattacggctgctctggcaagaaagagaagcctcggtgttccaaaaaaaatgttcggagggacgaactcgagtacgaggtagctaggctcgtacaaacctatatcctgcaggatgacgtgatcacttggcttgccgataccctcactaagtatcaggaggagcatagtagtgatggtgacatggcaattttgaatacacagctctctgaaaccgagaaatccatcaaaaatcttatggcagccatcgaacaaggcatcattacgccctccaccaaggaacggctgatggagcttgagagcgagaagagcaagatcgagaataatattactcttctgaaagccgatacgatcaccgtaagtaaagagcagattgggggatggctggactctttccgcgatggtaacataaaggataaacggttccagaaacgcctctttgatagcttcctgtccgccgtgtatgtgtacgacgacaatagagtccgaatagtgtttaacctctgcggtctgaacaagggcgacatagacaccaaactgatgctgggggatacagaggccattgaaaagatcagcgattgctcctacaagcgatgttacggcagccca

SEQ ID NO: 883 - DNA, 1947 bp, unidentified
  source 1..1947: mol_type = unassigned DNA; note = Bacteriophage uvig_188069 from the Index of /pub/databases/metagenomics/genome_sets/gut_phage_database (ebi.ac.uk)
atgaacgccggttacgttcggctttctagggatgacgacaaacgcaattacgtgtccattgaaaatcagaagctcataattaatcaatatgcttccgatcacggcatggtcatcgaccgctggtatgaagatgatggcgtctcaggatatatctttgatcgccccgggttccagcagatgatggctgatttggacaaggacattgatacaatctacgtgaaagacttctctaggctggggaggcataacgccaaggtgctgctcctcttggacgagtttcaggaacgcggaaagcacctgattgtcatcgacgataactacgactcctttgggagcaccgacgatactattggtataaagacctggtttaacgagagatatgtaaaggatacatctaaaaagattaagagggccattggcgctcggcaaaaggaggggactcttatgactaagccaccattcggatactgccgagataccaaagacaagagtatcattaagatcgtgcctaaagaggccgagttcatcaaaatggtctacgacctttacattagtgggtccggctatcgcaaaatagccaactatctgacggaccaggggatccccactccaagcatggtgcagcgcgaaagagaaatagaagagggccgaatctccaagaaaaaggtagcaactatctggagtgattccatggttaaggaacttcttgacaacgacttctacatcggaacattccgactgaggaagcgggcacgcaataccgtgcatgggaaagacaagcgggtgccgaaggaggaacagtgtatcttcgaggatcaccatcctgcgattattgataaagctaccttttcactcgtacaagagcttaaggaaaagagaaacagaacaaactacagaggcagcaggggcgagtggattggaagtgagatccccaatccttttggcagctgcctcttttgtaaagattgtggctcaagattgactcctatcaaaaggcagacttcttcccgagagcggaagtattatatctgtacaacatacaataccaagggcaggagatattgcgagaaggcccacctgatagaggagaatgatctgatggaggatgtgttgaattatatcaaactttgccgggaggctctctgcgaggtgatctccacctatgacatgcgagacttcgaagcggagaagaagacactggctgaaaaacgacaggacattcaggaggaaattcagaacaggaaaaaccagctcaaggttctgctgacccagaaaatcaaggacctctctatcgcgagcgagaacgaggatctcatccacgaaacctacgatagcatgcagaaggacctgctcgcacaaattcatggactggagatccaagagaaagagcttaatgaaacgacaatcgaaacccctgacgtcaaagataaactgcggaatgccctggatgtggttgataaaattatagctggaggaacccttgacaggagagatatcgagttgctgatagaaagaatcgacgtcgataaagaaggcatgcccgaaattaccctgaagtatggactttctgatctgattaactacagcccagcagacgaaatgaatcggcgcgaaaatacagtgattgcccttgtgatgaagctgataattgaggatgagcggggttatacctcagccaagtacctttcagaacatatcacagcactggggttcaagaaaactaagcagtctattttgccgtacatcaaccttatgaaagagttgggcatcctggaagacactgacaaccccctgaaaccttacaatatagttaagacgaaagaggagctcgccgtcttgatgcaccagtatcttccagacctccccgcccaaatgacgagcgaacagctgagtgacaagtacctgcactacaaagatggggacagatggtacgcaggtgacggtatc

SEQ ID NO: 884 - DNA, 1563 bp, unidentified
  source 1..1563: mol_type = unassigned DNA; note = Bacteriophage uvig_138780 from the Index of /pub/databases/metagenomics/genome_sets/gut_phage_database (ebi.ac.uk)
atggagcttatctacctgcgcaagtcccaggcagacaatcctaatgagtctgtcgaggaagtgttggagaagcacgagtatcaactccaggagtatgccatgcaggaactgggttatacaatcccggaggagaacatctaccgagaggtggtgagtggcgaaaccatcagggacagagttgaaatcaaaaaaatactgcaactgattgagctcgaggaaataacagctgtgatcgtgattgaacctcagagacttggccgaggtgacttggaggactgcggccggattgtgaatgcctttcggtataccaatacgaaaattatgacgccaactaagacatatgatctccaggacaagtacgatcgcaagttcttcgaaatggaactgcaacgaggcagtgattaccttgagtattataaggaaatccaggcacggggcagacttgcttccgtgaagaggggaaactacatcggttctattgcaccctacggatacaagaagatacagatcaccgatgagaacggaaagaaatgtttcacattgcaggaaatccccgaggaagccgctgcattgcgcaaggcctacgatctgttcgtcaacgaagcctacggctttagaaaaattgcaacagctctcgacgagcttgggttcaagccaaggaaaattgcacattggagcccatccgctatcaaagatatgttgagcaatcctgtgtatatagggaaggttcggtggaattggagaaaaggaaaaaaggtcatcgagaacggagtggtccacattagcaggcccaaggctaaggattctgatatctacgaaggcaaacaccaggggattatagatgaaaaaacttactacgcagccctggaccggatgggtaggaacatccgagcccgcgagaacgttaaaattagaaacccctttgcggggctgctgtactgtaagtgcggcagggcgatgacctataggacctataagactcatgacgggcaggatcgatgtgaacccagactgctctgtgacgaccaggtgcactgccactcagtttcatgtacttaccaagagatagagcaaagggtcatcgccattctgaaagatactatagccaacttcgaggtggagctcgatcagttcgatgagaagtcccacagaattcagacttcaaccctcgacggactgaaagctaaacagaacgcggttaaaaagaaggaagtaagcctttgggagaagtacacagaggacgccatgcctaaggatgtgtttgactctttgcttcgcaagattactaccgaaaaagcacatctggagcgcagcatccagaatctcgaaaaagcgaagaaggacaaaaaatatttttgcgaccacctggtaaccttccggaatgcccttaccacgctgacagaccctgccatcccggccgagaaaaagaacgcttttctgaaggagtgcatcgaacgcatcacttatacccggcaaaaggctgaccataaagggacctgcaaaacaaagggcgataatagtaaagccaagccagtaattcatctcgaagtcaccctgcacctt

SEQ ID NO: 885 - DNA, 1455 bp, unidentified
  source 1..1455: mol_type = unassigned DNA; note = Bacteriophage uvig_588864 from the Index of /pub/databases/metagenomics/genome_sets/gut_phage_database (ebi.ac.uk)
atgaccgatctgaaaatagctgctgcctatatacgggtctccactgacgaccaagttgaattgtcccctgcatctcagctggtggagatacgcaagtggggcgccgccaatggctatctggtccctgatgagtttgtcttcgttgacgaagccaagagtgggagaaaggtcactggccgcgacgaatttcgcagactcatcgccacggcaaaaactaagccaaaaccattcgatgccatcctgctgtggaaattctcccgcttcgcaagaaatcgagatgatgccgtgtactataagtccatcctgaggaagcagctgaagatagaggtaattagcattaaagagccgattgaagacggaaaaatgggggtgatcatggagtccatgatcgaggccatggacgagtactacagcattaacctggctgaggatgttaaacgcggaatggaggaaaagcataggcgaggcgagctgcaagctacaccttcattcggatatacagtacttgataacgtacttgtgcctgtgcccgaggaagcagtgtatgttcaagagatcttttcacgctttgtgtctggcgagggattctactcaatcgcgcggtggttgaacagtatgggagttaagacccaccgggggagcacatttgcaaataggaccgtggaatatatcctccggaatcccgtctacatcgggaagcttcggtggaatccagcgggcagaagcaggcgagactatgccgatcccaacatcatcgtgaccgacgggaagcacgaaccgctggtgagcgaggaaacattccaacaggcacagactagaatcgctcagctgaaagctgccatgccctacaaggcaagacctctcggcagtaataaggactggatttctggtcttgtgaggtgcgcttcctgtggatcaaccctcatattcgccaaaccacactactggaagtgcaacaactacgtccgcggtcgatgtcgggcctctcagcatatcagcagtgacctcctcaaaaaagccattttggatcggttgcatatggatgcggccgcctcagctcccctttcttatgaggtgctcagggtgaacggtagggatggggacaccacagcagctctgcgcacgcagagggccagcctggaaaggcggctggaaagacttagagaggcctttctggctggcgtcgacaccgtagaggagtaccgacagcttaaggaggacgcacaggcccagattcaaagaatcgaccaggaactttccgctgcggcagctgagaataggcgggctggtgatgtttctatcatgcggtctgccatcagtgatgcccttgctgtgattgaaaatgaggatgcctcccttgaacagcgatgcaacgcagcgagaagcattattgaccgcattacttgggacaaagcacagaacttgctcacaattcactaccgactgatgttggaa

SEQ ID NO: 886 - DNA, 1614 bp, unidentified
  source 1..1614: mol_type = unassigned DNA; note = Bacteriophage uvig_150649 from the Index of /pub/databases/metagenomics/genome_sets/gut_phage_database (ebi.ac.uk)
atgatacaaagcagccaaaaaatcacagccctgtactgtcgactctcccaggaagatatgcgccagggtgactccgatagtattgttaaccagaaaatgatcctggaaaagtatgcgaaggaaaacgggttcgagaacacacaggtgttcgccgatgatggctactccggcgtcaacttcgaacgacctgcttttcgaaggatgcttcatctcattgaggaccggaagattggtataattattaccaaagacctgtctggcttgggacggaactatatcgaggtagggtcttacacagagatctatttccccaagaacaacgtccggtacatcgccgtcaatgacaattttgacagcatgtacactgatgggaacgaacttgctccactcaaaaatttgttcaatgagtggtttgcacgcgacacttccaagaagataagggctgtcaagagagccaaggcggagaaaggcgagcgcattggtagccgcccaccatatggatacgtaaaggatcctaataataagaaccatataatcgtggacgaagagactgctccagtggtgcagaagatcttttcaatgtgtgtggcaggcctgggaccgacgatgatagcaaacagactcaaagaaatgcagattctgacccccgtcatgtacgagtacaggaagtcagggacagccgttaccgcccttgataccgagagaccctacgactggaatgcaaagaccgttgccgacattcttagccgcgaggactatattggcaacaccgtgaattgcagattcaccgtgccgagttacaaggacaagagaaagatgaaacgcgatccttcagaacatgttcgcttcgaacatacacacgagccaattatcgacatgcaaacgtgggagactgtgcagaaactgcggcaggggaaaagaaggcccacgtccatcggagagacaagcaagtattctggactgcttttctgcgccgattgtggatctaaactgtatttcaatcacaaacgggctgatgatcctaagagttatagctttaactgctcacactataggaataatgcgaaggagaagtgtacaccccaccgaatcagggaagtggtgttggatgaaattttgctcgaagagctgcggcggataacatataccgctcggaccagagaacggcagtttgccgagttcattaataagaaatcttctagtgagaacaggcgcgaactgaatgccaaacagcgggagtacgagaggctcagcaagaggaccactgaattgaatgcactgtttaaacgcctctacgaggacaacgtgctcggcaggatcaacaatgagcagtttagaatgctcagttgcggctacaccgacgaacaaaaatcaatcgatgcaaagctgcccgagctggaaaaacagattcagaatcttcagcaggctgcttccgatgtcgacaagtttatcggccttgccaaaaaatatacaagaattactgaactgactcctgaaatcctgcacacgttcgtatccaaaatagttatccacgagcgaagagagcgattcaagcagaacaccgagcaacaaatcgacatctactttcgctacatcggtaacactgcagggctt

SEQ ID NO: 887 - DNA, 1710 bp, unidentified
  source 1..1710: mol_type = unassigned DNA; note = Bacteriophage uvig_473313 from the Index of /pub/databases/metagenomics/genome_sets/gut_phage_database (ebi.ac.uk)
atgaaggccgccatctacagccgggtgtctactgagggccaggattatagcaaacaaaccaatgaactgaaagattatgctaagcgcaacggcattgaggtcgcatacatcttcgaggaaaaagagagtggcttcaataatgataggccagaatttgagaagctgagaaagctgacgaagcaagatattgacattattctcgtgtgggagatatctaggctttcaagacgcagcgtctatctccagcagcaagttgaggacttcactaataagggcatttgcatctacgcattgtcaaactccttgcggactattaatactgatggcacaatcaacgagatggctagagttgtgcttgccgtgactgcaaccattgccgagcaggaggctgccacattgaaagctagaaccctgtccggcaaacgacataaggtacttaaagagggccacagctacacacagattgcaccttacggatacgactacgacaaagagacaaagcttctgagtatcaatgaaaaagaagctaccgtggtgcgccgaatttttcagttgagcatcgacggatactcattgatacggattgctaccgctctgaatgtggaaggaatcaaaaataagaatggtaacaagtggtacttcgctacaatccgcgacatgctgattaatcccgtctatatgggtaaagcaaggtatgccctcaaaaaagccccggccaaggaagggaagaaatatcggaaacccctggagttcgttgaagtagattcccccgccattgtatctgaagagacctatcagctttctctcgaaaggatgcaaggtcgcaaaagcatttccaagagttcctacagcgtggagtaccctctgctgcgagggctgatcgtttgccctgtgtgtggacggagatatgtctataaacgggcgtctaaactctacacctgcaataacagagataatgactgtaaggccaaaggagcaagcgcgcataagcttgagtctatcgtgtgggacataatcaaggtctactttaaagagaacatgaccaacaacaaggtcgaggaacagatagaacccttgcaggcggaaatcgacagttacaagcaaaagattcttctcctggatgggcagctgtcagagctgaccgaggaagcttctaggatctatgatgcagccatagaggcccagaaaaggtttccaaatatgcctaagctgtacgaagataaaatgaaagagctcgattccatagataaggaggcctcccgatacaagaaggagaaggaacttacagacaaaaagatccggtcaatttcaaagaagatcaaccacatcaaggaggcgcgcgacatcaacctcgacgatataacagacgagctggaaaaatataatatcttccaccagttcattgataacctggtgatctgcggtaccaagcacacgtcttttatcgttctcactcttaccactggccagattctgtacattggccactattctaagcgatgtagcaactattatatcctcttttacccaagttccgacatctatttcgacatacagacaaacaaggggtatattaaccatcttaaggagaaggcaactattaacagtgacgggagcatctatcttggagacctgacgggggaagtgaaagaatactccatcatcgattttgtcaactacttggacatagaggaaaataggagatactac

SEQ ID NO: 888 - DNA, 1275 bp, unidentified
  source 1..1275: mol_type = unassigned DNA; note = Bacteriophage uvig_192865 from the Index of /pub/databases/metagenomics/genome_sets/gut_phage_database (ebi.ac.uk)
atgccacgcactgtggaacagatccagttcacgcctcacatgcctaaggccctgcgcgtagctgcttacgcccgcgtgtcttgcggtaaagacgctatgttgcactcattggccgcccaggtcgaccactatagcacctatattcggcaccatcccgggtgggaatatgttggggtatatgccgatgaggcaaaaaccggcaccagggatagccgagagaacttccagagaatgttggccgattgcagaaaggggaagataaaccatatcatcacaaagagtatctccagattttccaggaacaccgtcacactgctggagaccgttcgcgagctgaaaggactgggaatatcagtctacttcgaggagcaatcaatcgatactgcgacagcagacggcgagctgatgctgtcaattttggcctcatatgcacaggaggaatctctctccgcctccgagaatcagaagtggcgcgttaaaaggaatttcgaggagggaattccctggaggtttttcatgcttggttaccgcagggagaatgggaaacttgccattgtgcccgaagaggccgaaatcgtgcggagcatcttcgacgattacctcgccggcaaaggggtgaccgctattgcgaaaaggctgaatgagtccggttacgctactcagtctggctgcgtgtttcacaagagtgctgtggaacgcatactgcggaactacgcctatacaggaaatctcctgctccaaaccaagtttagagaaaatcatctgactaaggtgactcgaaaaaaccaaggcgagctcccaagataccacgcagcggacacacacgaggctattatttctcaggaaacatttgacgccgtccaagctgaaattcttagaagaaagcggaagtacgcaagcacaaagccacagcagccttccccttttactggattgatcacgtgcgctatatgtaataagcattaccggcgaaagacgaccgccaccggacccgtttggatttgtagcacgtataactcttacggcaagagttattgtccatctaaagccatcccggaagagaagcttatgcagaccgtggcactggtggggcatacaggtgagatcacagcaatcaccgcccataacgataacctcttggagttcacattgaaagacggcaccaacgctgtcaaaagatggcaggaccgaagcagggcggaaagttggactgctgaaatgcggaagtccgcaggcgagaaaactcgggaaaggaataagagacacgcagaaagc

SEQ ID NO: 889 - DNA, 1674 bp, unidentified
  source 1..1674: mol_type = unassigned DNA; note = Bacteriophage uvig_444213 from the Index of /pub/databases/metagenomics/genome_sets/gut_phage_database (ebi.ac.uk)
atgctgcaacagtccaataatactattaccagcatctacccaattgggaaccagaccgaggagctgactgcgttgtactgcagactgtcccaggacgataagcaggagggcgatagcaattccatcatcaaccaaaagaagatactgaaaagatatgccattgaacacggctatcaaccatacgtcttctttgtcgacgatggcttctcaggcaccaactttaaccggccggactttcagcggatgatcgccgaagtggaagccgggaggataaagagggtgattgtgaaagacatgagccgactcggacgcgattaccttcaggtgggtatgtataccgagattatgtttcccaatatggatgttcactttatcgccgtcaacgacggtgtggatagccatgtgggagaaaacgagttcactccttttcgaaacattatcaacgaatggtacgcaaaagacaccagtaaaaagatccgggctgtcaagaggtcaaaaggaatggctggcgagcatatcggcagccatgcaccctatggatacatgaaaaatcctgacaacaagaaggaatggctcatcgacgaggaggctgcagaagtggtgagagagatattcagattgtgtgtcaacgggtacggtcctacgcgaattgccaacattctgactgaacgcaaaatcctttgtcccacctattacgctctggagcatggcgagaagcctaggacagttctgccaccggacaagtatctgtggagcgcaacagtcgtatctcatatactggagcgaatggactacttggggcatacagtgaacttcaagacccacgttaagagttacaagaatagaaagaagatcgacaactctcccgagcaatggcgggtattcgagaatacacacgaggcgattattgacaaggaaacattcgaaatagtgcagaaaatcaggagcgggaaacgcagaccaactaagatgggggatatgcctatgttttccggcctgctgtactgtgccgattgcggatcaaagatgaccttccaccgccagatggcacagtcagccgaaaagcacaattttgtatgctccaattaccgccataactctaagagttgcacaatgcactatattcggaacgtggttgtagagcagatagtgctcgagaatcttaaggaagtgattaggtatgtaagcgattatgaggacgaatttgttcagatggttatggatacagacatgaggcaacggaataaggagttgtctcagaaaaagaaacgcctgactgaaattcattcacgcatccaggagctggacaaaatattccagaggatctatgaggataatatctctgggaagctcagcgacgaacggttcatgaaactgtctaagggatatgaagaagagcaacacaccctccaggaggaacagacatcccttgagaaagagcttcagaaggaggaaaaacagtctgtcgacgtcaagcagtttcttagtgtcgtgagaaaatacacgaatctgacggaattgaccccagaaatcgtgcacgagttcatcgataaaatcattgtgcacgctcccgataaaagttccggaaaaagactccaagagattgagatcatctacaatcacattggcgtgttcgatcactccaaagtgactctctggaaaggtaaggccgtt

SEQ ID NO: 890 - DNA, 1542 bp, unidentified
  source 1..1542: mol_type = unassigned DNA; note = Bacteriophage uvig_223147 from the Index of /pub/databases/metagenomics/genome_sets/gut_phage_database (ebi.ac.uk)
atgtataatcagaatgaacttattatgtacctcaggaagtcacgcgccgaccgaccagacgaaacagttgaagaagtactggaaaagcacgaaggtatcctccaggactatgcaagtgagaactttggattcaaaatcccggagaatcagatactgcgcgaggttgtgagtggggagaccatagccgacagacctgaaatccaaaggttgctgcgccaaattgagtccaaaaaaatcaaggctgttatggtggtcgatccacaaagactctctaggggtgatctcgaggactgcgggcgaatagtcaacgcgttcaggtactcccatacgaccattattactcagtatcgggagtataacctcgaggataagtacgaccgaaaattttttgaaatggaactgggccgcggcaatgattacttggagtacactaaggagatccttcagcgaggacgaaatgcaagcgccaaaaaaggtaacttcttgggctctgtgcccccatacggatataagaaagtgttcgtagataagcgccctacactggagatagtgccagaggaggcaaatgtggtccggatcatttttgacctgtatgtcaacaacaactatggattcatggccctggccaacgcactggacgatctgggcattaaaccccggaagtcaaagtattggtctgctgccgccctgaagaatttgattgataaccctgtgtacattggcaagatccggtggaactttagaaagactatctatgttatcaaggacggcgaaaaacagcgcactaggcccaatgcaaagaatatcaatgactacattcttgtcgatgggaaccacgaagctattctgagcgaggagatgttcaatgctgcgcaggcgaaaaaagggaagaatatccgggtaaaacagaaagtggctgttagaaacccctttagcggtctgctcttttgtgattgtggccgggccatgtcttatcggacatatagaaataagggagtgacaattgctatgccccgattggtgtgcgaggaccagcaccactgtcggaacaagagtgtttactacgacgagttcgaaaagtacatcgtggatgtactctacgcagccattgctgacttcaaggtcaaactcgagaacaacaataacaccaattccgactacgacctcctgatcaaaaaactggaagacaaacttgaaagactgcataagaaggatgatgagcagcacgatcttctcgaggaagggttttacaccaaggaggtgttcatcagacgcaacataaaactccaagaggatatcgagcatacccagctggctatcaagaacacgaaagagaatatgccgaagaggattgactatcacgaaagaatcgcgaccttccaggaagccgtcgatgcacttcagaggaacgacgtggatgcctcattgaagaacatgctgttgaagaaatgcattgagaagataacatacagcaggcatctgctcgccaatcaatccaagttcgaaaatcctccttttaacgtggacatcaaacttcgactt

SEQ ID NO: 891 - DNA, 1596 bp, unidentified
  source 1..1596: mol_type = unassigned DNA; note = Bacteriophage uvig_80069 from the Index of /pub/databases/metagenomics/genome_sets/gut_phage_database (ebi.ac.uk)
atgggcaaaaccatgacagaaggcagttccgcacttaaagaaaaacgggtgatcgtgatcgaagctacggagcagcaggaggccaagaagctccgggttgcagcctacgcgagagtcagctccgatagcagcgatcaattgaattctttcatggcccagatgaattactattcagacctgattagcacacacgaggggtgggctatggccgatatctatgctgacgagggtatcactggcacttctgccgaaaagcgattggagtttcaacgcctgctttccgactgccacaaggggagaattgacaaaatattggtaaagagtatatcccgattcgccagaaataccaaggagtgcctcgagaccatcaggagcctgaaggctataggagtgggagtgtacttcgaggagcagaacatcgacacggctgccatgagcggcgagctcctgacagccgtttttgcctctattgcgcagaaagagtcagagagcatctctgggaacatgaggtggtcatatgagcataggatgaagagtggtacatatttgccgtcatctatgccctatggatacaccattaaagacaagaaaatcgtggtcgacgaggaccaggcgaagatcgtgaggctcatcttttcctcctatcttgcaggaaccaatatggttgaaattgccaagatcctgaatgatgcaggagtgtctgtcaagaatggcgaccctcagcagaagtggtctaagagttccattagctacatcctgagcaacgaaaagtacatcggcgactcactgtggcagaaaacatattccaccgatacatttcctgtgaggcgctatgtcaacaacggtgagcgcgaaaaatactacgcacagaacacccacccagccatcattgatttcaagacgtacgatgctgtccaaaagttgaaagcggctcgaaaagagatccttgataactctccaaaaaaaacttcacccctgtctcacagtatctactgcggccactgtggggcactcttccggcgcaagatgtgtagaggcatacagtactgggaatgttccaaacatgcacagagtaagaacaactgcattatacaccagataccagagaccgaattccataatgccttcctgcggctctatcataagctgaaacttcacggccgacctattctgaaacagatgataactgatttgcagacagtacgggaacggcgcatgctctggtccgtggatatcatagaacttaacaagagaatctcagacctgacggatcaggaccataccctgtcagagatgaataagcttgggctggttgaccccgatatctacattagccaaagtaatgagctggctaggaaaattgcagctgccaagcaagagaaagagaggctcattggactttctcaagacactaccattcctcagacacgggagcttatggaaattattgagtttagccccgactttctcccaacttttgatagcgaaagtttcactggtctggtggaaaagatcactgtcgaatccaacgaatctctccgaatcacacttaaaaatgggctggagctgcgcgaaaagatcgaaagaaccattaga

SEQ ID NO: 892 - DNA, 1494 bp, unidentified
  source 1..1494: mol_type = unassigned DNA; note = Bacteriophage uvig_594811 from the Index of /pub/databases/metagenomics/genome_sets/gut_phage_database (ebi.ac.uk)
atggctaaaggcaacagagcagcaatctatgcacgctttagttctcacaatcagagggacgaatccatcgaaattcaggtggagaagagcagggagtactgcgaacaacggggcctcgacgtggtgtgcgtgtatagtgattatgctcaaaccggcaggaacaccgcccgagccgagttccagaaaatgatggatcatgccaaactgggtatgttcgactacgtggtcatctacaaagtgacccgaatcatgcgcaatagagatgaaatggccctggctaggattatgctcagacaggcaggggtcgagatcctttacgccggcgagaccctgggccacgggtctactcgagtgttgcaccttggcatgctggaggttctggctgagtacgagtcagctgttgactcagaaaggattcgggatgggatccaaaagaatgccgaacgcggtatggccaacggtcagaccaggtacgggtgggacatcgtggatgggtattaccaggtcaacgaacaggaggccgccctgctgcgccggatgaagaatatgctgctcagtggctccacattggccgaaatcacacgcgcgatggaaggagaacgaacacgcgctggcaagaagttcaccattaaaggaataatgaaattgctgagacgatggcagaattgtggagtttatgaatacgcaggtgtcaggattgaggacgggatgcccgcattgtggacccgcgaggaacaagagatgcttatacgaatactgactcaccgcactattactcagagacggcgcggagaagccgaggaatatcctctcagcggcaaacttttttgccgggagtgtggaagatattattccggaacatgtgggacatccaagagtggcacgaggtatttctactaccggtgtccgagctgccgaagagcgtttcggagcggcttgatcgaggcatgggcctgtgatgccgtgtttgaagccacgaagggcaagcattttaaggagcagctcgcagatgccatggctgttttcgacgaatcctcaaacggggcacatgagatcgaagcgaagcggctccggaaggaaattagcaaaatcgacgctgcctttgagaggatttggaaggcaatcgaggacggctgcgcgcctcctggcggaaaggatcgaattgctgacctgaaaacgagaaaagcagctttggaggaggatcttgctcaggccgaggccgtatcttcttgcgaatctatttccaaggaggacctggaagagtggataggattgatcgcgaaagagaacgacacaaagaagattatagatagattcgtaaggttcattgaattcgacggtcaagaggggcacatctacttcacctttgaccatcacgggaacgattttatgcccactaaaaaggctaatacacagatgaaaggttgtagcccaatcgagtcaatggtcgataggagaggactggagcccagaactctgggactccgggtgcca

SEQ ID NO: 893 - DNA, 1488 bp, unidentified
  source 1..1488: mol_type = unassigned DNA; note = Bacteriophage uvig_239214 from the Index of /pub/databases/metagenomics/genome_sets/gut_phage_database (ebi.ac.uk)
atgagcgaatatattatgtacttgaggaagtctcgacaagacgagccaaacgaaacagtcgaggaggttcttaaaaaacacgaaattcagctgcaagaatacgccttgaataactttaagtatcaaatacccaatgaggatatctatcgcgaagtcgtcagtgatgagactatcgatgaccgcccaatgatgcaggctgtgctcaaacgcattgagaattccagcattaagggtgtccttgtgattgattgtcagcggctcacgagaggggacatgctggactgcggcactatcgtccattcattccggtatagtaacaccttgataattaccccgcctaagacatacagactggatgataagtatgatagaaaattctttgagatggagcttagcagggggtccgactacctggaatatactaaggaaatactgaaacggggtagggatgctagtaaacgcagagggaactacatcggcagcgtcgccccctacggctacgacagagtgaaagtgggcaatgattggaccctgaagcctaatgatgagtctcagtacatcaagtatattttcgaaaggtacacacagggagtgggaaccgcacagattgctaacgagctcgatgctctgggagcaaaacctaggcattccgagtacttcaatcataccagaatccgaaagattatagaaaaccctgtatacgtggggaaaattaaagtgaattcaaccgaaatacgcaaggaacttgttgacgggaagattgtgaacaagaaaatatacaagaaggaatatgagatcgtcgacggaaagcacgaacccctgatctctcaggaaatgttcgataaagcccagaaagagaaggagaagcggacctgcaacaatacttctacagagctggtgaatccatacgctagcatcatgaagtgtggatattgcggttcagccatcgtgaattactacaataacatgacccgaaaaaaaacaaagcgcgtgaggtgtgcaaacaagaagtgtaactgcgtaagccacaattttgacgaggttaacgacgcgattatcaaggccctgaagagcaaactggaggacatcaaggtgcagacggatatcaacacgccccgggaaaaaaataatgcaaaaaacatagccaaaaccctggagaagcggatcaaagagtccgagaaaaagttgaatgatatctgcacatatcttgagaacggcgtttatacaattgacatgttcaccaagcgaaaagagatcttggaagatgagaaagctacattggaaaaggccctcgagaatgccaaaaaggagactgaatcctctattgagttgaaggcaaaaagtctcactctgcacaaggcgattgacatgctcaaggacgacactatttcagccaaggttaagaacaactttctcaaaaaaatcatctccgtgatctattacaagaaagacaagaacggcaacatctttatcgacgtacacctgtgt

SEQ ID NO: 894 - DNA, 1587 bp, unidentified
  source 1..1587: mol_type = unassigned DNA; note = Bacteriophage uvig_65204 from the Index of /pub/databases/metagenomics/genome_sets/gut_phage_database (ebi.ac.uk)
atggcgaccgccaagaacgtgactgtgatcccagcgacctttaatccgcagactagaagacctctgaaacaggtgaccaggcgacgcgttgcagggtacgcccgcgtgagcacagatagcgacgaacagttcactagctatgaggcccaggtggattattataccaactacatcaacagcaaccctgagtggagctttgtgaaagtctacaccgacgagggcatatctgggactaacacaaaacaccgggacggattcaacgaaatgattgctgacgccttgaacggtaaaattgacctgattgtgacaaaaagtgtgagcagattcgctcgcaacacagtggatagcctcacgaccattagaaaactgaaggagcacggaacggaagtttacttcgaaaaggaggcaatctggactttcgacaacaagggggagctgctgcttacgattatgtcttcactggctcaggaggagtccagatctattagcgaaaatgttacatgggggaggagaaagcaattctctgacggaaaagtctctcttccatacggccagtttcttggttataggaaggggccagacggccttccagaaatagtgcccgaggaggccaagacagtggatctgatctataggatgtttcggaatggcaagactcccagttacatcgcccgccacttgaccgctcagggtattcccacccccggaggaaagaaggtctggcaggcccaggtcattgagtccatcctgaccaatgagaagtataaaggcgatgcaagactccagaaaaagttcacgaccgactttctgacaaaaaagcagaaaaagaacgaaggagaggtaccccagtactacgtcgaaaattcccaccctgctatcatagagcctagagcttgggcagaagtccagcgaatcatgaagcggcggaaggcctcaggcaagcgccatgaatgctcctccccattttccggcatggttatttgcggcgactgcggctccacctacgggtcaaaagtgtggcacagtaatgatccttaccggaaagttatttggcagtgtaactcaaagtttaaaagtgaggagaagtgtcgcactccgcacgtaaccgaggagcgactgaaagatggctttctcgaagccctctctatcttgcatgagaatagggaaaccctccttaatgatatacgcgacgttaagcacgaccttgaaaattgtactgaagtcaatgccaagataacagagactgcccaagagatggaggtgatcgcaggtctgatccaaaaagctatcgaagataatgccgtgcatgctcaagaccaggaggagtataacaggcggtacaatgagctggccgatcattacgagaaacttaaaaagaagcttgaggctcttgaacaagaaagggatgacagggaatataagtctaccgtcttgtccggattcctcttcgagatgatggaatttgaatatctcgatgcagaattcacagacgcgcggtgcatcgcaatgttggatcatgtaagcatctacgccgatgggcgaatggtgtatagtttcctgaacggttcagacattacagtaatgctg

SEQ ID NO: 895 - DNA, 1635 bp, unidentified
  source 1..1635: mol_type = unassigned DNA; note = Bacteriophage uvig_597817 from the Index of /pub/databases/metagenomics/genome_sets/gut_phage_database (ebi.ac.uk)
atgaacaataaccgccaaagttacaatgcggaagaaaagatcaccgccctctactgtagattgtccagggatgacgagttgcagggtgactctaacagcataattaatcagaaggctattcttcagaaatacgccgacgacaacgggtttagaaacacattcctgttcgtcgatgatgggtactccggcactacgtttgatagacccgactggaataggctgatgggcctcgtggatgaaggaaaagttggcaccattatagtgaaggacatgagtagattgggaagggattacctgaaagtaggaatgtataccgagatggtctttcctaacgccgacataagattcattgccatcaataatggagtggacagcgccaaccaggctgagaacgacatgacacccttcatcaacattttcaacgagttttatgccaaagacacctcacggaaaatcagggcagtgtttaaggctaaggggcagtcaggaaagccgctctctactaacccaccctatggttacgttaaagatccagaggacaagacgcattggctcgtggatgagcaagctgcggaggtggtgcgagacatctttcggttgtgtgtccagggctacggtatctcccagattgcaaacgagataacccgcaggaatattcttaatcctacagcatatgccaaggcctctgggcgatccgtcccggataacagagatggagacaatgattacacctggagaagcagcacaatatcccatatgctgtctaggcctgaatatctggggcacaccgtgaattttaagacataccggaagagctacaagcagaagaagcagctccatcactccccaagtgaatggcagatcttcgagaatactcacgaagcaattgttgatcgggagacatatgacatcgttcaacgcatccgagatggtaggcgacggcgaaccccaatgggcgaaatgccaatgctgagcggcatggtcttttgcgcagattgcggggctaaactttaccaggtgcgctctaccggtttcagccccggacaggagtatatggtgtgtgcaacttatcggaaaaagggcaaagagaagtgtacatcccaccaaattagaaacagcgtgatcgaggagtttttgctggaaggcattagatcaatgaccgcttatgttcgcgaacacgaggatgagttcgtcgagatggtcactaaactgtccaaggcagaaacggagaaggccctgagggacgaaaaacgggagcttgaacaggcggaaagtcgggtgcataaactcgacactatcatccaacgcctgtacgaagacaatgtggaaggcaaaatctcagacgaacggttcgctaaaatgagcgaaaattatgagagtgaacagaagctgctggagaggcggattacagagatccgatgctctattgcggcccagaaggaatcatctatgaacgtgaattcattcgttgccctggtgaggaaacacaccgatatccaggagctgaatgctgaagtaatacgcgagtttgtggagcgcgtggaggtcttccagcccgccagagtcgggggccgcaaggtaaggagactccgaattgtatggaactgcatcggggagttcactcctcctcaactt

SEQ ID NO: 896 - DNA, 1605 bp, unidentified
  source 1..1605: mol_type = unassigned DNA; note = Bacteriophage uvig_35124 from the Index of /pub/databases/metagenomics/genome_sets/gut_phage_database (ebi.ac.uk)
atggattcaaatcaaagaatcgtccggacaatccctgcaagttttacgagaaccacatctcaggttgtccgattgctgaacgtgggtgcttacgccagggtgtccaccaagaaggaggaacaggaggactcatacgagagacagggatcccactatactaagtatattaaaagtcacgacggctggcaatttgtcgacgtgtacgctgacgaggggattacaggtacgcgagcagagaaacgaaaggattttcagagaatgatggatgactgtaggttggggaaacttgataagattctcgtaaagagtatcgccaggttcgccaggaataccgtggacgctctcaatgctattagggagctcaaagagctgggagtgagcgtatacttcgaaaatgaaaacattgatactctgtccccgggcggggaggtgctgttgacgattctggcagcgatggccgaacaggagtcccggacaataagcacaaacatcaagtgggcctatcagaaaaagttccagaacggcgacatccaattgaactacaaacggttcctgggctacacccgagacgaaaaccataatcttatcatcgtgcccgaagaggccacagtggtgcagcgcatttttagagaatatctctacggttacagttgcgccaacattgccgcaggcctgacgaaagacaaaatccccaccccttctaataagaccaagtggtacgcttccgtgatcatgtcaatcctgcagaatgagaaatactatggcggactgatttgcggaaagacctacaaaccagacgttctgagcaaaaagcgctacaagaatgagggacaggtagaaaggtattatattgagaacagccatccagcgatcatctccaaggaagagttcgatctggtccaggctgagatgcggcgcagacagacaatacgagggttctcagagaccaaccaaggcaggtactcaagcaagtatgccttttctaaacggttgatttgcggcgaatgtggggcgtactatagacgccacgcacagtattgcaaaggggagtacatacacacctgggtgtgtcccactcacaaaattaaaggcgggactgcctgttctcaaacttacctcaaggaggaagagatagagggggcattccttgaaatgctcaaagctctcgttggtgacttcaaggagatctctgatacactcaaggaaaatatagtttcttcactcgatgacagcatcgccgaagatattaacgagactctgctccagatcgaggtgcgccagactgaaatgttggagctcctgcgcgaaaaacgcgccggaaggataagtgatcaagagtataacgagagaggaatggctatcgagaaggctatacaggaactgtccgaacggcgggtgaaacttgagagcaagagtaattctgcgaagcttgcaatgatgagggtcgaacagatcacaaccgcccttagcgatgtaggctcccttgataagtataatggagaaatttttcggtccatcgttgaaaacgtggtcgttcgcaacacatataccctggactttcatctgaaggtcggtatcgtggagagcattactatcaccagaaag

SEQ ID NO: 897 - DNA, 1539 bp, unidentified
  source 1..1539: mol_type = unassigned DNA; note = Bacteriophage uvig_550968 from the Index of /pub/databases/metagenomics/genome_sets/gut_phage_database (ebi.ac.uk)
atgcaagaaaataagcagaacattcgctttaccgccctttactgtcgattgagctccgacgacgaacttaagggggatagcaactccatcatccatcagaagcagatattgcaggactacgccctcaaaaattctctgactccaactgaagtctacgtggatgatgggtttacaggcaccaattttgacagacctgacttcaagaggctgctcagcgatgtcgaaaacgacttggtgaagacaataattgtcaaagacctgtctagattcggccgcaattacctgaaggtcggatactatacagaaatcctgtttccctccaagggtgtgcgctttatcagcgtctctgacaacttggatacttccgccaaagacgaaatcaacgatttcatcccattcaagaatattatgaacgagtggtacgctaaggatctcagtaggaagcagcgggctgtaatcaaaagtaaagggaacgcaggaaaaaggctttccaccagacccatctatggatataagaaagcagagaacggtgactggattattgacgagcccgccgccattgttgtgcggaaaatcttcgacctttatctcaagggttatggacctgccagcatcgcaaactacttgttcgctaataaggtgaaaatcccttccctgactggactccaaatctctgataagaccagaaacccgtatagatggtccaaggattcagtggcacatatcctgacgtgccaagactactgtggcgacatgatcaattttaagcggtcagacgtggataacctggtgattttccccgataagcaggagcctattatatcccgggagatatttgccgaagcacagaaactcaggctcagcaaaaaaccagtaaggcactcatattccgagccagttctgttcagcgatttcctgaggtgtgctgactgcaagaatcggatgtacgcccagcggaggtataaggggtctacgagttatacttgcagcacagctcgaaaagtacaaggctgcagcagtcactacattaacgagaacagactttcagattgcgttaagagtgagattaacaagcttatcgcaaataagaccaaagttgtcgagtttgcgaaagccaaaatgcataccgacgctaagacagcccagtgtgctagcgtcaagaatctgaaaaatgcccagacccgcatatctgaaattgatgctatcctgaagaacctgtatgaggataaagtgcgaggcaacattactctcgaaacgtttaaaaaactggaaaatgaattcctgcgcgagcaagcgaacctgaatcagaccgtgattaatcagtcacgcatcaaggtgaatattgactcacagtctaaaaagatatgcgagttccttcggaaacttgagatgtacaaggtgacaattcaggagctgtctagaaacgtgctgatcgatctcattgataagatcgagatatgtgaagcggaaaaggagaacaataagcgaagtcaacaggttcacatctactaccttgggataggcaaaatcgacttggag

SEQ ID NO: 898 - DNA, 1641 bp, unidentified
  source 1..1641: mol_type = unassigned DNA; note = Bacteriophage uvig_296393 from the Index of /pub/databases/metagenomics/genome_sets/gut_phage_database (ebi.ac.uk)
atggctagaaagtcaagaacccagcccaaacaatctcctgacacacttaacgtgctctctaaagtgtataagaccgcgatctacgtacggctctccgccgaaaaggacgaaacaagggaccggaaaaccctcattaaccagcgaaatttgatcaagaactttgtggatcagcaaatggatatggaaatccacgacatctacatggacgacgagatttcaggcactacatttgatcgacctgagttcgagcgaatgatgtctgacatgcgcgctgggcggatcaactgtatcgtcgtcaaggacttgagccggctgggtagagattacattgaaaccgggaacctggtcgaacgagtgtttccaatgatgaacatccgcttcgtggccatcacagataattacgatagttccaaaaaggatgccgatctgatggttgctgtcacgaatatagctaacgatctgtatgcaaaagatatatcaaaaaagataagttcctccaagcaggaggcgatggagaaagggatcccggtgggccgggtgacttacggatacaaggtcgtgctggacgaaaacaaggtgcgagtgatggtagaagacaaagaagctgccgacgtggtcaggtggatctttaatgaggcggagaaagggaccctgcacagcgtcattgccgcagagctgaatgctaagcacattctcacccccgcacagtataaagtgagacacaatattgagaaactggagaaactgaggggcgttaagtggactgtagacacactcagccaaattcttaagaacgaggtctacattggtaggtacgtgactggtaaggatagggtgtgtctttatcgccatgagaagcgccatactacaaataaggacgaatggtacgtattcgaaaaccatcacattgctctcatcacaaaggagcagttctacgccgttcagaaaaataagcgcaaggtcatcaagccagccaaaaaacagaccgtgaacatgctgaaaggcaagatcacctgcggctgctgcggaagcagcattcacatacatcctgagaagtatggcaaagtttatatgtgcacgcaccggaagaggtatggaaaggattcttgtaactgtttgcccgttaaggtggatgacatctatgctgccgtattggctgtgattaaggagcaaatccaggttttcatcgatcgggagaaaattctgaaggaacatcacaatgactccagtgttattcgccaggagcaggtgtacactgaagccgttaataagtgcgtgaaagaaatggatagacttatggagctgaaaagcgggttgtacgccgattatactgaggacttgctggacgagaaggagtacctgcagttgaatagagagtacagtcaaagaatagagaagcttaaaatacaagccgacgagtatcggcaggccgcatcacagtatgaatctgccgaaaaaacggtagcacagctcaaagcagaaatgctgaggtttaaaggaaaaagaaaactcacccaggaaatggtggatctttttgtcgcccaggtcaggatctacaagaacaagaatctggaaatcgtgctcaattatgaggacgaactcaagaagttcgcagaactgaacatggagcgcgaggcaggc

SEQ ID NO: 899 - DNA, 1455 bp, unidentified
  source 1..1455: mol_type = unassigned DNA; note = Bacteriophage uvig_311349 from the Index of /pub/databases/metagenomics/genome_sets/gut_phage_database (ebi.ac.uk)
atgaccctcctgtccacactcgaaatcggagccgcatacatccgcgtctcttcagacgaacagaccgaattgtctcccgatgcccaggtcagagtcatcaaggacgcagccaaagctgacggatattatattcctgacgaattcatcttcatggaagagcgcgggatctctgggcggaaggccgagaacaggccagcgttccaacgcatgattgccgtagctaaaagtgaaaatcccgccccgtttaaaaggctgtacctttggaagtttagcagatttgctagaaaccaggaagaatcaacattttacaagggtattctccgaaaaaaatgtggcgtggaaatcaagagtgtgtctgagcccatcgccgagggtatgttcgggaggttgattgagaccatcatcgaatggtttgatgagtactatagtatcaacctgagcggggaagtattgcgaggtatgacagaaaaagctttgcgcaatggctatcaaacggcgcctagcatgggctatgctgccgttggacacggcaatccattcgtcatcgaccctgagcgaatgaagattgtggagcagatacacaccttgtaccataatgggatggatatgaccggaatagctcgagagctgaatcggcttggataccttactcaacggggtactgctttcgagaggaggaccatctatcgcatcctgactaatagattctacattggcactgtgacatggaacaacatatcattccacgggacccacgagctgtccccaattgtgacagctgtgtttgaagataatcagactcggataaagagagagtctcagacgatccgccatagagacgtttcctcctgcaagcactggctgtcaggcctgctgcgctgtggtgtctgcggctctacattgagctatagccgatctaactccccgcaaaaaaggtccgatgcattccagtgctggaagtacattaaaggcatgcatcccggatcaaactccattagcgtacggaagatcgagcaggccgtgattcaaagtctccaggaggttctcgtgactggcgagatctcatatgagtacatcccacctcaggacgatgaaacaatagacagaaaggagctgctccgggaggccattgaaaaggtgacagttaaagaaagacggatccatgacgcatacgagaacggaatagataccctggaagaatacaaggagaacaagaagaggttgctgatggagaggaccgagctgaccgaagagctcgagaaactgtgcagtattagccccgccgacgaggaggcggggaaagaggagcttctgaaacgaattcagacggtgtgtgaaactctgagcaatcctgatatcgactatgaaactaagggcgtcgcaattcgccaggttattaagtacatagtgtataaccgggcagattccaccctccagttttactattaccttagc

SEQ ID NO: 900 - DNA, 1641 bp, unidentified
  source 1..1641: mol_type = unassigned DNA; note = Bacteriophage uvig_245605 from the Index of /pub/databases/metagenomics/genome_sets/gut_phage_database (ebi.ac.uk)
atggaagcagctacaaccaccttggagaggcgcgtaagagagatcccacctaccaggaaacctgaggagctcctccggaactacgacggcaaaatgcgggttgccgcctattgcagggtatcaacggacagcgaggagcagctgaactcttatgaagctcagaagacctactatacccagaagatccaggataacccggattgggagatggccggcatctacgcggacgaagggatttctggcacatcccttaagaagaggactgagttcaataagatgataaccgcttgcaagagaggcagaatagatttcatcattacaaagagtcttagccgatttgcccgcaacacagtcgactgcctggacacggttagactcctgaaagcaaatgggataggagtctactttgagaaagagaacatcaacactctcactgagagttctgagtttttggtcacactcttttccggctttgctcaagcagagtcagagtccctgagtaagaacgttgcatgggggaaggagaaaagcgccaaagccggcaatgtgcactttcagtacaagaagatgttggggtatcgcaaaggcgaagacgggcagcctgaaatcgtccccgaagaagccgccattgtgcgcagaatctaccgccgctatttggacgggtgtaccctgggtaaaattaagcgggagctggatgaagacggcgtgcccactgcgcagggggtggagtgctggagccccgctatcatccataacatattgactaatgagaagtacattggagacgcactcctccaaaagacttatgtgaccgactgcttgtcaaaaaaggttcggaaaaacaggggtgagcgggtgatgtactacgttgaaaataatcaccccgcaatcatttccagagaggcattcgaccttgtcagaaaagagatgactcggcggagcagtaagcgaaaggtgctgcagaaatcagggaagacggaactgggaaagtacagtggtaagtatgctcttaccgaactgctggtgtgtggagaatgtggaagcccttacaaacgggtgacctgggcccgcgatggcaaaaagaggattgtgtggcgctgcgtatccaggttggagttcggaacaaagtactgtcatgcctctccaacattggacgaaggaaaactgcacagcgctatcctgaatgccatgaacgagtatgcggccattaggcaagaagtgtgtccagatgttctggcaatggtagaggaagctaagcaagccctgactcagacaggaacaaaactgctcaccttgaagagaaggctggacgaggtgtcccatgaacaagctgatatgctggacatgttgctcagcaatatggccgacgctgatcttaatgctcgaatgaaggcccttactgatgagaaagcatcattgaaagaacagattctggagacgcagcaggaggaggtgggtctggagaagcaagtcgccaaacgacaacagatgtgggattctcttattgaatgttccgaaggttataccgaattcgatgacgaattcgtgcgccagattatacagaaaatcacagtcgaggatgcggataccatcagaatccagttccgagactctgatatcgtgctcgaacagggcctgcag

SEQ ID NO: 901 - DNA, 1539 bp, unidentified
  source 1..1539: mol_type = unassigned DNA; note = Bacteriophage uvig_163750 from the Index of /pub/databases/metagenomics/genome_sets/gut_phage_database (ebi.ac.uk)
atgtaccgatatatcgttgctatctatttgcggctgtctgtggacgataagcgcgtggagtccatgagcatagagtcccagagactgcttctgagaaaatatgccgaaatcctcggtgacaacgtcgagataatagagtacgtggacaatggctactccggaaccaactttgaaagaccggccgtccagcaacttttgaccgatgtgaaaacctataaggtgaactgcattcttgttaaggatttcagtcgatttgggaggaactcaattgaggtgggatatttcactcaacagatttttcctctgttcggggctagattcatcagcgtgagtgacaattacgactctgacgagcacaagggagacactggcggtattgcagtcgctgtcaagtatctggttaatgaatactactcacgggacctcagcgtgaaaaccaagtcagccaagtacactaaaatgaggagaggcgagtacaagtctggaaattatacatatggctataagcctgataagaacggtgagcaaattatcgatgaaaaagctgcagagactgtcaaaatgatattcgagctgaccgcggacggaaagagtgccgcgtatatcagcaagctcctgtttgacaaaaatattcccacaccagctcagtataagggcatcaagggcaattacgggtctagattcccaaactgcaagtactggtcaattagcacgatcaacagaatcatcgtcaacgagcagtacatgggcatgttcgtgatgcttaaacaaaaggtacaagatgtcgggagcacaaagatggtaaaacgcgatgaatccgagtggatcaagatccccaatcaccacgagtccatcgtgagcaaggaactgtttgagcgggctaacgcagttaggcgaacttttaagcagccaaataagcaacagaggagttaccccctgcgcggtaaagtagaatgcgggtgctgccagcatgcaatggactatgttcccaaaaagacgccaatctaccgatgttcttacacacggaatgatgagacggagccttgttataagtccgagatctctgaatcaagtctcaatcaggccgtgtttgacatcatctctaaacaggccgagataattctcaacatcgatgatgtgtccaaagcagatacagctcagattaaaactgaacagctggccgacattgagaagcagattgtagcctgtcagaaggagaagcagaagctctacgaacatctgcttactgaaaaaattacccttgacgaataccggcagcaaaaacaggagtatgatacaaaagccgagaattacaggattcgctacgacaagtgtcggcagagcgaagagcagaaccgcttgaaaatcgagaacaggaccaaaatcgtccagaccgccaaaacaattaaaaaagaaaacacccttacccaagcgttggctgacgtgctgatagaaaaggtttgcgtgtatcctgataatcgccttgaaatagaatggaaaattaaggatttctgtgcagaaaacacagccgtgatttcc

SEQ ID NO: 902 - DNA, 1443 bp, unidentified
  source 1..1443: mol_type = unassigned DNA; note = Bacteriophage uvig_75905 from the Index of /pub/databases/metagenomics/genome_sets/gut_phage_database (ebi.ac.uk)
atgccaggcactaactccattcccggcacagccgctgcctacatcagggtttctgatgacaaacaggacgagtactcacccgactcccagctgaagctgattagagattacgcaaagcggaatggatattacgttccggatgaattcgtcttctatgacgacggcattagtgcaaaaacagctgccaaaagacccaagtttatcgagatgattggaattgctaagcagaagaaccctccttttgacaagatactggtgtggaaattctcccggtttgctaggaatcaggaggaaagcatcgtctacaagtccctgctcaggaagaatggggtggaagtaatttcaatcagtgaaccactgatagatggagcgttcgggagcttgatagaacgaattatcgaatggatggacgagtattatcttgtgcgcctcagcggggaggtcaaacgaggtatgaaagaaaaagcaagccgaggggaagccatgtctgggcgcgtttttggctaccttcctaaagatggcactttgattccccacccggaagaggcaccccttgtacgcatgatctttgacgactatctcaatggcaaacgcgagagacaaattgctatcaagctgcaacagctgggtgtgaagactatcaggggtaatgatccagacaatcggttcgtggattacgttctgaacaacccagtgtactgtggcaaagtgaggtggtccaccgatggacgcgcggctagtaagcgggattatcacaatgagaacatcatgcttgtgaatggcagcttcgagcctatcatctctgagcagacttttaacgctgcgcagaaaaagatcgtagaccagaagaaacgataccccaagtatcaacggaacgaggcccccacagagtacatgctgcgcggattggtgagatgtgactcatgcggcgcaaccctcacgcttcaaagagcaagcaaggccctgcagtgccataactacgcccgggggagttgcaaagtgtctcactctatctctatagccaaggccaacaagacagttattgaagcattgcaatacgctgtagaccacctggattttaacatcctcccagacgaggaaaagcatacgcctgaggattattcaaaacctctggcggcccttagaaaaaagctcgcccggacaaaggaagcctatatcaatggtgtggacactctggaggagtacaaggagaataagcagaggataaccgaggatattgcgaagcttgaaaaaaaacaggcagccaacaccgcccttccagaggtggacaaagaagctttcgccgcaaaagtgaggggagtcatcgcagtcatatcaagcccggataccaccgaacaggccaagaacgaggccttgagatccgtcattgctaagatcgtctatcataagctggctcagtccctcgagctgtacttctatgct

SEQ ID NO: 903 - DNA, 1536 bp, unidentified
  source 1..1536: mol_type = unassigned DNA; note = Bacteriophage uvig_151078 from the Index of /pub/databases/metagenomics/genome_sets/gut_phage_database (ebi.ac.uk)
atgcagacaccccgacttaagaaaagggctgcttcatatgtcagagtgagcacttatcaagagaaacaagagaagagcctcgcagatcagatcgctatgttgaacaagatcattgatgatgacgataccctgattaacgttggcacttacattgatcaggggatcaccggcaagtaccagtctaaacgaaaacagtttctcaaattggtgagggactgtatcgagggtagaatcgacgtggtttacgtgaaacagatgcggcgctttggacgaaatacactggagaccatgcagactatcgaaaaacttcgggcctatggggtggccgtcagattcgtgatggacggcatagatactatcaaagaccgcggctgctctcgcctcacaatgttggccaatatggcggaagaagaacgggatagccttcaagaaaccatgatctggtccttccagcaccgcatggagcagggtgactacgtcttcaggcccgacctgctcttcggctacgccctgaacaagaacaaggagatggttattgtcgaggaagaggcgaaggcgataaagtatatctttgaaacatacgctgcaggtgggagggtggttgatatcgaagcatggctgaatgagcatgggtatgtaacccgcaaggggaaccctttctgtaaaagttccattggcgacattctgcaaaacgagaaatattacggagatctcctcattggcaagacccggatggatggaccacggcgagtccgcaatgagggagaatcaccgatgtatctgcacgagggtcatcatgaaggcattatctctaaggagctgtttgacaagtgccaagaagtcagacagtctagacactacaagacgactaaagattacagtgattcagacatattttgtaagaaagtatactgtggacagtgtggcagtctgtactaccggcagggaaggattaactgtgtgtccgatttctctcaaaccgccttcgcatgcgggctggccgtgagatccaagaggagcaagtgccgaaacaagcttcagaggataggaacactcaaggacggatttgtcgccgtgtataacttcctctacgacaatagaagcaccctgaatgagattgtggtggaaaatgaagagtataacgagatcgtggagcgcttgaaagagctttgcgaaagcgagaagatgtatttcgaggccgaggttaaagggctcatgaacgaacagatgaaaaagaatcacacgaggctggtcggtgaggtcctgaatctggaagaacggaaacgatttctgctgagtcggaacttcgagatcagcaattgcaactcaaatctcaaaaagtgcaataaggtattgcgggagacaggcaagattgctgactttaatgacgaactctttgagatcttcatccagcgcatcctcgtgataaacagaaacaatctggtgtatgagttgacttccgggcacaaaattaatgttgaagtacttgacaactacaaggtgagagacgagataaggcgcgtttacgtgtccgaa

SEQ ID NO: 904 - DNA, 1293 bp, unidentified
  source 1..1293: mol_type = unassigned DNA; note = Bacteriophage uvig_195859 from the Index of /pub/databases/metagenomics/genome_sets/gut_phage_database (ebi.ac.uk)
atggataagaaaatcacagtgattgacgcccttcccaagttggagaaaaagcttcgcgttgctgcatactgtagagtctcttccggcaaggacgccatgctgcactcattgtccaatcaaatcagttactacaacaacctgataaggaacacaaaggggtgggagtttgccggcgtgtatgccgatgaagcgatcagcggaaccaagaatgatagagaggagttcgtgaggctgatcaatgacgccaagaacggaaagatagatttgattatcgttaagagtatatccagatttgcaagaaacaccgttaccatgctcgagaccattcgggaactcaaagccattggcgtggatgtgtttttcgaagaacagaatctccattcaatctcctctgaaggcgaaatggtcctgacttttctcgcctcctttgcccaggaggaggctagatccgtgagcgagaacatgaaatggagagtccgcaagaacttcgagaagggcataagttggtgcactcgaaagactctcgggtatatctacaaagaccggaagctcgtggtcgagcccgaggaggctaaacttgtacgccgcatcttcgatatgtatatcggcggactcggactccaggctataactaataagcttaacgaggaaagggttaaacctcccgagtcagtcaagtggaaaaaggattctatacggtatatcctgaccaacattacatacaccggggacctgctgctgcagaagtatttcaatatcgactacatgtcaaagaaacacaaaccaaacaagggggagcttaatcaatatctggtagaagacgatcacgaaccaatcattcgaaaagaaacctttaacaaggtgcagcagctgatgtacgaacgggcagaaaaagttaattctagccgggcagctcagatcattcacccactggcctctctcatcaagtgcagcatctgcggcaagagttatcatcaccgaacaacaaagtacacgaaaaagtggatgtgtcaaacattcaatagggagggtaaaagtcattgtgcgagcaaggctgtgcctgcgtccgagatggacaggttggtgtacgaggtggtcggtgacgacattccgaaaattaaagagatcattgtataccctaacaatacgctcctgttgaatctgaatgatggttcttcaattactaaaacctggaacgacattagccggagcaatagctggactgatgagatgaaagaagaagcacggaagcgctctctgaaacagtgggagaacattaagagggaagggaaa

SEQ ID NO: 905 - DNA, 1605 bp, unidentified
  source 1..1605: mol_type = unassigned DNA; note = Bacteriophage uvig_150139 from the Index of /pub/databases/metagenomics/genome_sets/gut_phage_database (ebi.ac.uk)
atgcaaaacgctgtaatctatgctaggtacagctctcacggacagaatgagcagacgattgagggccagatccgggtgtgtagtgagtatgctcagcagcacaaactgcgcgtcgttaacatctacatcgataaacataagactggcaccgatgtgaaccgccctcagttccagaagatgatcgacgatgctgcaaccggcgcgtttacgcacgttatcgtgtacatgatcgacagatttgccaggaataggtactacagcactgtctatcggtggcagcttcagcaacagaacattagagtcgtgagcgccacagagaatatttctgagtccgaagaaggtgaattctaccagatgttcctcgagtggaacgcggagaaatactctaccaggctgtccaaaagagtaagagaagggctgactacatctgttgccaatggcactttcgcagggggttatttgatctatgggtataagaaagaaggaaagcgggttgtaattgacgaagcagaggcatcaattgtgcgatatttttttgaggaatatgctagcggcgtgccgaagaaagacattgcggaagctctgaacgcccgcggcgaacgataccgcggaaagccctggcgggggagagatttcgataagatgttgactaacgccaagtacaccggtactttcgagtttggcgggcgactgtgtgcaaatacatacccacagattatcgacaaggctctctttgacaaggtccagaggcgcgcccaacaaaacaagtacttcagtggagccaatagtgcacggattacatatctgttgcaaggaaaactgtactgtggacactgcggcgccaatatggtggccgatggcgggaccagcaaaaccggcgccgtctatcattactacgcgtgcaccgccaaaaagaagaggaggacctgcacaaaacggaacgaaaagaaggactttctggagtggtacgctacagaacagacggtggcatatctgtctgaccctagacgcgtagccctcattgccgacgatgtgatcgcttattatgaatcacgcacggatacctccgagatcaagagaataactgtcgagcgaacccggattcaaaaggagatcgacaacgcagttaatttgatggtgagcggggtgtcccccgaagtcgtcaagacacttgacaagaaaatcgtggagctgacagcccagctgaatgatctgactgagtatcaggcaaaacttgagctcgaaagggggctgcaagttaggagagaggatataatcgccttcgtggccgaattcataagaggggatcttcacgacaaagaatttcagaaacggatcatagacaatctcgtgaacgcgatgtatatctacgatgatagagtggtgctttactttaacataagcggaggtagggagaccgctttcatcggcaaagaggacacagatgaggcatcaggtgtccctttggacgacaacaataatgcccatgctggagctggcggatccgtgcagactctcaccccacccctccgacagaagaagattattcgcacaccacggcagttccgaggtagttactactcctttctgaccataatttcagcc

SEQ ID NO: 906 - DNA, 1686 bp, unidentified
  source 1..1686: mol_type = unassigned DNA; note = Bacteriophage uvig_224697 from the Index of /pub/databases/metagenomics/genome_sets/gut_phage_database (ebi.ac.uk)
atggcccgcaagagccggaaaaatgtgcaggccaccccagccgttgtggtcggacccgtgcagtacaaagttgctctgtacgctagaatctctgtcgagaacgagcagaaacgagaagcagacacaataggtaaccaaattgcactgctcaaggactttgtttcacaacaccaagacttggtggtttttgacctctactgtgatgatgacatatccggcgtatcatttgtccggcctgagttcgctcgcatgatgaacgatatcagggccgggaaagtgacatgcgtcattgtgaaagatctcagtaggcttgggcggaatatgattgagtctggggaatatatcgagcagatcttcccacgaatgggagtccggtttatctccgtaacagatcggttcgattctctgagagacgatgcagacatctccattcagttgaagaactttgccaacgaggcctacgccagagacatttctaagaaaataagggccgtcaagaggacccagcagctggccggcaagtggacaactggaacacccccttacggatatatgcttgaccccgacgacaagtatcacctgtttccagaccctcaaacaggcccaattgtgctcgcaatattccggatggtggccgaaaataataccttgcacttcatcgctaagactctgaacgagcagggtgtgccgagcccaggtagatatttgtacgacattggcctgcgcaagaccgagaagttcaaaaacgcaatttggtatctgcagaccatcaaaaagattctcgtggatcccgtttatcttgggtggattgtgagcggtaagtataggtcccagctgtgtgagcgagggactaaaaccacagtgaaaacgccggaagaggaatggataatcaataaggggatgcacgaacccattgtgagcaaagagctgttcgataaggtacaaggaatcctgtcagcccgacagtccgaaaagggcttggctaccatctacgattctaagagtaaacggagatcaatgttcaaaggcatcctgcgctgcggcgaatgcggccggtcaatgtatctgagaaataagagtaatcgcggttactattactactgcaccctgcacgaaaattacaacgccactatatgtcctaagaaggcggtcaaacaggaggacgtggagagcctcgcccttaggttgatacaaacccagatcagggctttcagcgatgcccaacgcctgattgcaaacctcaatgcgacccctagttctcaaactcgataccagatctacgagacgcagattgacgacgcgaaaagaaaaatcgaaaaattcaaccagctgaaggccgcactttacggggactttgccgacgggctcttgagtcatcaggattacactgatctcagcgaggattattcccgcagggcggatgatcttagaatcttcatcgccgagcttgagaaagagaaggagaagtattctgctggattcggcagcaagacgcagtgggcactgcttatcgaaaagtataaagaccaggaatccctggatgctgagatggcagcagcttttatcgaaaccctcactttgtttaacgacggccatgtggaggtagcttttaggcatcgcgacgaaattgagcaggttctgtacgtcgctgctacacgaggaaaggaagcggaaagatatgccgga

SEQ ID NO: 907 - DNA, 1686 bp, unidentified
  source 1..1686: mol_type = unassigned DNA; note = Bacteriophage uvig_395040 from the Index of /pub/databases/metagenomics/genome_sets/gut_phage_database (ebi.ac.uk)
atggccgaacagattattcaactggccaagaacgtgttgaagcgggttgtgtgtctgtatagagtgtctactgtcggccaggtggagaaagacgacattcccatgcagaagcagttttgccgggagttcgtgcaacgccagccaggctgggaaattgtgaaagagttttccgaaaaaggggtctcagggttcaaagtaagcgctaaaaagcgcgacgcagtccaagagattcagagaatggcattgcagggtgaattcgatatcttgttggtcttcatgtttgatagattggggcggaaggacgacgaaacacccttcgtggttgaatggttcgtgaaaaatggcatagaggtttggagcgcgatggagggccagcagaggtttgataaccacgtagacaaactgcttaactatatacggtactggcaggcgagtggcgaatctatcaagaccagcgttagggtgaagacaaggatttcacagctgacggaagagggttattatactggcgggattgtgccttatgggtatcggctggaaaatagagggcgaaccaataagcggaataaggaagtctgcgatttggccatcgacttggatgaggccgaggtagtgaaagtgatctttcagaaatatgtttacgagggatacggatcccaacgaatctccaggtatctggccgagcagggattcaggaaccgcaagggtgggaacatcccaacgacaagcatcaatcgaatcataaagaatcccctgtacatcggaattctgtgcaatggagagtcccgctccgagaacgtgctcacagaactgcaaattatcgacgttgacctgtttgagagagcccagaaaatgatcgagagtagggcaaaacccaggaccgcacacaaggagatacctttgaataccagagggcaaagcctgctggtggggaatgtgtactgtggccattgtggcaagaggctgacccttgcaactagtggtcgaaagtatcaaaaaaaggatggaacagtcgtaaacaagacttatgcgcgataccagtgcagttataacatccagcacccaggcggttgcgacggtccttcaggctacggcgctgcaaaactcgacgacctggtcgaccagataattagaattcagtttgaacgcatcaagacagccccacctcaagcactgattagggaacaacagtctagagaagtggagatcgctaaagctaagctcaacctgctcaatggacaataccagcaaaagcagcgcgattaccaggatctgcgggccgaaacccttcgcgtgatacgcggcgattcacggctgaacgtagactttctcaactccattgtagacgaaactatcacccagttgaaagagctgggccagcaggtcaaggaagccgaggctgagctcagagagcttgtctctggagcggagcaggtgaaagaagagtacgcccagctcatgaactgggccgagctctacgacaagtgtactttcgaggcaaaaaaaatgatcgctgcccagttcgtgaaggccgttcatgtcaagcgggattacgagatcgatgtcgagttcaatgttgctttcgatgaatttcagagcatctaccttgagccggaaaaagaagatgagaagaagcgaggagcttctacccttctcgccttgggagagaacgtggggcaggctgtg

SEQ ID NO: 908 - DNA, 1527 bp, unidentified
  source 1..1527: mol_type = unassigned DNA; note = Bacteriophage uvig_581138 from the Index of /pub/databases/metagenomics/genome_sets/gut_phage_database (ebi.ac.uk)
atggcgcgaaagaagaagtatcacttgcgggaggtccattctgtatgcatctacgcacggtactctgctggaagcagacagaccgaccagagcatcgagggccagttgcaggtttgtagagattacgccgccgcccagggatataccgtcaccaggatctatcgcgattctcatatttcagggaccactgatgatcgggcacagtttcgacaaatgttggccgacagcgacacaggagccttcgacgcagtcctggtgtggaaaaacgaccgctttggtcgcaatctcgaggagcaggttgtgaatgaaatgaggctgaagaataacggggtgtcactgatcagtgtaactgagccccttgctgatggccccctgggccctatgcagaaggcccttctgatgggcatagcggagttttactctgctgccaatagcgagaatgtgagaagagggatgcgccaggctgctctgaactgccaggttatttccggtgccatccctttcggatatagaaaaggcgccgataagcgcttcgcgcttgaccctccagccgcagacatggtgcgagagatctaccagaggtacgattgtggagagaaaatcttcagtattatggacgattgtaacagacgagggtttaggacagtacagaggagcgctcctttcacacacaatactatgtactccatactgtccaatgagcgctataccggggtgtatctttggaaggacgtgaggatcgagggaggcatgccgcagattgtggacagagagctcttcgaaagagtgcgggccaaaatgcagcagaacaagaaggcacctgctcgcagcaaggctgccgaacccttcctgctgactacaaggtgcttctgcgcactgtgcggcgcccctatgataggtgactccggcacgggtaaaaacgggactacacattactactactcatgcgcagcacggaaaaatgctcggtccaaacgagacgcctgcccccaaaaatctatccggaaggatgcacttgaagaactcgtcctcaggaggacactcagcgaccttctgcaaccacagacctgtgctcaaattgcccgacagcttgtggaatatcagcagaaggatcgaaccggagttcaattggaagcactggcacgccggagacgacaagtccagaaagccatcgagaacctgctggacttggcggaagcaggccagtgttccgctgggctcgccaaccggcttgctttgcgcgaaaaggaattggaagaaatagacaccgccgccgctcaattgagagctgagcgcagtgtgtttacggagaaagaaattctgagatacctgcagtcattcagtgagacccagctccacgatgccgcctttaggcagcggctcgctgagacatttctccaagccgtctatgtagcccccgacaccgtggttatttgttatccatacacagcgccccagacgccggtgactctggatactgtccggaggttgctggatgataacgctgcagcgccaatgcaaccaacc

SEQ ID NO: 909 - DNA, 1338 bp, unidentified
  source 1..1338: mol_type = unassigned DNA; note = Bacteriophage uvig_225196 from the Index of /pub/databases/metagenomics/genome_sets/gut_phage_database (ebi.ac.uk)
atgcaggtcatccgcggcgccgggtatattcgggtgtccacaaccgaacaggctactcggggcctgtcactcgaggcccaggaagccgagattaggcgctacgcgaaagagcgcgggatcgtcctcgttcagatctatgttgatcggggaatcactgccaggaaaaaactccataggagggaggcattcgcccagatgatgcgggacgtagacgctggacttatcgacagaataatagtgatgagactcgaccgatggtttcgcaacgtgtacgactaccacaaaatgatgaacgagcacttgattccacataacgtggactggtgtgcggtaaaagaagactatgacactactaccactaatggccggctgatgatcaatctgcggctggccatagcagagcaggagtgcgatacggatggcgacagaatccgcgatgtgcaagaaaatatgatccagaagggttgctggccttttggacaggctccattgggttaccgaatagtcaataagcacttggaaaaagatcccgagcaggaagaatgtattcgctatttttttgagcacatgctgctgaatggctctcttcgggccgcactgttcgcaactaacgaacgctatggaacgacctacgagtataagcgggcacagcacttgagcagggccagcgtgtactacggcgagtatggaaccaacaagagtttctgtccagcttacattacccgagaagaacatgagaggatcaggtatcttgcctccaagaatattagagttagaaagtcccctgataaagtcgcacatctgttttccgggcttctgatatgctctgactgcggcaggagattgtccggtcagacgatcagaagaccctcaggggtctacgtgacctatcggtgtgcgcatgcctacgacaacaacgggtgcccgaacacaaagagtttctcagagcgaattgtcgagaactacttgctccactatatggaatctgaactcgaggaattcattttcacagttgaggctgaatctaaaacaattagcctgcccattgataataccgagcagatcagggctaagcaagagaaggtgaaggagctgttcatcaacgacctgatcgatctcagcgagtacaagaagagaatcgatgaattggagagtaagatcattgtgactgctcctaaacctcgagccaatacagaacgccttaagaaactgctggagacaaatgcactcagcttctaccaaacctttacaagggatgagaagagagctttttggcgaggcattattaaagaactgcacatctatcgaggaaccgtgcaagggcccccaatattcttg

SEQ ID NO: 910 - DNA, 1629 bp, unidentified
  source 1..1629: mol_type = unassigned DNA; note = Bacteriophage uvig_230928 from the Index of /pub/databases/metagenomics/genome_sets/gut_phage_database (ebi.ac.uk)
atgcccgataatgccaattgctgctgggccttgtacattcgcctgtcccatgaagacggggataagagtgaatccctttccgtaagcaatcaaaaactcaagcttacggagtatattaagaagctcgacaacaactctattcagaaattctacatagacgacggattttctgggaccacatttgataggcccggtttcaagaagcttctgtacgacattgagcacgggcttattaaaggaatattggtcaaagatctcagccggctgggcagaaactccccaaaaacgtcttattttatccacgattattttcccgcacataaaattcgctttatcgccatagacgacaatatcgacaagaattttttcgatacagacactagtaacgacatgatcatcgacattaagaacctgtttaacggattctatcctcgggatattagctccaaggttcggagcaccttccgggccaagcagaaggcaggtcacttcatcggtgctttcgcttgttacggatacaagaagagcctcactgatcataataagctgattattgatccagcggctgccgatattgtgaagaagatattttcaatgtacctctctggcaaaggccaaaacacaatcgcgaaaatcctcaacagcgacaatattccctgcccatctgaatataagaaaattcagggcctgaattataagaatgcaaatcgactgactagcacaacatattggacctattcttctattagatctattctgaagaacgaaatctacacagggtgcatggtgcagaacaagagtttcaggatgatgtgtagtaaaagtgcctcaccattgccacccgagaaatggataatcgtccctgatactcacgaggccatcatcgataaaaagaccttcgatattgtccaaagcatgctgagcaataatgttcgacagatgaaaacaagctctcatacgcacatcctcgcaggcctcttgaaatgtggggactgcggcagggctatggttaaaatcaagaataaggacaagatttttttcgtgtgtggctcatataaccgctatggaaccgacaagtgctcctcccacaaaatcagtgagtcaaccatccttaacattatctccgatgactttaacaacatactcaagaacacagagaatttcaaacaactgcttaaaaatgagcccgcctacgctgtgaagacctcagacaactcagagaacaataattacatcctgaaccgactgagacagctcaaccacaaaaaaatgcagttcctcgagaatctgaacgaaaacctgataacccatgacgaattcgaaacctttgtgtcaagatgtaatgaacaaatctacaaattgcaggagtatctgaccccgcataatgcataccctaagcagtccgctccatgcaagattcactctgtcgatgccaatactcctcagccttgcaatagaaagactgacaagcagatctatcctaaaagtttgccggacataatctacgagatcataaaaaagaaccgcataaccatccccgataggatcgtggtgactcagatggtatcctgtatctacatctacaaaaacaataggctgaaaattatctacaactttgataacgacagc

SEQ ID NO: 911 - DNA, 1653 bp, unidentified
  source 1..1653: mol_type = unassigned DNA; note = Bacteriophage uvig_197914 from the Index of /pub/databases/metagenomics/genome_sets/gut_phage_database (ebi.ac.uk)
atgtataacacatacctcacagaaatcgactttaacgttggcatctacattcggctgagtcaggaagacaaagacaagaaatatgaatccgactccgagagcgtcattaatcagaaggagctgttgagaagctacgtgaagaacaataacttcaatctctgtggcgaatacgtggacgacggctattctgggacaaactttgacaggcccggcttccagaaaatgctggaggatattaaacaaaagaagatcaactgcgtagtggtgaaggatctgtctcgcttcggtcgggaccatgtgatgaccggatactatattgagacattcttccccgaaaataacatccgattcatatccattctggagtcatacgatagttttaaaaatcaggcatctaatgattcttccacgtttatcatagcctgcaacgactactactccaaacagaatagtataaagataaggaacgtcttgaacgacaagcggaaaaacgggaagtttatcggttctggacccagttacgggtacatgagggatcctcttgataagggacacctcatcccaaatccagaaaccgcacccatcgttaagaatatcttcaagtggagagctgaaggtattgggcctaccgagattgcgactagacttaataatatgaatgtccccactcctgccgggtataagaagacaaattatagcagcagattgattgatcgggatagctggaacatctctactgttaaaaaaattctctccaaccggatctacaccggcgatatggtgcagcatacgcaaactaaagttaactacaagtccaaaaagaagattacccttgacgaatcactttgggtgattgtagaggatacgcatgaaccactggttgataaggagacttttaagtatgtgaattccctcgggaaacgaaaaacaagaaattacagcctgaaaactgaaaggcccaaacgcattctggagggcaaaattttttgtaaggaatgcggcaatcggctctcagtgtattatcgaaagaaactgagctattggtcaatcaactgtaacagatacagccgcgatcctaagcgcggaaggtgcagctcccacttctatccatacgattacctcgaagagcaaatcctggaacagttcaacaatagtgtctctaagtttatcaaggagctcgacattggagagttgaataaggaggtccagaaaaatgtacacaaggagaccgaggacatagataaaaaaatcaacgatcttttgaaggagaaggagcagataatgaacaagctttctacactgtatagcgatcgatgtaacaatatcatttcaactgagctgtacaaagagctgagtgtggaatcagagaccaaactcaagaaaatcaacaacattatagaggaggaaaagatcaagaagaagaacatcaagaataaggccaacatcctcccggactataccaaaaaaatcaaggaactgctggacttgaagaaaccgaaaaaagagctgataaacaccctcatagacaaaattgtcatcgacgagaacaggaacattaacatcattttcaagtacgacgtgatggctgaaatcaattttatgtatgaaaatcgctacctgatccgcaatccttatggcaaaaatggaaaaaag

SEQ ID NO: 912 - DNA, 1311 bp, unidentified
  source 1..1311: mol_type = unassigned DNA; note = Bacteriophage uvig_148886 from the Index of /pub/databases/metagenomics/genome_sets/gut_phage_database (ebi.ac.uk)
atggcagagaacattacaaaaatcgctgcccggccctcactgattagcaaaaaacgggtgtgtgcttatgcaagggtctcttccggaaaagatgccatgctgcattcactttctgctcagatatcctactactccaagtacattcagtcccacaccgactggatctatagcggcgtgtacgcagacgaggctctgagcggcactaaggacgaaaggccaaacttccagagaatgctggccgacgcaaaggatggaaagatcgacatcatcatcgtgaaaagtgtgtcacgatttgcgaggaatactgtcacactcctggaggctacacgcgaactgaaagaatatggagtcgacgtatactttgaagaacaaaaaattcacaccctgtcctccgagggcgaactcatgctcagccttttggcgggattcgcccaggaggaagcacgctctgttagtgagaatatgaaatggcgcataaaaaaagatctttccgagggtatcatgtggggcggcaaaagtcaccttgggtatgagctgatagacaaaaaattggtgcttattcctgaggaggccaaaatcgtcaagagggtgtttcagttgttcatcgagggatgcgggatccagaaaattgccaattcattcaataaggaaggtatccaaccgaagtatagcgatcattggaacaagagtagcgtgcggcacatactgtctaacgttaattacaccggcgacctcctgttgcagaaaacttaccgggagtcctatctcacgaaaaagaagcgaatcaacaagggagagcaagaccagtttctggtcgagaatgatcacgaggccattatcgacaaggacacgttcaatctggcgcagcagcttctggctgaacgcggtgtgctccctaagagcaactacatcaaagggaacaagagcatctttacctcaagaattaagtgcgggctttgtggggcatcttatcgccacaagactacacggtacaagaagatttggatatgccatacctatgattctgaaggcaaggagaattgttcagccaagcagattcctgaagataatttgatcaaggccataaaccagtacctggggatcgacagtttctctgaggacgctttcaacaagaagatcgattacattactgtgtttcccggcaacgtactcagaattaagagagttgacgggaacgaggatgatattacatggaatgatccaaaaaggagcgagggctggacccccgagatgcgagaaaaggccagacaaagggcaaaagcccattataagaaggaaggtgctgatgaa

SEQ ID NO: 913 - DNA, 1479 bp, unidentified
  source 1..1479: mol_type = unassigned DNA; note = Bacteriophage uvig_106050 from the Index of /pub/databases/metagenomics/genome_sets/gut_phage_database (ebi.ac.uk)
atgagcgagaaggctgttatctatgctcgctacagctcttcaaaccaaagagaggaaagtataattgggcaaatccgggactgtagagcttacgccgagaaactcgggctggaagttattaaggaatataccgacgaagcccgcacagggacaaccgacaggaggcctggatttcagcagatgattaaagatgccgagagtaagaagttcactgccgtcattgtttggaaagtcgatcgattcgcccggaatagatatgactctgcaatctacaaaagcaagctcaagaagaacggagtgcgggtgtatagtgcaatggaggccatttcagaaggcccagagggaattatcatggagggccttatggagagcatggccgagtattacagtgctaacctgtcagaaaacgtaaaacggggcaacctcgactctgcacttgagcataagacactcggaaaaaggatctatgggtatagaacagccaccgacggaacatatgaacttgatcctgacgaggctgccgtggtgaaaaggatcttcgatgagcgagtcgaggggaaaactggtgccgatatagcccgggacttggtgcacgatggctacctgtttctcggcaagaagtttactaaacaggcgatctatagaatactgaagagcatcaagtacaccggcacgtacatctacaaagactatatctgcgaaggtggtatgcccatgatagtcgacaagagtacctacatgcgcgtacagaatatgaagaaatccctgaaaccaaaggctaaggaaacagtgatctacaacttgaccggtaaactgttctgtggacagtgtggcgggtatatgaccggcgaatacggcacttctaagaccaacagaaaatactattactacgcctgcagggattgcaaaaagcgcgtgtctaaggatgtagtggagaatattatctacgacgaacttgcaaaaagactttccgacgacaagctgattgagctgctggcagttaggtttgaagaacatcaaaagaagaaactgaacgataactccgtgttggataacctcaaaacccgcctcaaggagactgagcgaggcatatccaatttggtgagtgcgatcgaacagggaattattacttcttccacaaaggatcgacttgtggcattggaggcggaaaaggacgagctcatccagtcaatcaaagatgaggaggtcaattccaaaattgtcattacgaaggaggacttcgtctactggtcaaaacaggtgcgcagcaatgctgaagacaaagataagctgtttgaatgcttcctcaattctgcctatctgtacgacgatcacatcgttatcaattccaacctgctggggccctccgcgacgatccgggctgaacagctgaataactcagagtttgagtatgatgcaagctctccggcttacaagtatagcttcgagctcatgatactgagctccgagattaatctg

SEQ ID NO: 914 - DNA, 1623 bp, unidentified
  source 1..1623: mol_type = unassigned DNA; note = Bacteriophage uvig_203979 from the Index of /pub/databases/metagenomics/genome_sets/gut_phage_database (ebi.ac.uk)
atgcagacagctgtcatctatgcgagatattcctcagacaaacaaaccgaacagtcaatcgaggggcagctctacgattgttacaattacgcaaaacagcacgatatcaccgtcgtgagagaatacattgaccgggccatgacaggcaagaatgacgaccgaccagcattccagcagatgctgcacgaatctgcgatgcacaagtgggactctgtgatagtctggaagctcgatagatttgcccgaaacactatcgattccgccgtgaataggcagattctggcaaaaaatggtgtgaagctgctgtctgtgatggaatcttttggcgatgacgcatccggacagatgatgacccacatcattgaagctataaacgagtattatagcgctgacttgcaggagaaaacaatacgcgggatgcgccagtcagcaatgaaagcccagactactgggcatattccgctcggttataaggtggtggacaaaaagcttgtgatcgatgacgacaccagaatcattccagagaccgtgttccggatgtacgctgaaggcgagaggttgacagatatcgctgagcatctgaattcccagggttatcggaatcgccgcgggaggccttttaccaccaatagcttctacaatatgctggccaacgagaagtacataggaatctacaagtatgacgacatcgtaattgagggcggcattcctcagatgattcccaacgaagtgttcgaggcagtgcgggagaaactcatcattaaccggaaaagggctgccaaaaatacagccaaagccgattactatctgagcggcaagctgtattgcgggcattgtggtgaaccaatgagtgggctgagcgggaccggaaggaacggcgtaaagcattactattaccggtgtaacggagtacaaaagaaatcaggctgtcacaagaaactggagaataagtatctgattgaggacgaagtgtgtagagcagccagaagcgctttcgagcaaatggataaggccgagaccgcagaaactatctgccagatgtacttgcaaactgttaggaacgaatatgcacccgatgagcttgaaaaagagctgaccgagtgcacgaagcaggctgagaacgttgtgaatgccatagcccagacgggtggaaaccaattgttgtacgataaagttagagaactcgaggaacgaaaagagcagctgtcctctgctctcaggctgagccaagccatgactgacaatgtcccaagtgtcgaacagatcacagtctttatcgacgacattcttgcgactgacattaacacaaccgagggcaagaagtccatcgctgacataatgatatcaaaggtttacgtctacgatgataaacttacggttatcttcaaggacaaggatgggaagagtgtggacatccctctctctgccgtcagcgattcatctagcgccgattgcgcccctagtgcgctcggcagccaggccattttgaacactaaccaccgcaagggaattgaatccgatatctgcaaaacacccgctcgccccatggtaagtgttgtgctttgctcctttatcttcgtcttctacgtgtggaagcaaggatttcgaatgctcacctttatg

SEQ ID NO: 915 - DNA, 1665 bp, unidentified
  source 1..1665: mol_type = unassigned DNA; note = Bacteriophage uvig_75234 from the Index of /pub/databases/metagenomics/genome_sets/gut_phage_database (ebi.ac.uk)
atgtctgaaatcaaaagagcagtgatctatgcaagattttcctccgatatgcagcgcgaggaaagcattgacgcccaggtgagggcctgcacagagtattgtaggaagaagcattatattgtgtctaacatctacgtggacgaggcaaaaagtgctagggacatagtcaaaagagacgcctacaaccaaatgatggtcgatgcaatgtcacacaagtttgacgtcattatcttccacaagatagaccggaacgccaggaacgagttcaattattacacctttaaaaatacactcgatcagcttggcgtgcgatacgaatacgcggtccagaacatcgattcttctcccgaaggtcagatgatggaatccgtcttggttggcatggccgcatattactcaaggaatctcgctaaggaggtgcgaaaagggttgaatgaaaatgcctataaagctctctttaacggaggtcggcctcccttcggctacaagatagtcgatcagcagtacgttattgagcccagagaagctgagggggtgaagatgatcttcagtatgttcctggagggtaaaggctatgccgagattactcgggctcttaccgagaaaggttttgtgtcccgagaggggaagcctttctccaaaaattccatgcacgacatcctccgcaacgagaagtataaagggacttacattttcaacaagagcgtaacgatgaaaaacggcaaacggaacacccatcctgaagacagccctgacctgatccgcatcgagaacgcgatcccagccatcatcagccctgaacaattcgccatggttgcggaaatttgcaaaaacaatcgccaccgcaacggccggtatagtgccaaagagagctatttgctgtctgggaagatcttttgtggagagtgtggacaggcgatgaatggtcacagaatgctgggcaagatgcgaaaagacggatctaggaatatctacacttactacctttgcgggaacaagaaacgcaccgcagagcagggctgctccatgaagatgattaatagagatgttattgaagataaggtgatggaagcaatagccgagcatatttttagcgaagaatctatggagcgaatcggacggaacatgtcaaaggcttatgaagagctgattaagagtaccgggtatagactgacagagctgacagacgctagaaacgctgccgagcggaagcttaataatttgtactctctgattgaagagggagttgcagatgcttttgacattcaacggcttagtcaagtaaaaaaggagctgatcgccattaaaaaggaactcgaggcgatcggcaagaatagctcattgcccaaaatgtcaaaaagtgaaatagtagatactctgcaagctctgaggaatgacattttcatccagaaggatgagttggctaaacgacagttgatcaatctcttcgtgtacaaggtcagcgtgtataaggagaacatagttatagagctgacgaccgatacaatcagcgccggcgtagtggaaatgaggggcgtggagccactcagcgaaaatattgcaatccagctgtccccgtccgccgacgacatcttttactttgcctctcagatgccgatagatggacgcccatcatgttaccccaaggtgttcccaaagaagctg

SEQ ID NO: 916 - DNA, 1734 bp, unidentified
  source 1..1734: mol_type = unassigned DNA; note = Bacteriophage uvig_180737 from the Index of /pub/databases/metagenomics/genome_sets/gut_phage_database (ebi.ac.uk)
atggacgtagtgggctactgtcgctttagcagtgaggctcagagagatggctattctattgaagcacaggtgagggccataactgagtgggctgctcgagaagggcacaccataaagaagttctacatagacgaggcccgcagcggaaccaatgataaccgggaggactttcagaacatggtagccgatgccgcctcaggcacctttcgggccgtcgttgtccataaactggacaggttcgcacgggatagatacgatagcgcagtttacagacacaagcttaaaactcatggagtacgggttatctcagttctcgagccgcttgatgactcccccgagtccgtcatgatggaagccgtgttggaggggatggccgaatactatagccgcaacctgtcccgagaggtcaggaaaggaaaaaaggaggtggctcttaaagctcagcacaacggaggccccgtgccctacgggtaccgcgtggatgaacagatgcgatatgtgccaattccggaagaggccgccgtaattcgggaaatattcagccgcctggacgggggaagctcatatgctgacgtcacacgatgggctatctcacagggtctcaggacccggcggggctcttacttcaacgaggccttcatcgctcatatgaccactaacactatgctggtgggccgcttcagttatgggctgagatctaaggtcgggcaagagcccatcattatcgaggatgcaatcgaaccaattgtggatgcaaatgtattttggagggtgcacaatgcgacactggcgagaaaaaggggtcctcgacctcgcgttaaggaagacgattacatactcacgggctaccttttctgtgcccactgcggtagccacctgttcggctttaaaagtaagaaagaatataagtctcgcaatggcgccgacagactgtatgaggcaaggttctaccgatgcgctcgaaaggatcccatgaaacataaccggcgccacgagcctgacgtggtgttgcagaggtgtcatttgaggagcatcaggaaggacgtcctcgaaacctttgtgttcagtgccatcgaaaatgtgcttttttctcaagcaaccatggactgggttgtcgccgagctgtcagtcaggctgaaacaacggaagcagaacgcacaaaacaatgctgcagacgccaatgcctatcggaaagagctcgaaaaggttcggaaccagaaagctcgcttgttggatctgtatcttagtgaagcgctcgataaagcgacgttcgcattgaaaagcagagaacttgactcccgagaggggtttctggatggagagatcaagcgcctttccacacctgtgtccatttttgtggagcctgacaagattaaaacagcactcgaaggttttatcaagagtccgaatgccgacagttccgagtataagaagagacttctggccacctttgttgacagcatcgcggtgtctaatgagaagatcgtcatctatttcaagttcccaatcccaggagccggcgataaagccgaaagatcttttgatgacttcgtgagaaagacaacgtctgtgagcacactggaggtctgcgctaacatttcatacaagagaatgttctccatcctgtacgcaccactctctatgttccctctcactattctgcccttttcatgctttaaggaacccattaggtccccagcttcccgcgctagagtggacggtgagcaggagact

SEQ ID NO: 917 - DNA, 1323 bp, unidentified
  source 1..1323: mol_type = unassigned DNA; note = Bacteriophage uvig_354682 from the Index of /pub/databases/metagenomics/genome_sets/gut_phage_database (ebi.ac.uk)
atggagatgaagaatgcacgcctgtatgctcgcgtgagtaccgacgaacagagaaaaaaagagcaaagcgttccagaccagctggaagcgcttaaagaatattgcgaagaacataattataacataaaggggatctaccacgatgacggaataagcgccgcaaccattgataagcgaaaggatttctgcaggatgctcgatgatctgcagcagaacgaggtaatactctttacaaaactggatagattctcaagagacctcctggacggaaatcttctcctgaagaggtttgctcccttgaacgtcagcttcaaggccatcctggaaccagatattgatgttactacagctgacggcaagtttcgctttgacctgatggtgtccttggctgaacgcgaaaggaagatcgattccgagagaattctcttctcttttgagcggaaagtcgccagaggcgagtttctcggagggcggcttccgatcggctatatcaaagataacaagcgagccgtgattgaccccgagaaggcagcattcgtcaaggatatttttgaaaccatggagatagagcaaaataccttccgcgtcatgaaagccatgaaccataagtacgggctgaacaaggacaagaaatactactaccgcaagctcatcgaccagagatatacgggggtgtaccggggcaagacaaatgtattccctcagatcattagcccaaaccagtacgacaacgttcagtctatactgcaaggtaggtacattaaaaggggacctagccggagggattatatcttctctggcctgctcctgtgttcacagtgcggccggaaactggccgggtccgctacaagtggtaagtacaagatctacaaatgttctaatttgcagaaaggagaaaaaatgcactgttgcttcgcggagaagaagcttgagaagaagattttgcccaaaatcatgcctctcttgcaaaagtatttgctggatctggaggcctccgaagccaaagtgtcacagaatagagacatcatacagatctcaaaacagaagattaacaggctccaggacctttatatcgacggtaagattgataaggacacttttgatcgaaagtatgccgatcttaatgagattataagcgctgaagagcagaaatccaacatcgtgtccatccaggaggcaaaacaacgatacactcaactgctggacatggatattgagaatatctacagtaccctgaatgacaacgagaaacggaaattgtggcactcttttatcgaccggattgtgatcaaaagttatgacgaaattgacatcttcctgttg

SEQ ID NO: 918 - DNA, 1545 bp, unidentified
  source 1..1545: mol_type = unassigned DNA; note = Bacteriophage uvig_292057 from the Index of /pub/databases/metagenomics/genome_sets/gut_phage_database (ebi.ac.uk)
atgcaatacttgatctacctgcggaaatcccgcgccgaccaagaagccgagctgcggggtgaaggcgagaccctggcacgacatgagaaagcgctgctcgagctcgctcgacatcagcacctgcctatcgccgatatctaccgcgaggtggtgagcggcgagaccatcgcgagtagacccatgatgcagcagctcctttctgaagtcgaacagggcgtctgggacggggtgctcgtcatggaagtagaaaggctggccagaggagacaccatcgaccagggcattgttgcccaggcctttaaactgtctgataccaagattattactccaatcaagacttacgatccaaataacgagtttgacgaggaatacttcgagttcggactgttcatgtccaggcgcgaatataagacaatcaaacggcggctgaataacgggagacaagcttcagtaaaagaggggaaatacgtgggaaataggcctccttatggatatgagcgcattaaaatcgaaaacgataaggggttcactcttaagcccttggagaaggaagcccaagtgttgcgcatgatgttcagatggtatgcatacggggcccacggcattagcaccatagctgatcagcttaacgagatggctattccctcaaaaacaggcaagcagtgggtgtatccaactgtcagggacatcctgcagaaccccgtgtacgttgggaagattcgatggggttggcggggccagagaaagagggtcaagaatggaagtgtatccgtttcaaggccacggagcgatgattacctccttgcggacggaattcatcctcctatcattgaccagcagttgtttgaccaagtccaaaagaaattctctatgcacaaaccacttcctactagcgcaagagaaatgaagaaccccttggccggtctggttatatgtgctaagtgcggtgctaaaatgcagaggcggccgtaccagagggagaatatcaggacgggcttgatatgccccaacaataagtgccgaaacgtttccgccccgtttgatgacgtggaacagaagcttatagaagcactggctgaatacatcaaagaggagaagctgcgcatcagcaatggccatacccaaatcgatgactctgtgttgcagattctccagaatcaactggccgatttgagagaggagacagtggacctgaacaagcaaaatgacaacatccacgattttttggagaaggggatctatgacgtggatacatatctgcagagatcccagaaaatctcctctcgaataactgagatcgaggagaagcagaagacgcttcagcaggagataatagaagagaataagagaatcgagagtgcaacaagcattattcccatgaccgagcagctcctgctgcagtatgagaacatgtctgccctcgaaaaaaatagcatgctcaaagaagtccttcggtgtgtgaagtatgaacgcgaatgttcaattcgcgatggcggaacagcggacaactttaccctgtacctctatccaaaaattagtcacaaa

SEQ ID NO: 919 - DNA, 1533 bp, unidentified
  source 1..1533: mol_type = unassigned DNA; note = Bacteriophage uvig_181325 from the Index of /pub/databases/metagenomics/genome_sets/gut_phage_database (ebi.ac.uk)
atgccgaaaaaagagacagccgtctctcagggcctcgtggcagccatctatgctagatactcaagccatgcccagaacgacgcctctattgaacagcagatagatgagtgtcaggagtatgcacggcagcatggctataagatcgttggggtatacgctgatagggctatgagtggccggtcagatcgcaggcccgagttccagaaaatgatgcgcgcagctgagaagcgcgaatttcaaatcgtcctggcatacaagtccaataggataagccgaaatatgctccacgcactgtcttacgaagacaagctggcgcaacacggtgtgaacgttgtgtattgtaaagaggagttcggtaataatgcagctggccgcttcgccttgcgcaccatgatgaacgtgaaccaattctactccgagaacatggcagaggacatcatgcgcggattgatggacaacgctaaccagtgtaaagtcaatggctccttgccccttggttataagcggggcgcggacggtaggtatgaaatcgacgaacagaccgccccaatcgtgcaggagattttcaggagaatcgccaacggagagcttaaggctagcatcgctgatgacttgaataagagacagattcggactgggactgggggagcttggaataaggggagctttcattccctgctcgccaatgaaagatacactggcatctacatctatcgagacgtgaggattccagggggaatacctgcaattatagatcgggaactgtttgaagctgcccgggagcgggaagaaacaatgaaaacggtagtcaagagtagacgcagacgagatgatatggagtatctgctgaccgggaaacttttttgcggatactgcctcgagcctatggttggctcctcaggcactggaaagatggggaagatgtactactattaccgatgcaagaataatgccgagaaacatacatgtcaaaaaaaaccagtgcgcaaggacgcaattgagcaacttgttgtgagctccctgaaggcctgcattaccaagcctgaaaacatcgactggatgactgacctcgtgatgaaatacaggtctaaaattattgcggagtccgacattggctatctcgaggataaactcaaggagaataagaccgccataaaaaacgtcatgaaagcgatcgaaatgggcgttgtgaccgagaccactaaggccagacttgaagagctggaggctgaacagagagaagtcttgtcaagccttctggccgaaaaacgaagcatccccgatgtaaccagggatcacgtgcagttttttttcgaatcctttagaaacggtgacgtgaacagtattaagtaccagaagacactgataaagcacttcctgcgggccgtgtacctgtacgacgaccacatcaagatcacattcgactatgacgatagcgatacgggagtcgagatcccccttgaggattcttctgccgaatcatctgaggatacaagtgtcctgattgatagtttgggagtgtatgggagggta

SEQ ID NO: 920 - DNA, 1569 bp, unidentified
  source 1..1569: mol_type = unassigned DNA; note = Bacteriophage uvig_568903 from the Index of /pub/databases/metagenomics/genome_sets/gut_phage_database (ebi.ac.uk)
atgctcgcctaccacaaggttaacaatatcaatgctaaggtcggcatctatctgcgaatttctctcgaggagggggacaaacaagaatctaattctattgacaatcagcggaaactgatctacgagtatcttcacaaaaataacttcgtgaacatggtggagttcatcgatgatggcgctacaggtactaacttcaatcgcaaggggtttaaagatctgctgaacaatatcgaaaacggaaacatcaatacagtcataaccaaagatgtctcaaggatgggccgcaactacgtgaagacggggtattacatcgaggactacttcgtcaacaagggagtacggtacattagtatactcgacgacatcgacacttacaatgaggtgatagggaatgaactgttgcctttccgcgccatattgaatgatatgtactcaaaagacatctctctgaaacagaagagctcccttaaagaacggaaaaagcgaggacgctatattgcctgttatgccccttacggttacaagaaaaacgagcaaatcgttggtaaactggatatcgatgaggatgccgcggagatcgtgaaaaggatttttaaactgttcctggagggcaaaggaaccactagcattgcccgaatcttgacggctgaaaaggtgcccactccagcaatgcatctgaatatgaatgcagataaaagttcactgttttacacagtatggaaagggaatagcgtgcggaggattctgagaaacgagacctatttgggctacatgatccaaaacaaggagactaccatctctcacaagaatcccaccagagtctatctgaataaggaagactatatcgttattccaaaccatcatgttccgatcatttccaaagaagactttgataaggtgaatgaaatgctcgataataataagcggacaagcaacaacatgaaggaaaagacacttcttcatgacttgttgtattgcgacgaatgtaacaagagactcgctcgcagggattgtaagggcaaaatctattatttctgcgctaccagaacagcctttcacctttgcgacaattctaactacctttcctatattaacattgaagacgaagtcctgaagtacatcaaggagtttctgaaaaaatattccgacaggaacctgctgagacaggcgtacataagcgagtacagcaagaataagaccaaaatagatgactacaacgtgacgctgagcactctcgccaaagagctcctgaagatcaacaacaagctggatacactctataacgacaagctcaacaatgtaatttcagcagacatgtacaagaagtacagtgcaaccttgaaagaagaacagaagaatctccagaacaagattaacgagatcaagacctatattaataaggaggagaaaattctccagtcccttaataaggatgagaaaatgattgacgatctgatttcaaggttctgcgatttgaaaagtataaaccaggacgtgattgacgaattcatcgagaagatctccatagataagaacagagactttcacatcaaactgaagttcaacttt

SEQ ID NO: 921 - DNA, 1380 bp, unidentified
  source 1..1380: mol_type = unassigned DNA; note = Bacteriophage uvig_254684 from the Index of /pub/databases/metagenomics/genome_sets/gut_phage_database (ebi.ac.uk)
atgaacaagagtgatctttcctctgacgccagcctgcgggctgccatctacatcagagttagtactgaagagcagcaccttaatggactgagcctgccggcacagcaacaggccctggaggagtatgcccagaaaaacaattaccatataatcggcgtctatgcagacgaagggatctccgctcgaaaatcaatgtcccacaggaaagggttgctcaggctgctggacgatgtgaaaaaaaataaggtggatatgattttggtgaccaagctggaccgctggtttagaaacatcaaagattataacattacagaagaaattctccaagctcatcactgttattggaaaactattttcgagaactacgacagctccacggctaacgggcagatggtaatcaatatcatgcttagcgtcaaccaagcagagtgtgaccggacttcagagcggatcaaggcggtgtttgattacaaacggtcccaaggcatgtgtgtaaccggcatgtgcgccccctacggttatctgatagagaactcttacattaagaaggaccccgctgtccagcatatcgtggaggatgcaatcgaatactactttacatgcttcagtatccggcataccgtccactacataaccgacaagtacggcgacgaggcgccctcattctacaagatagataagatctttcacaaccctaagtacgcagggatcgacgttaacggaaatccctattgtgaaccatacatgacaatggagcagtataagatccttctgaaatctcgccaggctaaaagttggagctccagcggatatacctacatcttctcttctctcattacctgcccaatttgcggatgcaagttcagtggcagacagagaaagagaactcgacaggacggttcagtctactgcgacattcgctataattgtgttggtaagtttaagtatcaccctggggcttctttgcgcgagagcagcatagaagaatacttgctgaagcatattgatgcttctgtggagtcagccctcatcgagtatgacctggccgccgctgaaaagtcaaagccagtgaagactgcccaggcctacatggacgagcgagataggctgaatacattgtttcagaagggacggatttccgaagaatactatgaggccgagtatcagagactttccgatgcaattcttgccacagacgaaaaggcctctattgaaaggcgcaaaaaactgattaatctcagccaaaaattcaacggcgattggaaaagtatctatctccagctcgataacgcgcacaaacgagcattctggaaacagataatagagaatattaatgtggatcctaaaacgaggaggatctccggcattaagctgctcatc

SEQ ID NO: 922 - DNA, 1641 bp, unidentified
  source 1..1641: mol_type = unassigned DNA; note = Bacteriophage uvig_368674 from the Index of /pub/databases/metagenomics/genome_sets/gut_phage_database (ebi.ac.uk)
atggcaagaaaatcccgaaagaacattacggtggctcaaaccaagcccgaaaacatgtcaatctacatagagacggcgcagtatatccggctgagtgtcgaagacagccacaacaagggcaactccattgagaaccagaaaatgattcttgatgactttatcgcccagaacggaaatatgcgcttggctgggatatacattgataatggggccaccggcacatcattccataggcccgagttccaacacatgatagaggacatagagtccggcaaaattgattgtgtcatagtgaaggatcttagtaggcttggccggaatagcattgacactggcttctacattgatacatatttcccggagaaaaaagtccgcttcatcgctgtcaatgacaattttgacactgataccccatccaacggggacaagatgcttctgtacatcaaaaacatcatcaatgaggcatacgcgcttgacatcgggaaaaagatcaaaactcaggcccgacaggctatgcgagacggacaatacgtcagcgctagacccaagtatggatatttgaaagaccctaatgattgccacaagctcatcgtgaatccagagaccgctcccgtggtgaagcttatctttgaactgtttaacggaggtatgagcaccaacgagatttgcctgcagctgaacgctcggcagatcttgacacctggagcctatggctaccagaaggggtatatcacatcaaaaaagtccattggcaatgggctttggcagacaatgacagttaggcagattctgacacacgaaatctacaccgggaagctggtacagggacgatcagactccctggcaaaaaaacagaccgccgtggacaaagatgagtggatcgtggtgccaaacactcatgaagcaataatttctcaggacatgtttgataaggcacaagagagaatggagcaactgaaaaacaagcattctaagctcaccatcatcccttacaccgaaaacatctggaaaggtaagattttctgcggcgaatgcgggcgcgccctccaccggggcagagaaaaaagggtaaaaactggttatgcatatcatctccactgtctgacacgggttaggtataatcgcgacggctgtgataatggatctattctcgaaaaggatctcctcaatgtggtaattaccgccattaagagtcaggccagtgtgcttgccgatcgcaaaaatctgatcttttactcactgaacgacaagaaggagatcgaagcccagcaggccgaactgaagaacctgagggcatacattagcaaaaacagaaacttcctgaatagcctgtacgagaacttggtcaatggaataatcacccaggaagaatatcaagaaatgcgcaagtcctatggtgataagatcagcgacacgatgaaaaagatcacagaggtggagaacagaaggctgaagttggagaaaagctacaaccggtattgtgatctctctaatgctgtttctgacattgccgagaacaatactctcactaaggagttgatagataagcttataagtcggatcgatatctacaaaggcaagagagttgaaattacttactctttcgacaatgagtttgagtctgaagcgattgcgaatggt

SEQ ID NO: 923 - DNA, 1650 bp, unidentified
  source 1..1650: mol_type = unassigned DNA; note = Bacteriophage uvig_538311 from the Index of /pub/databases/metagenomics/genome_sets/gut_phage_database (ebi.ac.uk)
atggctaagcaaaccatctacaatgccggcatctatgtgcggctgtcacaggaagatatgagagccggagagagccttagcattgaacatcagaagttgatccttactaagtacgtgcgggaacagggctggaatcttgttgacacctatgtggatgatgggttttctgggacagattttaacaggccctcagtgcagcggcttttgagtgacgcccagacagggcggataaacctgatcatttgcaaggacctctcccggttcggcagaaactatattgaggtaggacagtacatcgactacatctttcctctccacaacattcgattcatcgccctgaatgacaacgtcgatacagccaatcgagatagcaatgccatggagatgatgccagtaatcaacctgttcaacgagtggcacgccagctccacctctaaaaaaatcaaggcagtcaatctcgcaaatgcaaaggcgggcaagtatacctgtgctaacgctgcatatggctacacaaaagccgacgatgagaaacacacccctattatcgacccagaggctgcagaggtggtgcgccgcatttttaagcttaggtcccaagggatgagtccccgggccattggtgatcagctgaatgcagagaacatcccgatacccagtgactacagatgccagaaaaaaggtattgtcaacactaagtacaccaggcacctgtggacgcaggtgcaaatacgacaaatactggataatcctatctacctcgggaagcttgcgatgatgcgggtgacgtcagtaagttacaagaatcataagaaagtaagaaaggaccccagtgagtgggtcgtcactgaagatacacacgaagccataattagccaggagctttgggacaaagtgcgcgaggcggaaaaggccgtctcacatggcaagcgagacgggaaaggcgtgactcagcctctgtctggaatgctgttctgtcatgattgcggttataagatgaaagccgctggtcgcaaaagaacattgaagtctggagaacttatcagggagtgctactacaactgttcctcctatgttttgcacggaaaggaactgtgctctacacattacatttctcaaaaacagatcgaggctgtcataatcgctgacatccgaagcatggcagaactcgttgttaaagacgagcagaccgccagggcggcatttctctccaagaaggagcagcagacgagcaggcagtccaaagctgatattaaaaagctgaacgattccaaacacagactggctgagctggaaaatctgatgcaaagcgtgtatgaggacaaagtcatgggcaagatccccgagcacatatgtgtgtcattcttggaaaagtatgaggcagaacagcaagaactgcgcgctgttattgctgatcttgaggagaggttgtctgccgaaaaacaggaccgcgaagacgtggaagagttcattagaaggcttaagaagtacgtggatgtgcagaccctgacccgcgaacttggactcgagctcatcgagtatgtgactgttggcgcctatactccaaatgagccaagagaaattaacatctactacaagtttctcgataaaccgctgaatgacaaaaagactctgtatagcgacgagaacgcc

SEQ ID NO: 924 - DNA, 1656 bp, unidentified
  source 1..1656: mol_type = unassigned DNA; note = Bacteriophage uvig_131471 from the Index of /pub/databases/metagenomics/genome_sets/gut_phage_database (ebi.ac.uk)
atggcaaggaagtcccgaaaagaaactgccgctgtcgccgtccaggaggctgatgcggcgtgtagggccgcgatctacgttagactcagcgttgaagacacacacacacattccgtctctatcgaaacccagcagatgataattgcccgatacctggagcaataccccgagattagcgtatatgacacgtacatagataacggagctacaggaacgaattttcaccgaccgggatttcagcagatgctttccgacatcgaggctgggcacgtgaattgtgtaattgtgaaagacctttccagactgggcaggaacaccatcgacacagggtactatattgagcagtatttcagaatccgaaacatacggttcatcgccgtcaacgaaaatttcgataccgcagctcctgaagatgcccacagcggcatcataattcctcttcgaaacatgattaacgaggcttacgccctggacatcggcaggaaaattagggctcagcagagacaggcgatgaaggatgggaagtttatcggcgctagaacaccctacggctacctgaaagcagaagacgattgtcatcagctcatcatcgaccctgttgcagccgtggtggtacaaaggatgtttcgctgggcaagtgaaggggcaggtttgaacacaatcgccgtgcggctcaacgaggcaggaatcctgacacccagccattataagaaaatgcagggtaagattactcatgaaaatctgttgggctctggaaagtggcagacaagaaccgtgggggtaatccttcgctctgaggtctacaccggggatctcgtccagggccagaccaaaacagtcgaccatcggcaagtgaaagccgacgcagaggagtggaccgtggtgcgcgacacccacgaagccatcatttcacgcgagcagtttgcagccgtccaagagattctgaatcagaccgctagccgcgccaaggcgagggaggttaagagttacacacaaaatatactgaagggcaaggtgttctgctcacactgcggtggctcccttcaccgacagcgcaatattcgaaagaagtctgatgatgtgtatctctatcattgcctgagcaggtcacggatttctaaagatgcttgcccaggagtgaccattcgggaagacgcactgcttgatatgttggccgacatgttgcaggatgctctggataccgccctggggcaatacactttgtccctcgctgaactgccacggcaagccgccgatcgcgccgagctccgcgagaagttcacttcaagaaaacaggaaattcaaaggctgaggggtatcgttcggagcctgtatgaaaacctggtgcagggcgtgctcactaaggatgagtatttcgattacaaagagaaatacgaaagtcatatagcggacctggccgtcgagatggagcagctggaggacggactgcgcacgatggacactcagatagagcaacacagagcccttgagcaggacgccgcacaaatcaagaccgaccgggcacttactggtgctctcattgagcgattgatcgatcggatcgaagtttctcacgacaaacagatcactgtgagatatagatttcagagtgagttcgaaacgtatgctgaagtgcttgaacagtgtcggaatatg

SEQ ID NO: 925 - DNA, 1335 bp, unidentified
  source 1..1335: mol_type = unassigned DNA; note = Bacteriophage uvig_435486 from the Index of /pub/databases/metagenomics/genome_sets/gut_phage_database (ebi.ac.uk)
atgcagaacgtgagaatctatgcccgggtaagcactgcggagcaaaaaaagaaggatatttctattccggtgcagattgacgcttgtcgacggtactgcacagatcacaattacaatattgtggggacttacatcgacaatggatactctgcctcctcaatcaaaaaacggaaggaattcaaaagaatgattgaagatgtccgcagagatgaatacatcttgttcacccgacttgatcggttttcacgaaatattctggacgctaataagatcgtggaggcactcgataaaaagaatgtgagtatagttagcatattcgaggacgacattaacaccagtacagccgacggcagattcatgttcaatttgagggtttctctttcacaacgcgagattgaaaaagactccgagaggattctcgatgtgatgcaggctaaggtcgcaaaaggcgaagttttgaccggtcgactgccagtggggtacaagattgagaacaagaagcctgtcatcgatgagaaccaggtagagatggtaaaagacaccttttccacatatatcgatactggcaattgggacgtggccgctcggatactgagcaagaagtacaacacctatatctccgataccaaggtgcgcgggataattaaaaacagaaggtatataggagaatttcgcgggatcaaagactatttccccagaataatcgatgacgagactttctttgaggctaataacatctccaaaaacaagtacgtcaaacactctaagaatgaggttacatatctgtttagcggattgctgcggtgcgagttctgtggtaggcggatggcgagttcacaccgaaagaatctttctaactctaattactatatctgttccaggagggagaacggcaagactgcccagcatttcgccaaaagtgaaagaaaaattgaactggcactgctgaatgaatttgaaaaactgcttaatgataggatcctcgaactggacaaagccgagcgcaagagaaacaccctgtccgaagacaacataagcaagatcaagaacttgaagacgaagatgaagaggatcaaaaacctgtacattgacggcttcatcagcgagaatgagttcaaaagcaagtattcaagaacggaaaaggaactccttgaactcgagatgaactgcagtacagatatcgagcaaaaacgcgagaggtaccagtacatcctcgacaacaagatcttgaccctgtataagactttttctcgcgagcagaaggcaatcttttggcggacaattattgaccatattgtggtccataaagatgacagcttggatatctttctccgc

SEQ ID NO: 926 - DNA, 1593 bp, unidentified
  source 1..1593: mol_type = unassigned DNA; note = Bacteriophage uvig_136059 from the Index of /pub/databases/metagenomics/genome_sets/gut_phage_database (ebi.ac.uk)
atgctctatgacatcaaaagtgttgatttggagaacattatcatctaccttagaaagagcagatccgacgatccctctatgagcgtcgaagaggtgctggcatcacacgagcggcagctgcaggagtattcaaagactatgttcggcgaaaaaatcccagaagagcacatcttccgcgaagtcgtgtctggcgaaaccatcgcagataggcctgtcatgaaggagataatgaaactcctggaaacaggcatggtgaaagctgtactggttatcgagccgcaaaggctgagccggggcgaccttgaagactgtggacgaatagtgaacacctttcggtacaccaatacacttattgttacccctccaaaaacatacaatctgagtgacgagtatgacagaaaattcttcgagatggagctgacccgcggtaacgattatctcgagtacaccaagaagatcttgaaccggggccgctacgcctctgtgaagcaggggaattttatcggatctatcgcgccctacggatataagaaagtgaaaaacgtcagctctcactcaaagagctacacactggaaattattcctgaggaggctgatgccgtgaagatgatgtatcacctttatgtggacgaggggttcggttttgctagaattgccaggcagcttgacgagttggggattaaacccagacatgcctcccattggtcctccagtgcactcaaagacatgatagaaaaccccgtttacataggcaagatccgctggaattggagaaagaccgaaaagatcatggtagatggccagatcgtcaaaactcggccaaagactaaggatccgtctcaatggatctacgtggatggaaaacatgaacctataattgacgaggagacgtataataaggcaattggaaagcgacgcatcaatgtgagcgtcaggaagtccaaagagatagttaacccttttgccggtttgcttttttgcggcaagtgtgggaaagccatgtcatataagcgaacttataataggaagaaggatggatccaaagcgtactgcctgtccatgctgtgtaatgatcaggcagtatgcaaaactaaaagtgtgaagtacgatgccctggaagatagggtgatccaagtcctgaaagactctattgccgatttcgagcttaagctggaaaatgacgatgggaatgcccacaaaatccagatggacctcattcaagatttgcagaacacaattacaaaccttaagcagaaggacgcgaggcagaaagacgcttacgaagacggcatctacacgaagcaggaatacgccgttcggaatgcaaaggtgcaagaggagattgctgaggctaagaaagctctcgctaacgcccagaatacgttgcccccaagcgtggactataacgaaaagataattaagtttactgactgtctgaacgccttccagagccccgacgtgtccccacgcgagaagaacaacctcctgaaagcgtgcgtctcaaaaattctttactataacgatggggtgagtaaagtcggtattgggcgacatgtggaaaataagttcaatatcgaggtaaccctgagactc

SEQ ID NO: 927 - DNA, 1521 bp, unidentified
  source 1..1521: mol_type = unassigned DNA; note = Bacteriophage uvig_279733 from the Index of /pub/databases/metagenomics/genome_sets/gut_phage_database (ebi.ac.uk)
atgaaaaagtatgtgattgccctgtatattaggctgagcttggaggactttaaaactgattctctgtcaatatcttcacaaaggatgatacttcaggaacacgcagccggactcgaggaatatggtaacgccgagcttatggagtttgtggataacggctacagcggagctaatttcgaacggccagccgttcaagagctgctggacctggttagagccaatcggatcgactgcatcatggtcaaggattttagtcgcttcgggagaaattccctggagacaggctacttcatcgagcgcgtgttccctatattccatacgaggtttatctcagtaagcgacgattttgacacaaaaaagcttaagggagacactgggggcatggaagtggccttcaagtacctgatcagcgaatattattcccgggatatgtcagttaagacaaagaccgccaagtatatgaaaatgaggcgcggtgagtaccagtccaaaatttgtccgtacggctactgtaaaggcgataataacaggatggtgcccgaccctgagacctcttgcgtcatacagatgatttttgaatacgctgcaagcggtatgaactctgcacagattgctagagaactccatagtcaggccatacctacccccggagagtataaggcgctgaagggacagaagtatcacgatgtgtcccgaacaaatggggtatggtccaattctaccattttgcgcctgttggccgacgaacgctacattggaacttacgtcattggcaaaaaaaccgtgacggagatcgggggcaatcggatgcggacaaaagatgaatccgagtggattaagatcccgaatcatcacacccctctggtgagtaaggaactgtttgagaaagcgaatgcaagcattaagagattcaagatcccaaaacgaaaacagcactcatacccactccgaggtaaggtgttctgcggcagctgtaaacacgcaatgcacagatccaatgagaccatctataggtgccgcttttcctacatggactctagtcagccatgctacgggatgactatccgggagagcgagttggagtctatagtatacgagttcctctgtaagcaatttgaagtgtcactcggcattgacgggcccaacgagcttaaacccgtggataaggtagctgtcagaagggctgagttcgataaccagatcttcgaattgcaggaagaaaagcgcaagctgtatgaggcgttggtgatcaaacagatcgacgttaacttgtacaaagaacagaaggcactcatcgaacaaagacttctcgaagtccaaaacacaaaagctgtggtcatgacccgcctggaggctgaacagcaggagaaagaacggcagcatcagcaaaaagatgtgctgcagagtttggttgagaacaaggggctgactagcgagctggtggacatgctcatcgagaagatctttatctatcccaacaagcgagttgagattgtcttgaagattaagaacgaccttgcc

SEQ ID NO: 928 - DNA, 1566 bp, unidentified
  source 1..1566: mol_type = unassigned DNA; note = Bacteriophage uvig_58086 from the Index of /pub/databases/metagenomics/genome_sets/gut_phage_database (ebi.ac.uk)
atggggaaggtccgaattattccacagacgatcaatccactgacacaggttaagatcggcaccatcaaaaaaaagaaagtagccgcgtacgctcgggttagtactgaccaggaggaacaggagtcatctttcgacgctcaagtgcagcacttcactgagtacatcaagagtagagatgactgggagttcattaaggtgtacagtgacgagggcatatcagggactagcttgaaaaaacgcgatgggtttaaccaaatggttgccgacgcacttgacggcaagatcgatctgattttgatgaagtcaatcagcaggtttgcgagaaacacattggacctgttgaccaccgtcagaaagctcaccgctaaaggcgtggaggtgttctttgaagagcagaacatatccactctggatggcggaggagaactttttctgaccataatgtcttccattgcacaagaagagagtaggacaatcagtgaaaacgtcaagtggggtaagaaagagtcatacaagaaaggaaatgtgtctttcgcatatagccgctttctgggttataagaaggaagatggaaaaatagtcattgataaagagcaagccgttgtcgtgaagcaaatctaccagtggtacctcagggatggacttacactgactgctatcgcccagcggctgaacgagaattccgtgaaaactcctgggggcaagaacaattggaccgttaataacatcacctccatcctgaccaatgagaaatacaagggacacgctatcttgcagaagacatactgcgacaacttccttacccatcagatgaagaagaacacaggccagatgcccaagtatcacgtggaagattcccatccggccatcattgatgaagatacctggaatgaggtgcagctggaaattcagcggcggcgcgagatcggtagctgctatagctcaacagatgtgtttagtggaaaacttatctgcgccgactgtggctctttctacggcgccaaactctggcattctacatccaagtatgcaagaacggtgtatcagtgcaaccataagtttaaacacaagtgtcgcacaccccatctcgaggtgaagttcatcaaagaaaaattcatagaagcctataatatggtgatgatagacaaggagtccctgattgaagacacgaaggaggggatcaccgtgttgtgtgacttcgtagggcttgacggtaggctcgtcgaactgcagaatgagatggacattgtaagcgaactgtcaaacaagatgattatagagaatatgcacaagctccagagccaagaagagtataccaagaagtacgaggagctgctcaaaagatacgaaaaagcaaacgtggagtacggtcgaattcaggacgaaaaactgcacaaaatcggcctgtctcagaaactcgagagctttatcaaggatcttgagaatcgccctgtgtccattgactattttgatgagacgacttttcgattcatggtcgaatctgtcaaagttagccgggataaaaagcttacttttaagttcaggaacgggaaagaaattgaggta

SEQ ID NO: 929 - DNA, 1338 bp, unidentified
  source 1..1338: mol_type = unassigned DNA; note = Bacteriophage uvig_564581 from the Index of /pub/databases/metagenomics/genome_sets/gut_phage_database (ebi.ac.uk)
atgagatgcgctctctacatcagggtcagcagcgatgaacagaaaaggaacggcttttctctgcccgaacagcgccacgctcttatgcagtatgcgaaggaaaaaggctataccatagtggatctgtatgccgatgagggggttagctcaagcaagaatccccagaggcgacatgagttccagcggatgctgtctgacgtaaagaagggcaaaatagatataatcgtcttcctgaagctggaccgctggtataggaacgtgggcgactactatttgacacaagcaatactggaccagtacggcgtgaagtgggaatgtgtggtggagaaatatgacacaacgacaagaactggaaaactcggcttgaatatcaagctgactgtggccgaagacgaggccgctaacgcctccgagagagtgaagtttgtacaggccggaaaagttcgaaatcgcgagcccatcactggcaatcaaccgtttggatataagattgaaacaattgatggagttaaacggattgtcaaggatcccgaaacccaagcagaatgtgaggacatgtttgagacgtttttcgcaactggctcagggggtgctaccagcaagtacattaacgccaagtatggaagatccctggcagagaatgctattccacggcggctgaagaacccattctacaccggggagtaccgcggtgtcccagattattgtcctgcttacatcacaaaagagcagcacgctaggattctggccatcttcgccaaaaggaccagaagtactaagcgaaagaaagtatatcttttcgccgggcttattaagtgccctgtgtgtcgacggactatggtgagctgcacaatgaacaagaaaaccttgggttatcgatgtcggcaccattacatgaataagtgcactttcgtgcatacaatcacggaagagcgcatcgaaagtttcctgcttgaaaatatcgggtcaatgctggagcagtacctgatttcttacaaagagcagaacaaggcgaaaaaaaagccagatcccagaaaactcgaggacaggctctcccgactgaacaacatctacatgatgggtaatatctccgatagtgaatacaccaagaaggcgaacgagatcaccgcacaaattgccgcaatcaagtgcgcaaactctaatgatttgcctattcctgaagagtccattaaacttctgagcgacaaacggtttgccaccctctacgccgacttgccgagagaatcacgcaaagctctctggatgtctttgatcgacagtatagaggttgaggggttgtaccctaagcaggtcttctttatcggacaggagtccctc

SEQ ID NO: 930 - DNA, 1590 bp, unidentified
  source 1..1590: mol_type = unassigned DNA; note = Bacteriophage ivig_3762 from the Index of /pub/databases/metagenomics/genome_sets/gut_phage_database (ebi.ac.uk)
atgaagaagcagctgaatctctatggacactactgtgcatatcttcgcaagagccgggctgatcgcgataacatgtatgcaacagacgaagacgtcttggcaaggcatgagagtatcctcgccgatcttagcaagcgccttgggattgttattgaaaaaacatatagggaagtggtgtccggtgacacaatcgctgccagacccgaggtacagcaactgctcgagcaggtggaggacggtctgtgggacggcgttttggtggtggaggttgagagacttgcgagaggagattctattgaccaggggaccattagcagaagctttgctctgtctcacacacttataataacccccaacaagatctacgatcccgacgacgagtttgactccgaatacttcgaattcgggttgttcatgtctcgcagagaatataagactatcaacagacgacttaatcggggtcgagatcagtctgccgaggaggggaaatacattgggaacaagcccccgtacggatatgagagagtcaaacttcagggcgagaaaggcttcacgctgagccctgatccaaacaaggctgacatagtgcgaatgatctttgatatgtatgtgaaaggcgaagactctgggtcaaccggtgtgtctaaaatcgttaggaagctcaacgccatgcacatcccagcagccatgggaggggattggaccaccagcactgtgcaggatatgctgtcaaatcccgtctacatcggcaagattaggcacaagtggcggcctgccgtcaaaagtgtgaaggacggcgtgctgtccgttagtcggccaagggataaagaacgcgtcacaatctacgagggtcgacaccctggaatcatttcaccagacatctacgcagctgcgcaggaaaagaggaagaaaaaccccggcaagactgtaccttcccgatacattatccaaaatcccctcagtggactcgtggtatgcggcaagtgtggacgaaaaatgatccgcagaccttataagcctcctcaaaaagataccctgctgtgctatcatactaattgcagccagattggcagcccgctttatctcgtagaacaggaaattttgaacgccctgcgggccattgtggacgataccattaatccctcaatatccctcccggagacttcagacaacactttgaaaaccaaactgaagattctgaacgaaaaggagaaggaattggatgatcttcagcttcagaaagaccgcatctacaatttcctggagcaaggaatctactctatcgacgaatttcgggaaaggtccacccggaacacggatgagatggagaaaatacagacgactgtcgaggtcctcaaaacagaaatcaagaaactcaattcctaccaaaagaagaagaaagagttcataccacggtgcgagcatctgcttgagcattacgaagagctgacagtggagcagaaaaatgactgtctgaaagagctgctggacaaagttgagtatgataagaacgaaaggaacaagcatggcgagggggacaaaccaaattttaagctgcacttgtacccaaagttctttagtgacaattac

SEQ ID NO: 931 - DNA, 1452 bp, unidentified
  source 1..1452: mol_type = unassigned DNA; note = Bacteriophage uvig_580293 from the Index of /pub/databases/metagenomics/genome_sets/gut_phage_database (ebi.ac.uk)
atgaaaagctcatccgtggctctgtatctgcggaaatcccgagaagaggagaccgaaactagagaagctactttggcccggcatgagcggatgctgacagactattgtaggaacaacggattgaaaatagtgaagacattcaaggaagtcgtttctggcgagagtttggactctaggcctcaggcacgcgccatgctggcagaggtagcggacggtcattttgacggagtggccgtgatcgagcttgaacgactgtctaggggcaaccaaatcgatcaggtcgagatccttgagacgtttaagaaaagtaatacgaaaatctataccctgaacaaggtctacgatctcgcaggcgacaacgagttcgacgaagagttcttcgaatttggccttttcatgagccggagagagtataagattattaaaagacggctgattcgagggaagaaacaggcccagaaggaaggctattacatcgggtcctccttgccatatggtttcgggaaggttaggggagataagggctacattctgacaccgaacgacgagacccctatagtacagctgatttttcagaaattcgtgtatgacgacttttccttggccgatcttcgccactacctggacaataatggaattaaaccacacagagcaactgcctggtccagcgctgttttgaagaagatactcaagaacaagtgctacatcggatatatcaattacaattcacgctctacacggactcaagaatgctataaaggcaaacatgatgccgtgatcgacgatgagactttcgagcgcgcccaagctaagcttgctcagtcatctcacaaactcaaaaaagggaccgagcttaagaatcccctggcaagcctggtgaagtgctcagagtgcggtagtacattgcagaggtgtaacgagtacatgcgatgtctgacccccaactgccctacggtcctcagttattttgatgacgtggagaagcgcctcatagatgaaatcactaccgagctgaagggcttcaagtactacattgctaattacggggaagaaatcgaacggcagagaattacaagggataaggaactggcgatcctccagaaggaaattgataaacgcaacggaatgctcaataaggcctgtgagatgctcgagatcggcgtgtacagtaatgaaagatacatagagagagttaacatcctggagagcgagatcaaggcaatcaccgggcaaatgacagccctgtctgctatcagcaccgacgagagcgagaaggcaaaaaaagccatacccattcttgaaaaatgccttagcgcgtattggagcctttccgctcaggataaaaacgacatgctcaagtgtattattgaccgggtcgaatactctaagctccagcgatccaataggtggcacaaggtggattcactggaactgaaaatctttcttaaactg

SEQ ID NO: 932 - DNA, 1536 bp, unidentified
  source 1..1536: mol_type = unassigned DNA; note = Bacteriophage uvig_584862 from the Index of /pub/databases/metagenomics/genome_sets/gut_phage_database (ebi.ac.uk)
atgaacgtggtcttgtatctcagatactctagcgataagcagtccgaacaaagcattgagggccaggatagggtatgttctgcttactgccaggccaatgatatgaaaatcgtgggaaagtatatagatcgggcactgtcagccagcagacatactgagaagcgagacgaattcctgcgaatgattagggattccgaaaaacgaacctttgacgccgttgtggtctataaactggaccgcttttctagggacagatatgatagcgccatctacaagaacagactgaaacggaacggggtgcgagttatatccgccaccgagaacatttctgacagcccggaaggtatcatcctggagtccgtactggaaggtatggctgagttttacagcaaagaattgtctcagaaagtttccaggggaatgaatgagactgccctgaagtgcaatagctgtgggggccacatcccactggggtacaagatcgagtcaaaaaaatttgtcattgacccgagcaccgcaccaatcgtgaaagaggcattcgagcggtacgctgcaggtgagacagtcgctgagatatgtgatgctttcaacaacaagggctttagaaccgccaagggctcagccttcaacaagaatagtttcgccaacatgttcgctaacgaacggtacattggcgtctatcgatacaaggatatcagaattgagaacgggattccagttatcattgacaaaaaactgtttgaagaggtgcagcgccggttgaaaaagaatgcctgcgccccttcccgcggtaaggctaaagtggaatatctcctggcacagaaactgttctgcgggcactgtggaggcctgatgactggcgagtgcggaacgtccaaaaatggggataagtacaattattacacatgtagcaagcgaaagcgcttccattcatgcgacaagaagaatgtttccaaggagcaaatcgaggagtttgtagcaacgaagactcttgaactctttacccctcagaagattgacgagctggccgatatcgcggtcaagcaagcagaagccgaggcgcaagagaacacagtggtgcccgtgatcgagaatgaaatcaaagagctcgagaagagtattaacaacctccttaagctcgccgaacgcgctcctgacagtgaagcccttgtgaataggcttaaagaactggaagaccagaaaaaggcggcagaaagacggctggcggatgagaatagtaaagtcctggtgctcgagaaaccccacatcgtgtggtggctcaacgagttcgctaaaggcgatatacacgacgaacatttcaagcggcagatatttgatatgctcgtcaacagtgtgaccatttgggacgaaccagacggctggaagattacgatcgtttacaacctcttgtctgacgtgccccgcactttcaggtgttctgacctcaccgctacaggatcaccccttcagtataatcctaatacaatattgtttctcggacacgtgatggtatataccacaaagtacaggactaat

SEQ ID NO: 933 - DNA, 1476 bp, unidentified
  source 1..1476: mol_type = unassigned DNA; note = Bacteriophage uvig_195589 from the Index of /pub/databases/metagenomics/genome_sets/gut_phage_database (ebi.ac.uk)
atgtcttatctgtggggacttgtcgtggcaatctacctgaggaagtctcgcagtgatatcgaagatgaaaagaaagccttggccagaggcgaggtgtatgatacactgcagaggcacagaaaagagttgctgactttcgcacggaaaaacaagcttaagattgtggacatatttgaggaagttgtatctggggacaccatcgaggcccgccctgaggtgcagtctctccttgagaacgcaaaaaacggaaagtatgatggcgttctggtcgtggcttacgacaggctgggtcgcggcgataagatggaccaaggcttgattgaaaaaactttcaaagagtcagacactctgatcataacacctaaaacaaccatcgatctcaatgacgagcagggagagatgcaggccgacttcgagggcttcctgtcaagaatggaatatcgcaagatcaagggtcggctgcgggatggcaaaatccgcgccatcaacgaggggagaaacatctccgctgccgctccgattgggtattatgtggacaatgaacaaaagcttgccatagatcccaaagaagtgcacattccaagaatgatctttgagctggctatccagggttttggctgcgtccagatagcaaaccagttgtacgaagctgggattcgacatcgaaccggaaatcccatcggggagcaaacagtgcgacatattatcggtaatccaaagtacataggaacacagttttactccaggtactcaaaaaagccgactttcgccccaaattcccacaccccaatcgtgtccgaggaagtcttcaacgaggccaaccgaatgattaagattcggaagcccagtcacaatcctgcgagctttcccatgaggaatcccctgagtaccatattgcggtgtagtaagtgcgattctgccatggtacttaggcggtacatagtgaagggcaaagaatacaactattactattgcaggaagaattactgtgagactgtttccgcggggatggatgaggttattgacgacttggtcaaaaagttgaataacacgctgagcaacgtggcagttgaatatgaggaagatgagaacagcctcctgcctaccctggagaatcaactgagccaggcgcagaagaagctcaaaaccttcgagacaaaacgcgacaatattcatgacctgctcgaagatggaacttacactaaagacaccttcatcgatcgactcaataaggtggaaatggaggagcaacaggtattggacaccatcgctagcctcaacgagaagattgctctcgaaagagaaaaagacagcaatttgaacagaacactgcctgccatcagcaacgctctcgaagtctttgaacagtgtgacgcacgacagaagaatattctgctcaaatcattcattgataagatcatgtacacgcggacgtccaagaaggaggattttaaacttgacatttcttatcaccag

SEQ ID NO: 934 - DNA, 1530 bp, unidentified
  source 1..1530: mol_type = unassigned DNA; note = Bacteriophage uvig_27141 from the Index of /pub/databases/metagenomics/genome_sets/gut_phage_database (ebi.ac.uk)
atgattgagaattatctcgacaagataaaacaaaggcttaatgttgtagtcttgcatgctgtcgtgtacacacggtattcttctgacatgcagaggggtgaatctattgatgcccaaataagactcatccgcaaatggtctgacgagcacagcatcgtgatcgacaaaatctacgctgatgaggcccagagcgccaagagtgacgagaggaaacagtttcagcagatgatcgccgattcaaaaaagcagaaagactggcaacttgtcttggtacacaaacttgatagattcgctcgaaatcggatggattcagccgcctacagagttgaacttcggaagaataagaaatatcttatttccaccaccgaacagtttgacgacacacccgaatcttgcatgctcgagggaattatcgaatcaatggctgaattttactctaagaacttggcacgcgaggtgatgaagggtttgaccgaaaatgcacttaagggaaagacgtgtggcgggactcctcccctggggtatgacctggacgagcgcaaatactacaagatcaacgaattcgaagcgcaggctgtgaaactcatatttcagctgttcctcgaaggtaaaacttacggagagattatctccaagcttaacactagcgggtatcggaccaagtgtaatcgactgttcagccgcaacagcctgtacgagatcctgcggaacgaaaagtataaggggatcctggtgtacaataagacacagtcaagagatgagatcacgggtaagcgatccggccataggtataagagcgacgaagaggtgatccgggtagatggggttattcctcagattgtgtccccagaggattgggacgacgttcaactgattctgaatagtcgcaaaaaagccttcagaaataacgcaaaagagacttatttgctcagtggcaagatcaggtgcggcaagtgcggaggcagttatgatggccgacgcagttttaactcctgcgggaccaagtacatctattatgcctgtaatggcaagaggaacccgaactacaagtgtaacaataactccattcagagggattggattgagtcatacatgatcaatattatagataactacatccaccatctcagcaaggcacaaaaacagaacatctaccaactctgcttcgactccgttcagtcttcaaagaaagctgatatttctatcctgaaccaacggcttaattccctgaacaaggagctcagcagaattgtggacgtcatcactattacaaatagcccaacactgatagagaaactgaccgacctggaacagcagaaggcagaaatccagctgagaattaaggcgcttagtcaggaaaaaggaaaaattttgagcaaacagaagatcaatctgttgttgaccaagataaagaaaatgcttaaggagaaatccgtgcctcagctgaaagagctgatggatctcatcgtcaacgagatcattgtgaacgaggaggatgtgatagtctacctgaatatacccattacaaaa

SEQ ID NO: 935 - DNA, 1641 bp, unidentified
  source 1..1641: mol_type = unassigned DNA; note = Bacteriophage uvig_173343 from the Index of /pub/databases/metagenomics/genome_sets/gut_phage_database (ebi.ac.uk)
atggaaaagaagatgtggaagattgagcagaaagtgacagagatttcaaagcgccggcgcgtggcggcctacgctagggtttccgtggaatcagagcgcatgcagcacagcctgtccgcacagatcagttactactcctccttgatccagaagaatcctgcctgggaatacgctggggtctacgcagattacggcattacggggaccaaaatcatcaaaagaaaagagtttcagaggatgctcgccgacgcagaggcccggaaaatcgatatcatactgactaaaagtatccagcgatttgcccgaaacaccgtggatttgcttaagactgttcgccatctcaaggaaatcggggtggaagtgtggttcgagaaagagaatatcaggagcctctctggtgatggagagctgatgctcacaattttggcctcttttgcgcaggaggaatctagaagcatatccgacaacataaagtggagatttcagaagaagtacgaaaaaggtataccccacgccaagtttttcatctatggctatcggtggaaagatggggagcttgtgattcagaaggaggaagccgctattgtgcggcgggtgttcaagggctatctggccggtaaaacaagacgggacattcaaagggaacttgccaacatcggtgcccacaccatgtacggaaacctcttccaagactccacaatcaaacaaatgctgcagaatccagtctataagggcaatctggtaatacagaaaactttcgtcattgaccccatcacgaagcatcaggtgatcaatcacggagagaaagataagtatgtcgtagaaaatcaccacgaggctatcatcgacactgctacgtttaaccaggtacagaaggaaatggcttggcggaaagaggctggaagacagagaggtggctatgcccggaacttcctgaacatcagctgcttcaccgggattatcaagtgcgggatctgcggcaagagttacattcataacattcgcaaatataaaggcaaaccaagtgagtactggtcatgcctgagcaataaggggaaggctgagaagcgatgtggcgcgtacggagcaattccccaaccagcccttgaacgcgcctgtatgtctgctctggagatggcaaccttcgacaagaccaagttcttgcagaaggtggagaagattgtagttcctgcatatcatagcctgctcttctatctgaaagacggcaaagtgataaagcagagctggaaatctactgccctgaaggatatgtggaccgagaagaggaaagaacaagttaggcaaaggatggtgcagtacagaaagagtggactctctagccgatattcagcattttctgagagaatattttgtccgacatgtgacgtcaagtttgtgaggtgtttggaaaccaggaaaaatagacgggttgcttattggcgctcccgaaacaagcacaagtgcgtccatacatcaggcattcaggaagactggttgaaaaaaacagcagcggcactcctgggagagtcaacctttgatgaacagaaattccgagagcaggttgagtggattgaagtccaaaaaaacaggactctgctttttagattctactcccgcgaaaataaggaggtgcaactccct

SEQ ID NO: 936 - DNA, 1482 bp, unidentified
  source 1..1482: mol_type = unassigned DNA; note = Bacteriophage uvig_9846 from the Index of /pub/databases/metagenomics/genome_sets/gut_phage_database (ebi.ac.uk)
atgaagaaaaagggagttctgtatactcgcgtctcctcagatccgcaggaggagcaggggttctcaatccctgcgcaggaaaagtttgggagggagttcgctaccaaagaaaatattgaaatcgtggaagtcttctctgagtcccacacggcgaagcaagccggtcggccggaattcaataacatgctggccttcctgaaaaagcataaagatgtgcagcacgtgattgtagagcaaacaaatagattgctccgcaacgaatacgactcagccattatcattaacctggccaccactaccgatttgacttttcatattctgaaagatcatctcacactcaacaagaattctagccctatggacttttttatgttcactatgaacacggctattagcgcaatctaccctaggaatctgagccgcgatgtcaaaaaagggatggacgaaaaggcggaagaaggctattatccaggacgcgcccctgttggatacctgaacttcagggagagcaaaaaaaagagtattcttgtgattgacaacaccaaagctgatttcatcagagaggtgtttaggctgtatgacacaggattgtattcctttcaaactctggccgacaaactggcaaaagatggtttctacccctacaagcggccatgctccaagaataacgtggaagacattttgaagaacccaatctattatggtgagttcatctacaaaggccgacagtacaaaggggtacatgagccaataataagcaaagaactctttaagagtgtccagagaagaattgaaagcgccggatctcccgcaaagaccctccacgactttctctataagggccttatcaagtgtagttttaccggccagatcctgtctggcgataagaaaacaggagctaataactcaggggaatacatctactataggtgcacacacaagtgtccctgtggcaaacagtgcaaggccctcaagtctgagtatgtggatgagttcgttgagaacataattaagcagatcgagctcacacccgagcagatcaacaccgtcattgagaagataaaggagaagtataaactgaagaatgactacgagaacacaacgatcgaaaatatacaaaaagaggtgctcaccctgaaaacccggttgaataatctgtacattgacaaacttgacgggaaaataactgaagagttttactccgagaagtatcgaaattggcacgcacaggtggaggagaaggagatctatcttaagaacatcctcgacggcgataagttttttatccaaaaagccaatgacttgctggaacttagtaagaacgcttacaagtggtacttccagcagaacaaggaaaacaagcggagataccttaagctgatttgctctaacttcttctacgatggcgagaatttgactatcgcaatcaaaaacaccttcaaacccatgttggaatccgctaattttagcaatggtggccga

SEQ ID NO: 937 - DNA, 1536 bp, unidentified
  source 1..1536: mol_type = unassigned DNA; note = Bacteriophage uvig_278778 from the Index of /pub/databases/metagenomics/genome_sets/gut_phage_database (ebi.ac.uk)
atgaagcggatcactaaaattgacgcagccgctaaagagactaaaaagctcagagtggccgcttatgcgagagttagcaccgatagcgctgaccaattgatttctctcgaggcccagaaagagcactacgagcaggtcataaaaaattgcccgaattgggagtttgccggtctttactatgacgaaggggtgtccggcactaaaatggctaaacgagatgggctgctgcgaatgctggcagattgtgagcgcggcctcatcgactatatcctcgtcaaaagcatttcaaggttcagcagaaatacagttgagagcgtcgagactgtgagacgcctgagtgccatgggaatctacattttcttcgagaaggagaatatagatactggtaaaatggagggggagctcatgttgtcaattatgagttcactggctgaggacgagtcccggtctcttagtgagaataataagtggtccattcagaagcgctttcagaacggcacctacgtgatcggaacacctgcgtatgggtacaagaacgccgatggcaaaatggtaatcgacgaagaaaaagccgaggtcgtgcggcgaattttcgactccgtgctcgaagggaagagtggcggaactatcgctaaagaattgaacgctaagggaataccaaccgcccggggagtgcagtggagatcttccgtaattacagccatgatcagaaatgaaacctacaccggcgtcgccgttttccagaagacatacaaggatgaccagttcaactctcacgttaaccacggtgagagggggatgtaccgcattgagggacatcacgaccctatcgtctctgaagaggtgtttctggcggccaacaccgcagtcgataacaacgcgaaggagaaaggggtggttaggaattccgggaagtattccgtcaggtatgcccttagcggcaaaatcttctgcggtgaatgtggaggtaagtgtaagagaaaaaagatctatggcgacatttggtacggctgcgaaacccatgcccgagaaagtaagaagtgcaggcaactgccagtgagagctgatatggtcgaagcagcatttgtaaacatgatgaataagctgatctatggccgagatgccgtgctgctgcccatgtctgggaggcttctgggcggaggagataaagaaataattgaccgcttggcggagataaacacagagctggacgccgtggccgaacgcaggcaagctgctgacaaattttttgcaaagggtctgctcgatgccgctgtgtaccgcgaggaactcgacgagttggcacggaaggaaaaggaactccacacggtgcgcgcaggcatcgaaggagaccccaatttggattcagacaggcagagggccctgaacgagcttcttcggtacacggcaaaagctgagctgttgacagcattctcagatgaagtgtttaccaagcatgtggatcgcgtgattatctttagccggaaggaggtaggcttcgcaatgaagtgtgggcccgttttccgggaaagaatc

SEQ ID NO: 938 - DNA, 1545 bp, unidentified
  source 1..1545: mol_type = unassigned DNA; note = Bacteriophage uvig_178349 from the Index of /pub/databases/metagenomics/genome_sets/gut_phage_database (ebi.ac.uk)
atgaacattgagtatagtggcctcgtggcggatgcctactgtagatacagcagcaaaatgcaggatgacggcaacagcattgaatatcagatcgccgagatcgaggagttctgcattaagaacggaatcaaaataaggaaatggcacatcgataaggccgtgagcggcaagaaggttgcaggcagagatcaattctacaaccttatcgaggatgtgaaagccaaaaagataaacgccctgatcgtgtggaagactaacagagcctttcggaattcctatgaatcccacaagtatagaaaagtgctcaggaaatatggagtcaagctgatttccgctactcagatcattgatgaggatacctccaccggccgacttacaacaaacatcctttccgatattgaccagtaccaaagcgaggtaatcgcagaccacgtgaaaagtgctatgcgggaaatggtgaggagggggttttacacaggacagacaataccctacggctataaggtcgaagacaccaatgacaacggcaaaccgcgaaagaagtacattattaatgaggaggaggccgtttatgtaaagcgcatcttcgaggagttcgcaaatgggctgacaatagcacatatctctcgatggatgaaagccgaaggactcaaaacacggcgggggaatgtctttgactacgacgcgttgagaaaaatgctgaaaaatgatttttacatcggcacccgcaggtatacggtcaaagagctcgacactatagaaattgagaatgccgttccacccattatagatgaacggaccttcgacgcagtccagcacgtgtttttgtctcgaaaaaaagataccaaacctcgctccgggaagaggacttatggactgactgggaagatcgtatgtgcttactgtaacgagaagttctatggtaaggcctatgctaacagcccatactaccattgcaaaaataaggtgaaaaagaagacttgcgactgcaagagtatcagaaaggacaagcttgagaagaaagtcctccaagagattaaagagaatatcctgaacgctcagagtattgaattcatagcggagaaggtacttaaagaaattggttctatgcctacccagaaagtggaccggaaagaacttcttaagaggaaggaaacactgctgcgcgaaatcaaggaactggtgcaattgaaacttgacgggctgatcaacgccgaagctctgcgggacatgcagatggaaaagaatggtgaaatcgccgatatcgatctcgagctggctctgctcgaggacagagaggagaagaatatcgacaaggaattcatcgtcaactacctgaatgacttgatttcatactcaaactctgataatgacgagattctcaaagtgctgttcgataagaccgtggacaaaattgttatctctaactcaggagttgaacttcacttggcagtgttttttacgaagtacacgcataagaccgatctggctttccccaagtttgcattgtcacgcgatataagccgctatgacatcaataagctg

SEQ ID NO: 939 - DNA, 1617 bp, unidentified
  source 1..1617: mol_type = unassigned DNA; note = Bacteriophage uvig_286852 from the Index of /pub/databases/metagenomics/genome_sets/gut_phage_database (ebi.ac.uk)
atggaaaatgtgaaacgggtttactgcctctatagggtctctacggtgggccaggtagagaaagacgatatccctatgcagaaacagttctgccgcgagtttgttaactgtcacagcggatggcatattgaaaatgagttttacgagaaggggatcagcgggtacaaggttagcgctaaggatcgggacgcggtgcaggaaattcagcgagacgcagtccaggggaaatttgatgtactgttggtgtacatgttcgatcgccttgggcggcgggatgacgaaacaccatttgtcgtggaatggttcgtgaggaacggcattgaagtgtggtcagctgtcgaggggcaacagcggttcgataatcatgtggacaagctgcttaattacatccgctactggcaagcgagcggcgaatcaatcaagacgtccgtaagggtaaagactcgcatggagcagcttactcaagacggactgttcactggaggttctattccatatggctaccgacttgaaaaaaggggcaggatcaataagaggaacagagaggtgtgtgacttgaccgtggacgacgatgctgccaagattgtccagctgatattctacaagtacgtgcatgaaggatatggggctcagaggctttgccggtatctgacagagctgggcattcgaaaagccgatggacgcaacttccccaacactacgatcaatcgaattatcaagaaccccatctatgttggtcagctgcacaacggcgacgctacctccgagcggattcctgagctccaaataatcgatcaggacacttttgatgctgcccaacagctcatggccgcaagagcaacacaccatgctgacacacccctcaacatgaagggacagagtttgttggtaggcaacatattctgcggccattgtggaaaccgactgaccctcgccacatctgggcggaaagctattcaaaaagatggtaccgttagaagggagatcaggtgcagataccagtgtcactacaacctgagacaccctggtgaatgcgatggacagtcagggtatggcgttacaaaactggacggcatcgtggagaagataattcgacaccagtttgcccagataaagatggcaagtcaagacgatgtcatcgcccagcagcacgagaaagctgtggagttggccagggcccggtgcaatatggccgagatgcagctctctgaaaagcgcagagagcttgaagactatcagaaggagattatcaaggtcatcagaggtgagagcagacttaatgtggaccttctgaatgaactcatcgacaaaacccagaccgatgttgaggcccttccgcaaactgcagaggctgcaagacaggagctggaatcaagaacagcggatatggaaaccgaacagcaggagtatgacaagctgaagacctgggccgatctgtatgataactgcaactttgcagccaagaaaatgatagtctcccagttcattaaaagtatccacgtgtatcgcgactacactctggaagtggagttcaatgtctcctttgagcaatttcaacagctccaagccgcatgttccggcggggcgaatgaacgcaccaatgtgtgtattaaagcc

SEQ ID NO: 940 - DNA, 1611 bp, unidentified
  source 1..1611: mol_type = unassigned DNA; note = Bacteriophage uvig_452261 from the Index of /pub/databases/metagenomics/genome_sets/gut_phage_database (ebi.ac.uk)
atgctgaggcaaaccacacggaatcttattaccgcgctctatccccggctgtcccacgaagacgagttgcagggggaatcaaattccatcagcaatcagaaaaggattctggaaacctacgccaagcagaatggattcagcaacctgcagtggtacaccgatgacgggtattctggggcaaattttcagaggcccggtttccaagccatgctggcagacatcgaagcaggcaaggtggggacagtcatcgtcaaagatatgagccgcttggggaggaactacctgcaggtcggcatgtacactgagatgatatttcctcagaagggagtgcgattcattgctattaacgatggcgtggactctgcgatgggggataacgatttcactccgttgcgcaatctgttcaacgaatggatggtacgcgatacgtcaaagaagatcaaagcggtgaaaaaggccaaaggactgagcggcaagcctgttacatccaagccagtgtacggctacttgatggacgacgacgaaaactttatcatagacgaggaggctgctccagtggttaagcagatctatcagctttgtctggcaggaaacggacccactaaaatcgcccggatgctgaccgaacagcagattcctactccgggtacactggagtaccaacggacgggcagtaccagaaggtatcatcccggctatgaatgcaagtgggcaacaaacacagttgtacatcttctcgagaaccgagagtataccggttgcctcgtcaattttaagacggagaaaccttcttataagatgaaacacagcatagataatcccatcgagaagcaggcgatttttgaaaaccatcacgagccaattatagaccttcagacttgggagagggttcaagaactgcggaaacagcgcaaaagacctaatcgatatgatgatgtcggcctttttagtggtttgctgttttgtgccgactgcggccacgtgatgtaccagcagcgctaccagactgacaagagaaagcaggactgttacatctgcggtagttacaagaaacgcaccgccgactgcacagcccactttatccgcaccgacctgctgacagctggcgtcctcgataatctccgaaaggttaccgcatacgcccaaaaacacgaagctagattcgtgaaactcctcattcagcagaacgagatgggatccaaacgaaaattggctgctgcagccaagcagcttgagcaagtgcaatcacgaatcgctgaacttagtagatacatcaagcggctgtacgaggacaatgtgaatgggaagatcagcgatgagagattcatggaaatgtcagccgattatgaagccgaacaacgggagttgaaagatcgagccgcagctctgcaaggcgagctggataaggcccaggaggccaccgtcaacgctgagaagttcatgtctgtggttaggaaatatctctccatcgaggagctgactcatactttgctccgggaaatggtggaaaagattgtagtgtatgaatgtgagtatgacgagaacgaggtaaggagacagagaattgatatctactactctttcgtgggaaaaatagaccttccagaggag

SEQ ID NO: 941 - DNA, 1470 bp, unidentified
  source 1..1470: mol_type = unassigned DNA; note = Bacteriophage uvig_70560 from the Index of /pub/databases/metagenomics/genome_sets/gut_phage_database (ebi.ac.uk)
atgaataagagggttgcgggttacgcaaggtatagcaccgacaatcagaccgaaaactctatcgagttccagatgagatgcatagaggaatactgccaaaagaataaccttaacttggtgctgcgctatcatgatgatgctatctcaggcacaaccatggagcgaccagcttttaaacaactgtgtcgggacgcatctcagcacctgttcgatgcagtggtcatctatgatatcacaagaggttcccgcgatgtctccgactggttcgcctttaggaaggctatggatttgcttggggtggagatcattagcactcaagataaactcggcgatataatgaacccaaatgactttctggtagagctgctgggcattggaatcggccagcaccacgtcttgcaaacacggcagaagaccattgaaggcaccacacagaaagctcttgaagggaaattcctcggtggcattcccccttacggttacgacatagttgaccaggagtacgtcataaacgagacggaggcaaaaaatgtgcaaatgatatttgagatgtacgcagacgggtacagctatgctgacatcatcgaaaagctgcacggagccctgggcaagagaggaaagccattcggtaagacgagtctttactctatcctccgaaacgatcggtacactggactgtacacttggaacagacgaaatgtgaaaaaattgggcaagtgggccggaggcactcccaattcaaatatcgtgcagctcgagaacaagatcccgagaatcatttctcgggaactcttcgacgccgtgcagatgaggctgagcaagaataaccatcggacttcttctgatcctgtagcgccaaaaagtgcgaaacgcacctatctgttgtccggatatattgtgtgcgagaagtgtgggtgcaactacgtcgggcacactacccatagccacgggtataagaacgcctactattattgtggcacaaagtatagaaccagaaattgcgacgctcctaacttgcccgcagaaagaatcgaaaagtgggtgattgagcagatcaatgtatttctgcttaacttctcagacgccgcagccgaccgaattttggaggagatgaaaaagaggatgaacaattgtgactccgaaaaaaacaggctcagggagattgagctgaagttgaagaatgccacagacgcgattctgagcgggattacataccctgaacttatggaggagattaagagtcttcgccaggaacgcgccgagctggaagccaccattgcccgcgcttcaagcgaaaaagtgcccgtcacgaaaaaggacatcatgaatgcttttagtgagcggctggataatgaaaacgtggattacaggcagctgatgcgcaaatatgtgatctcaatcaaagttaatgaacggcagataaagctctccctcggcgttgttcatttcgcctcctccggaaactggatc

SEQ ID NO: 942 - DNA, 1551 bp, unidentified
  source 1..1551: mol_type = unassigned DNA; note = Bacteriophage ivig_2547 from the Index of /pub/databases/metagenomics/genome_sets/gut_phage_database (ebi.ac.uk)
atggctagcgttacaaaactcactaagccccaatcaaaagtgcaggccactcttcaggtggccgcctattgtagagtgtctacaaactccgatgagcaggaggactccctcgcaaaccagcaggaccattttaaaagttacattcaacagcagcctaactggctcctccataagatctattatgataacggcattagcggcacaaaggctcaaaataggcctgggctccaggccctgctgaaagactgtcaaaatggccaggtagatctggtgttgactaagagtatctcacggttcagtcgcaataccacagactgcctgcgaataattaggcaactcaaacagcttgacataccggtcatcttcgaaaaggaaaatatcaacaccgattctatggactccgagcttatcttgagcgtgctggggtccctggctcaggacgagagccagtccattgctcataatgtgagactcggttaccagcaaagagcctcaaacggtgtcttccactactctctgccgccatatggctaccagaaagacgcaaatcgggatctcattatcgacccaatcgaacgcaaggtggtcctgcggatctttaattggactattgagggcaaaagtcccgggcagattgcccagactcttaatgagcaggcaatatctaccaaacggaacggtaagtggcacgacagcacaatacgcggaatccttcagaatacggtatacctcgggactacagaattccagaagaccttcactgacgacgaatatcaccggcacccaaatcagggcgagcagggcaagatcatcatcgaggaacatcatcccgcaataattgaccaggctacgtttacacaggtccagaagatcatcatgctgaaacgcaagttttatccacaagccaaggcgaaaccccaacgacacaccttttctcgaaagatctactgtggaaactgccagaagctgttcaagaggcaatcacgctccggaaaggtgtgttggggatgccagacccacattaagagtgccaaggattgccccgtgaaaagcattagagaagatgctcttcatctggcgttctgcaccatggttaacaagctgatcttctctcaaaaatttctcttggaacctctggttgaacagctgcaggccgaccagaaccaggagcaggccgcgaagcttagccaagtggagaccgagcttaaagaagccaaagataaacaagataacttgcagcagctcaggaagcaagagttgatcgaaaaggatttctttaccaaacaggatgcagagttggagcaggagattgcaaacctgcagtccgagattgagagactgaagcagttgctgggagatcagaactctaagctgcctctgacccacgaactgttgaaactctgtcaaaggtcaaattacctcaccgcttttaacgctgagctgtttgaacaaattatcgaaagcataacggttgatcaggaccacaatctcacattccatctgaagtgcggtctgaatttgactgaggggtccaaacaccacgtcaaagca

SEQ ID NO: 943 - DNA, 1500 bp, unidentified
  source 1..1500: mol_type = unassigned DNA; note = Bacteriophage uvig_443823 from the Index of /pub/databases/metagenomics/genome_sets/gut_phage_database (ebi.ac.uk)
atgcctaaaggcattcgggcagctatctacgctcgattcagctcccataaccagcgcagtgaatccatcgacatccaggtggagaagagtcgggaatactgcgccgagaatggactcgacgtggttcgggtctacagtgactatgcgcagacaggaagagatgtacagcgggtggaattccagcgcatgatggccgatgccaagctcgggcttttcgactatgttgttatctacaaagtgacacggattatgcgaaacagggacgagatggccctggcccgaatccgactgcgcaaggcaggggtggaaattctctatgctggagagtctctgggcgagggctctacccgggtgctgaatttggggatgctcgaggtgctcgctgagtgggagtccgccattgattccgagaggattcgcgatggcatcaacaagaacgcgcagaggggtatggcgaatggccggactcattacggctgggacatagttaatggatactatgaggtcaacgagagagaagccgccgttatgcacaggatgaagaacatgctgttcgcaggttcaacggtcgctgagatcaaaagagccgtcgtgggagaaaggggtaaacgcggtaaaccattgactcacggagtcatcaccaagcttctgcgccgggaacagaattgtggggtgtatgactacgccggagtgagaatagaagatgggatgcctgctctgtggtcccgggaagatcaagatatgatcaacagcatccttggctcaaatgggagaaagcacaacaagactagagatactaacgactacccattgtctggtaagatgtggtgccctgagtgcggtcaatattatgtgggcacctgcgggactagcaagacggggcgagtctaccactactacaagtgtaagaagtgtaaaaggaccttcagacgagacgccgtcgaggaggccgttctggacaccgtgttggagacaattaaaaaacccgatgtaagacagcgaatagtggatgtaatggctctgtataatgagatgaacgaggagaaggaggaacctgaatcaaaaagaatcgaacgggaaattaggaggatcgacacaagctttgagcgcatttggcaggccatagaggacggcattgcgcccccgggcgggaaagaaagagtggcaatgctgagagaacagaaggcggccctggaggcagacttgaggcaggctcaggccaacgagggcgcaaaccttagcggagaagcaatcgcagcatggctcgatcatatagcccaagagcccgatgcagctgaaatcattgagacctttgtacgccttattgaagtggatggagacgaattgaagctgtactttgcctttgactattggggcgatgactttcaaccaaaacaaaaaaaggctaatccggagaaggggagtcccaataatcccatggtcgagacaaaaggcgtggaacctagcgcttctgctatgaggcgccagaggtcaccaaat

SEQ ID NO: 944 - DNA, 1695 bp, unidentified
  source 1..1695: mol_type = unassigned DNA; note = Bacteriophage uvig_268778 from the Index of /pub/databases/metagenomics/genome_sets/gut_phage_database (ebi.ac.uk)
atgtctcagattagccagattaagaaaatctatcatgcggccatctatgtccgcctttccaaggaagacggggccgtggcctcacatgagaaaactgaaagcaattcaatcgccaaccaaaagtctctgataagagacttcctcaagaataagaacgatatagaagtggtgcaggagtatgttgacgatggcttctcagggtccaactttgagaggcccgccttccagatgatgctcgaggacattaaaaaaggaaagattgactgcgtggtgacgaaggatttgtctcgcttcgggcgagagtacatcgactccggcatgtacatcgagagactgttccctgccatgggagtgaggtttatcgccatcaatgacggcatcgattctggagaggcgaaaagtcaaagcgacgagattataatcccattcaaaaaccttatcaatgacgcatactgccgggatataagcattaagatacgaagccatctggaaattaagcgcaagcagggcgacgtcatcacagcatttgtcccttacgggtacaagaagaacgacaaagataagcacaagcttgagatagatgtctacgccgctaacgtagtgaaagatatctttagaatgaagctgcacggcaaaagtcaggatgcaattgcctgtgagttgaactcctccggtattttgcctccagcagaatataaagcttcaaccggaagcaattatcagacctgtttcaagacgaaggaaaagtccgagtggacatcagtgatggtgcggcggatcctcacaaacgaggtatacatcggtaaccttgtccagggcaagcaaactacaccgaatcacaaagtgaaaaaaaccattatcaaggagaagtgcgagtggattcggatcgaaaaaaaccacgagcccgtgattacagatcgagactttgaggttgtgcagagactcctggctatggacactaggaccagtcctgacagagaggaagtttacccattgagcggcgttgtgacttgcggaggatgcggcatccccatggtgcgcaaaacttctaaggtgggtggtaagacttacgcttattacctttgtgctacccacaaagatagcaagcagtgctctagtcatcgcatctcaaccgacaaactcgaagaggtggtcctggagctgctgcagacgcacatcgacaatatgatcgacttgaagaggattttgtcctttatcgggaatgtcccctttcaacagctggatatgaaaaaactcgaggagaggcgagaaaagaagcaggcagaagtagataggtgtgctgacctgagaggcatgttgtatgaggatatgaaagatggaattatttccaaggaggattataaagagctgcataccgcctatgaacagcggaagaagtctgctgagattgcgattcatcaaatcgaactggaaatggaagacgtcctgaaccggaagagcaaagggttcgtgtggctggactactttacagaacacaaaaacatagaaaaacttacaagagaagtcgtagttagtctgataagggagataaaggtgttcgataaaacccacattgaagtcgtgtttgacttcgatgactgttacaaggaatgtctcaatgttatcgcctcccaggggcactctgttgatgtagacagtaccggcaaactcaatatccgccttaaggaggcagtt

SEQ ID NO: 945 - DNA, 1947 bp, unidentified
  source 1..1947: mol_type = unassigned DNA; note = Bacteriophage uvig_579415 from the Index of /pub/databases/metagenomics/genome_sets/gut_phage_database (ebi.ac.uk)
atgatatcacagagagcggccgcttattgccgactttccaaagaagatggcgacgacgagataagccaaagtattgagaatcagaaacagctcttggaggagtttgccaaaaagaacaatattattatcgataagttctacatcgacgacggctattctggggccaaaatgagccggccagctttcaaccaattgaaggatgatctgaacagcgacaaagtggatctggtgcttgctaaagatctgtccaggatcggcagaaactcacccaaggtgcagctgttcctcgaaaatattatagagcaggaaaagcgcgtcattgcccccgggaataattatgacagcctgaatgagcaggcacaggagatggtggggatccaaacgtgggtcgacgagaagtacgtgagagatgtcagtcggaaggttaggggcgccatcgacaccatgcagcgcaatggaaagtatatctcctgcgtaccatacggctactacatcgatccgtttaaaaagggagtctactacgtggacgagacctgcgccatgtatgtgaaagaaatgtttgacatgtatctgaatggctttggcgtgagggcaatcgctaaggaattcacaatccgcaatatccctactggttccatgattacgaaacagcggttggaaagactgggtaaaccatataagggcactgccagcaaccgctggtatcctaatgtaataatggatatgctgaaaaatgatttctacatcggaacattgaccctcggtaagaccaaacggcgatccattcatggcaaaaagatcaagcaaccggaggagaagcagtatgtgtttgaaaatgcgcacgagcctatagtagacaaagaaacattccaattggtccagaatacaatcgccaatcgcggtgtgacaaacttcaggggaaggcgcatccaaactcgacccaacatatttgtgggagtgctttactgtgctaagtgtggaaataggttgacctcagctggcaaaaacaagaatacccggtatgtgtgttcactctataacactcacggcactgacttttgcagtagtcactcaattactgagcgagatcttaaagaagcactgatctatttcctggaacattgtaaggaaaacttgtccgaggcaatcaatgatctcgataatatcatccacaaagactcccagaaatctgaggacaacattatagaagtcctcgaaaaagatattgccagagttgagtacgaagtcaaaatactgctggaacagaagatgcgagagacgatgaagaacccaagtatgatctctatgattgatgaaatgtacgagaagatgctcgaggagaagtatgacggactcaagagcctcaaaacacagctggaggacaagaagtctaacatgtttgatgataactctatctacaaaaacctgaccagcgctatggacattatgacaaagattatcgagaccaaggacattaccaaacggcagattgcaacaattgtggacaagattgtggtgcacgaagatggaggcctggacatctaccttaaagggaacctgcatgagctctgcacgaactatgtccaatacaagatgaccgataaggaaaaaatactcgcggctactcttgactatattaaaactactcctgattacatcatccccacagcagcctggaagtacagcagggcccaggggtgtagagttggttaccctaattattttcgagttttttctatccttatcaaagcagggtacgttgtaaaaaatgaggggtacaacaaggggtaccggctgaacagacccttcaaaaccctctatgatgacttcaagaataacaatatcgactacgacacctctctctgtaagaacaacaacgtcacactcaaaaacattaaggacatttgcaagtgggttcagtccctgcagtacaagaagaagctgttc

SEQ ID NO: 946 - DNA, 1665 bp, unidentified
  source 1..1665: mol_type = unassigned DNA; note = Bacteriophage uvig_465509 from the Index of /pub/databases/metagenomics/genome_sets/gut_phage_database (ebi.ac.uk)
atggatgaggccagactgatctttcccttctcccttaaggaacgcgagatagagatgaagaaaagagtctacactctgtatagggtgtctaccaaaggccaggtcgaaaaagatgacatcccaatgcagaaagaaagctgtaggaactttgcagaaagccaaggctgggagattgtaaaagaattctccgagaagggtgtctccgggtttaagaaatctgctaaagagcgcgatgagttgcagaagattcagcaggccgcgatggaggggaaatttgacatcctgttggttttcatgttcgatcgcctcgggcggagggacgatgaaacccctttcatcgtagagtggtttactaagcaaggtatcgaggtgtggtccgttaatgaagggcagcagagattcgatactcatgtcgacaaactcatgaattatatccgctactggcaggcatctggcgagagcttgaagacttcagtgagaacaagaacgcggctcgaacaactcacaggagaggggcactacacaggcggtaccgtggcgtttggatataaacgagtgaggctgggtagggttaataagaaaaatcaggaagtgtgtgatctggtggtggacgaggctgaagcagagattgtgaggctgatctttcacaagtatgtctacgagggctacggagcccaaaaactcagccattacctgtatgaacagggcgtggtcgggcggaataacaagaacattccaaacaccagtatcgtaaggatgattaagaacaagggctacacggggtatcttattaacggagcggtcgaaactgagtgccctcagcttcgcatcatagaacccgagcttttcgagcaggcacaggagctgcgacaggcccgaacatgcgaacggggtggaacatccctcggaaccagttccaaggccctcttgaccggcttggtctactgcggacactgcggtaaccgacttagtcttactagctcaggcaggatacatacatatgctgacggccacaccgtaaaggaagtgcggcccagatactcttgcttttacaaaataagacacccgggggactgtgacgggcaatcagggtacggagtgagcaagcttgactctatcgtggaggaggttgttaggcagatttttgcccagttccgggaggtgagccgcaagaagcttctcgagagtgtcaagacgaatgatgccgcgagaatccaaaaaaagatcaaaaagatccagaaggaccttgaggcaaagcagaaagagctggatgacctgaaggcagaaacaattctggtgattcgaggagtatctgccctggacaaagaactgctgggcacccttgtggccgaggcaaaagatgctctggagactctggagaaacagctggttcaagcccaggaagagtacgaggaggctactaagaccgctaagcgcagtaactatatctgtaatgaactgttcacatgggccgacgtttatgataccgcaaatcatgacgaaagacgcgccatcctgcagcaattcattaaggaaattcgggtgcggaaagattacgaaatcagcataaccctcaacgcttcctttgaccaggtggaacagttgaaggccgtctcaacctatgatggcgctgagatattcgaagagatttcagctaaaggcgcc

SEQ ID NO: 947 - DNA, 1638 bp, unidentified
  source 1..1638: mol_type = unassigned DNA; note = Bacteriophage uvig_539852 from the Index of /pub/databases/metagenomics/genome_sets/gut_phage_database (ebi.ac.uk)
atggtgcaggagaagcttagggccgtgttttacgctagggtttccaccgaagaggagagacagctgaacgcgttggaaaaacaggtcgccgaatgcaaagacgcagtgctccagaaaggctggaaactcgtggaccagtatgtggacgaaggaaaaagtgggacacagattaagcggcgcgatgagtataagcgccttttcgaggacctcgagaacgataagttcgacatcgtggtcattaagagtcaagacaggctccagagaaacactcttgactggtacatttggatcgatcgactgaccacacacgggaaacgcttgtacatgtatctggaggacacattctactcacccgataacgctctgatctctggcatcaaggctattctggcagaagagtatagccgggaacttagtaagaaaattaacaactcttacaagagaagaatcgaagccgcaaaaaacggagagaaaatctccatagtcaacaattctcgatcccttgggtatgacaaggtcaatggagagctggtaatcaatgaaaaggaagccgaagtggtccggatgatcttcaatatgtacgccagcggagagggccttcgcgctatctcaaacaccttgtatgatatgggttataggaaccgaagcgggaatgagatagacccgacaactatttccaggatgctgtcaagcgaaaagtacaagggtgtttatgttattaaccagcggcattacgattttgacactaagaagactgtgcttaaccccaaaagtgagtgggtccatattcctggcgctgtgcctgctatagtagaacccgagttgtgggacagagtgcaggaaattaaggggtcaaaagtacaaagcataaagaatgagaagagagggcggaattgtggcaagagtatcttttcaggtaagatctactgcgccaagtgcggagccaagtactggcgctccctggagaatggttatgtgaagtttaagtgtagctcttactcaaagtacgggaaaataccaggcaagggctgtgacaacaagagtttttctgagaatgccctgtactctatcctgcaaagcttgtccgaacagatcgttgaaattaataccgccgaggtgaggaaatccctccttaattggcttaaaagtctgagagaacggctcagggcatcccagggcgacgatacgatcaaagaagaaatacgcaagcagaccgcgcgaaaggaaaaacttaccgatgcatatatggatggaattatttccaaagaagactattccaaacggtacaaggagctcgagaaaacgctggaggatcttaaagacaaactcctgacactggaggttaacgaggatcttcaaagcattgaggaggtgatccaaaacatcgataaggagatggaggaatatctgcagacccagagcttcaatgagagacgcgttgagttcttgaaccagcacctgaccaaggtgactgtcaacaaggattctttcctgctggagttcgatttgatcgggggagcgatcctgacaggcaaagatttttacctctttgtcgacaatccacggggcaattgtaaaagctcaaaaggtttcgtgaggtgcactggatctctcgtatgtgactgcaatctgtggaaa

SEQ ID NO: 948 - DNA, 1503 bp, unidentified
  source 1..1503: mol_type = unassigned DNA; note = Bacteriophage ivig_4470 from the Index of /pub/databases/metagenomics/genome_sets/gut_phage_database (ebi.ac.uk)
atgcacggggaaggggagaccctcgcccgacatgagaagattctcaccgatttggcttttggaatgggtatcgtagtagaagagacctaccgcgagatagtgtccggagaatctattgctgccaggcccgaaatgcttcgactcctggacgatatcgagaatgacaagtgggatggggtgcttgtcgtggaaatcgaacgactcgccaggggagactcaagggatcaaggattgctgctggaaacgtttaagtaccacaacgtcaaaatcatcactccgcttaagacatacgatccgaacgatgagtttgacgaagagtacgccgagttcggcctttttatgagtcgccgcgagtataagactattaaaaggagattggtaaacggaaaaaaagcagccgccaaagaggggaagttcgttggagctcttgtgccctatggatatgagaagattaagctcgatagcgacaagggctattctttgagacctgtgcccagagaagctgaggtcgtacggagcatcttcgagatgtatactcggggcaccgttgagaccaaaggccgccctgttgggatgcagagcatcgcaactattctgaacgacctccatatcccaccccaaaagtcagataggtgggctcctagcactatcagggggattattactaactgtgtctacgccggcaagattcagtacggtcggcgctctctgggcaaaagtgtgcacaatggtgtggtgaccaagacctatcccgttaataaggactatccaatctacaatggcatccaccagccactgattgacccagagacatggttgctgtcccagaagatattcgccgatcgaacatgcgtgcccaactttcgcaaatatgaactgcagaatccgtttgcgtcactcctgagatgcggcgagtgtagacgcagcatgaccaggagaccactgaagagcgggaccaatcgggcctggattatatgtaaaactcacggttgccccacggtgggagcggacctcgatgacgtcgagaaaagaattatcgactccctggcgcagtggttgcacgactacaagcttgagcttagctgcacagaaactttcacgggcatctctccagcactgttgacaaatgctctgtctgaaaagcagcggcaagccgacgacctcaaaaagcagctcgaccatgtttaccagctgctcgagacagacgtgtatagtatagaagtgttccgggagaggtcaggcacattgaccgatcagctgaacggtgtcaaacttgatctggaagacctggaaggccaactgaagaaacaggcagatcgagaaaagaggcgggctctgcttatacctaagttcgaagggctgttggaccattactgggaactgtccgcaggcgagaagaacgatctgttgtccgaggtcgtggagcgcatcgagtactttaaaagttcccgggggacgaaaagaacagtgcctgatttcacccttaaaatctaccctagactt

SEQ ID NO: 949 - DNA, 1431 bp, unidentified
  source 1..1431: mol_type = unassigned DNA; note = Bacteriophage uvig_590420 from the Index of /pub/databases/metagenomics/genome_sets/gut_phage_database (ebi.ac.uk)
atgaaaatcgccgccgcctatatacgggtgtctacagacgaccagattgaatacagccccgactcacagcgcaaggccattttggactatgcaaaacgcaacgattatatcgtcccccaggagtatatctttgtggacgaaggcatctccggccgctctaccaaaaggcctgcgttccagcagatgattggcaccgcaaaacaaaaatcacatcccttcgatgccattcttgtttggaagttttcaagattcgctcggaatagagaggatagcgtggtctacaagtccatgctgaggaaacaatgcggggtggaggtcgtaagtattagtgaacagattggggaggacaagactagcatactcatcgaagcacttctcgaagcaatggatgaatattactctatcaatctcagcgaagaagtcgtgaggggcatgtcagaaaaggcccggagaggaggcactttgggaagggccccctttgggtacaccgcaaagaatggcgagctgctgcctaacgaagacgccaaaaccgttcagtggattttcaatgccttcctgaatgggaccgggatgagaactattgcgacacagctcaatagtagcggcatcagaactgcatatggaaaaccttgggagaatcgcacagtcgagtacgtgttgcggaacatcacatacgctggacatcagcactggacaccgggtggaaccaaggatatgaaacacgctgagaagataaaaaggaacacgatcgtgaagaacaacgcgcataccgctatagttagcgaagagcagtttgccgccgtgcaggagaagatcgccgaaaacaagcggaaatacaagaaacatgagcaacccgaagtggggattcctttcttgggtaaaggcctccttaggtgctctgattgtggaggtgcattgtgtatgttgggcaggggtaacggtattcaatgccacaactacgctcatgggaagtgtaacgtgtctcactacatcaagctcgagtacattgacaaaatgatagtggataagatcaagagtgatgtagaagcccagaattttcgcacgatcctgatcccagagaatgcggctgaatcccaggagatgcaggataacaagagggcactggagcgagcccggaagaagctggccagagtccgagaggcttatgagaacggcatcgacactattgaagagtatcgacaaaacaaggctcggatccaaaaggagattgaagagcttgaggcgaaaccagctccgccaaaagaaacccaggagagcgcagccgagaagctgagacagcgcatactctctaatgtaaccctgctggagtccgacgctccagctgggctgaaaaatgacatgctgcacactttcgtttcccgaatcgtctttgatagaaagtccacacgcgtgaaagttgagtaccacgga

SEQ ID NO: 950 - DNA, 1320 bp, unidentified
  source 1..1320: mol_type = unassigned DNA; note = Bacteriophage uvig_271148 from the Index of /pub/databases/metagenomics/genome_sets/gut_phage_database (ebi.ac.uk)
atgattcagaagaagattaccaccatagatgcagccccacggcttgaacggctgatcaatgttgctgcatacgcacgagtatcaagcggaaaagatgccatgctgcactcactcgctgcacaaatcacatattaccagaatcttataacgagtcatcagggttggaagttcgcgggcgtgtatgcagacgaggcttttaccgggactaaggataatcgccacgagtttcagagactgattcaagactgtaaagacggtaaaattgacatggttatagtcaaggctatttctaggttcgctagaaacactgtaacactcctgaaaaccgtgagaatacttaagagtattaatgtcgacgtgtacttcgaagagcagaacctgcatacactgtccgccgagggcgaaatggtgctgactttcctggcctccttcgcacaagaggagagccggtccgtgtctgagaatatgaaatggaggatcaagaaagactttgagcagggcctcatctggggttctaagccccagcttggctaccgcatcgttgataggaggttggttgtcgtgcctgaggaagcggagatggtgaggcgaatttttagcttgtacctggatggatatggattccaaggaatcgctaatctccttaacgccgaaggccagacctctaccctcgggaacaagtggagcaagaccgcgatagaagccatcatcaacaactacaattacaccggagacctgatcttgcaaaagacctttcgagttgatcacctgaccaagcataagaaactcaatcgcggcgagaaagctcagtatctggtagaggatgcccacgaacctattatcacgaaggagcagtatatgatggcacagactctcaagaagcagcgggcccaacactttaacttgttggatatgacgaagcagatcaacctgtttacaggcatcgtctggtgcggggcctgcggtaaacactatcggaggaaaaagcaggaacgccggatgtggtggacatgttccacattcaacactgtcgggaaagagttctgcgattccaagagtgtgcccgaagaggtcctgattgaaatcactaaaaaggtgctcggcgtgaaagagattacagctgagatcatcaagagcaaggtggaccacatcgacgtgctcaaagggaatagacttgtcttccatctgaaaaacggatcaacaattgaggagacttggaaatcactgagtcgaaaggacaattggaccccagaaatgaaagaaaaggccagacagagagccattgcccagtaccgccgcaaggaagggaaacataacggc

SEQ ID NO: 951 - DNA, 1659 bp, unidentified
  source 1..1659: mol_type = unassigned DNA; note = Bacteriophage uvig_373577 from the Index of /pub/databases/metagenomics/genome_sets/gut_phage_database (ebi.ac.uk)
atgcagatgatccctatcgatctcagcgcgctgactgccagcgaacagcgacagttcactgaaaatccctccgttttgagcaccgactgtgacgtggtatgctgtctttatatgcggtactcttctgatagacaaaccgagcagagtatcgagggacagcttcgggaactcctcactttttgtcagcagcaccgatatagagtcagcgcgatctatgtcgatagggcaatttcagctcacgcatccatggagaagagaccagcctttcaacaaatgctctctgactcctcccgggcagcctggaagaccgtgctggtgtacaaacttgatcgctttgctagaaatcgggaagatgctgccgtggcccgcatgcgccttcgcaagaatggctgcaacgtcgagtcagccaaagagagtatttctaaaaaccctgagggtgtgattctggaaagcatcttggaggggatggcagagtattatagcctggaactctcccaaaaaattacgcgcggcatgcgggagagcgcactgaaaggacaggccgtcgggggcagcgtccctctgggttacaagatcgagaagaagaagtgggtattggacccacttaccgcgcccctggtgagtgaggcgttcacaaggtacgccgacggggagaccgtggcagatatttgttctgattttaacgccaggggataccgaactgctaaaggggctcaattcaacaagtcatcattcaaaaacatcttcaggaacgagaagtacatcggagtctacaagtacagggacataaggatggaggatgctctgccgagaattgtggaagacgacgtatggcgaaaagtgcagagccgccttaaagttaacgaacaagccccagctagaggcaaggcaaaagtcccgtaccttcttgcgggcaaaatcttctgcgggcattgtggatcacccatggtaggtgaatgcggaaggggcaaagggggcaagacctacaactattatagctgcgccaacaggaaacgcaatggcgggtgtgacaaaaagcccgcacctaaagattggattgaggatgtagtggccaacgacgctattaatgtgctgacagacgaggtgattgaatacgtggccacaacagcagcacagcagagtgagaatgaaatacagcagaacaccaatatcccagctttgcaggcccagattgcagaaaccgacagaaagatcaagaatctcctgaaagccctggaggctgccagtacagcccctgacgttctggtcgccagaatcgctgatctggaaagtcagaagaagggcctgactgcccagctgtttgaagaaaagaagtccgtgatcccacttacgaaggagatggtggtttacttcctggagtctgtccggtcccaagtgctcgatctcgagacccagaagcctatgcttttctccttgctcatcaattccgtgacagtttatgacgatgaacccggttacatgaaatttgagacagcttataatctgacccagatacctgccaaaacttatagagtgcccacctctggaatatgcaagtgctctgacatgggccttatctcaccacccctggacgctaatccaaacacaattacggtttttggtatgatattcgttcagactcggaagcatgctttgccc

SEQ ID NO: 952 - DNA, 1566 bp, unidentified
  source 1..1566: mol_type = unassigned DNA; note = Bacteriophage uvig_217517 from the Index of /pub/databases/metagenomics/genome_sets/gut_phage_database (ebi.ac.uk)
atgaattccattcagaaagtggctctgtacatgagactgtccaaagaggatctcgacaagggaaatgccgaatctgaaagtattcagaatcaacggatgatccttgatgagtacgcctcttcacacggatgggagatctacgatcattatattgacgaggacttttcaggcagcgataggagcagacctgatttcaatcgcatgattgaagatgcaaaaaacggcaagtttaacattgtgcttgtcaaaactcagtccaggttcgctagggacatcaaagttgttgaggactacatacataaccttttcaaagagaagaagatacgcttcgtcagcgcgctggagggcatcgacactatgcggtctgactccgagttgtctagtcatattcatgcagtcttcgatgagacacagctgaccttgctgtcccagaatatccgaagaagctttgatgagaaagccaagcggggccaattctttgggtcaatgcccccgtttggatataagaaagatcctaataataagaaccacctcatcgtggacgaagacgctgcccccgttgtgcgaacaatcttcgaaatggcagctgccggtagtacttacatgcaaattgcgcagcaccttaattcctgcggatacttgattccttcagaatacaagaaacaacaggggtataaggtgaacggtatgtatgatcgccatatgaaaattggaaagtggacaagagatatggtaaggaccttcatcagcaacgaagtgtacatcggtaccgtggtcaatcacaaaagtactgtgctcaatttccgcaccaagaaaaagggcaatgtaccaaagagtgaacatatcaagatacccaatatgcacgaaccgattatcgacatcaatctgtggaacaccgttcagaaactgagacagactagatgcaaggcctcatcaggcaaggatggtaaaaagcacccactgagcggcaaggtgtattgtgagaaatgcgggtccaaaatgtataagtgcaaaagtggagggatatcttattttcgctgttatcgggccagcagcaccggggagtgtgataaccacaaacgaatacgactggacatgttggagaagacaattatagacaagatcaacgagacgatctctcagtacgtcaaccaggatgagctctccgagaacatcgtgatcatcaacaggctggacaagaagctcgaatctcttaaaaaccagaggtttaatattgaaaaatccctcgagacaacccggaaaaatctgctcaacctcttgaagagctataatgatggcgtggtcattcgcgaaatctacgaacaggcccagaacgactacatggagcaacaaaacgcaacaaagaccaagctgaagaacattgacattaaaattaacgacgtgcagatcaagatcgaaaaccaggaggacaaagaagagattctgaaaaagtacacgcacatagacaagctcacaataccaatcgttcaggagttcatcgatagcatttttatctctgaagtaaccaaggacgggcagcggaatatcactattaacatggctata

SEQ ID NO: 953 - DNA, 1611 bp, unidentified
  source 1..1611: mol_type = unassigned DNA; note = Bacteriophage uvig_581095 from the Index of /pub/databases/metagenomics/genome_sets/gut_phage_database (ebi.ac.uk)
atgcaaaataagcaggccgtaatctatgcgcgggtctcatctcgcgaacaagagagagagggattttctatccctgcccagctgaagctgttgaaggaatatgcactgaaaaacggtttccagatcgtgaatgaatactccgatgcagagactgccaaaaaagcagggcgcaccaattacaacgccatgctggcatttctcaaggaaaacccagagatcaaaactgttctcgtggaaaaaacggatcgcctctaccggaattttaaggattacgtcaccctcgaggattatgaccttgaagtccacctggtaaaagaaggttcaattatcagcaagaactctaagagtcacgacaagttcatccatggcataaaggtgctgatggctaagaactatatcgacaatctgtcagaggagatttcaaaggggctgcatgaaggcctggaacagggatactggccctttcagccaccctacgggtaccttagaggggcgaaaaaaaacttgattatcgacaaaagtaggattttgtttatccgccgggctttcgagctgtttgccactggcaagttctctctgcgaaaattgtgtgaagaactgttcgtggagggatactattataaggctgagcgccctaaaattacacagtgcgtgctggagagcatgttgaaaaatgtaatctatgtgggtcagatgaattgcaatggcataatctaccaaggaaaacacccagcaatcataagccgagagattttcgacaaggctcagttggctttccataaagtggataagagtaaggtcaggaagaacttcgactttctctacccgggaattgtcaagtgtggcgtctgcgggtatagtttctgtggcgagaggcagaaaaaacacaatatctactaccggtgctcccactttgatagaagctgccctaatacatgctacatttccgaaaagcacttgacccaatcttttaggatgcatcttaagcgaatcggactggatgaagatctgtacgagctggtgaagtattccttgaaagaatgtctgggcgacgaacaagagtaccacaagacggagataacaagaattacaagcgaaatcgagcagtgcaaggagattctcaagaaaatgtacctggaccaggttaacaatgtccttgactacaatatgtggataaaccttaagaacgagtatgaagtaaaactcaacaggttgagcgctgagtatcagaaacatctctatgccaacaccaacttcctcgacactggcctgaaaattctggatctttgtcggaaggcatctctccctgccactgagttgtcagccgaagaggtggcaaacattatcagggaaacctatcttagcgccacagccaaagataagcgggtgaaagtggttttcaaggagcccttcgctaccattgagaatctcgtgaagctggcgaaaaaagaaatttccgaggttggttttgccgagttcaagtccgctatcatcagctccaaagacaagtgcatcaagagtataaagaaggagcccgtggggtcagattttaactgtagctcctgttttaagtggtggagacttggcgactctgtgcttttggttagaata

SEQ ID NO: 954 - DNA, 1671 bp, unidentified
  source 1..1671: mol_type = unassigned DNA
atgataaagaagagggcctatatctacacaagggtgtccacaggtatgcaggttgagggttactccctcgccgcacaggaggagcgcatcaaacaatacgcaaacgccttcaatatcgagattgttcagacttaccaggacgccggacgaagcggcaaaagtatccttggcagggaacagttcttggagatgttgaacaacattgaatctgaacgcgacaatattgactgcgtacttgtctttaagcttagcagattcggaaggaactccgctgacactttgaagtccctcgaaatcatggagaatcataacgttcacctgatttgtgtagacgatggactcgactcaagcaaagatgcgggaaaacttgttattactattctgagcgcggtggccgagatggagagagaaaatatcttggcacaaacaatggctggccggaagcagaaagcgcgcgaggggaaatggaacggcggattcgctccaatgggctattctattagccaaggggtgcttcaaattaatgaggaagaggccgaactcatcaaaatgatatttgatctgtatgccaacacggacatgggctctaacaaggtggcacagcacctggtgaagcttggggtcaccaaacccattcggcagaacggaaaaaccccgtacttcagtgcaaatgtcatccggaatatactgaagaaccccgtgtataacggcaagattgcttttgggaggagaacgagtaagttcgattcaaaaaccaataagatcagaattgtgccttccgatagctatatggtggtcgaaggtcagcatgaggccctggtcgatgatgccttgtgggagaagacccaggccaaactcaaagctcagtctaagaaatatgaaaaggtgaatagacctaaaggtgaacatatctacctcttgtcaggcatagtcaagtgtccatactgcgaggcttccctgtacgggaatattagcaaaaagaagaacaagaataaggatggcgagtactacaagcactatttttactattcctgcaagcaccggaaaatgatggacgggcacaagtgcacattcaccaaacaaatcaagatggaagcacttgaccgcgaggtcctgacaatcatctccaagatcgtttcagagccctctttcgctaagaagctccaggagaaaatcaacatccagatagatactgaagagattgacaaaattctggagcagtatgagacccaactgaggaaatacttgtcaactaagctgtctctcatgcgccagattgacaacctcgattatgaggatcgacactataaccagaaatttcaggacttgaatgaacgattggattcaatctacgacatgatcgaggaagtggagagcctgatagaagagaataaggagagaaaagaagtaattcaacgggaaaagatgaccgccgagaatgtctacagtattctgctgaagtttgaaacactgctggctgtgatggaagatatcgacaaaaagcgattttgtcagctgctcatcgaaaaggtagttatccgcgacgagaaaaatgactctgggcggtgggtgaagagtataatcttcaaactgcctatcatagaaaaggacctggagattagcctggataacaacgagcatgtggaatgtgtggcacttctggtgaaaaat

SEQ ID NO: 955 - DNA, 1728 bp, unidentified
  source 1..1728: mol_type = unassigned DNA; note = Bacteriophage uvig_460604 from the Index of /pub/databases/metagenomics/genome_sets/gut_phage_database (ebi.ac.uk)
atggcccgaactcggaatagacagatgaagcaggctgaggcatttgttcaggcatctcctcaaaaaatctggaaggccgggatctacaccaggattagcgtggacattaatggagaaaaacgcgaatcactggagacacagaagctgatcgcccttagctacgctgagtcacatcccgacatagaagttgtaaagttttacaaggacgacggcatctctggtactaagtttgatagagatgattttgtgcgaatgttgggggatataaagacaaaggagattaatacggtcattgtcaaagacctgtcacgcttcggaagagacctcgaggaagtgtccaagtatctcgagaagatattcccctttatgcaagtacgcttcatcagcgtcaacgataactacgacagtatttctcctgaatgtgacaatcagatgttgggcattatgatttctaacctcgctaacgacatgtatgccaaagacgcaagcgtgaaaatgacaagtgcgatgaaaatcaagatggaaagcggagagtattgtgggggcgatgccccttacggctataaacgggctaaagatgagaaggggaaaagtacaaccgtcccagaccccctcacggccccatatgtggtcgaaatttttgagaaattggcggctggacagagttaccttaagatctctcgcgaattcaatactatgctgctggccagcccccgagtgtatgccagaaccggaaaactcttcctggatcggatcgacgaaactgatatgcattggcaaagttcagtgatcaagcagatcgccgaaaatcgacactacctcggtaatacctacagccacaaaacacgcaccagcctgttgacgaaagagaaaaacgtgatgctggacaaagaagagtggatagagcatgtgaacacccacaaggcaattgtgtccgcggaactcttcgaaaaggtgcagaacgtcattaagctgaaacaggagaaggcactgccgaaaaaagacctttccaacatgcagacacacggtaaacaggataataagtatgttggcctgatctactgcggtgattgcggcgctaacatggtgaggcggtattattattcagagaaaaacggggtcctgtactataactattactttatctgcggcaattacgccaagatctccaaggagaagtacaactgcaataggtggaaggaagaggttatcgatgagctggtttatagagccctgatcatgcagcttaagaccgtctgtgagttgaagactcaactcaaacggttcaatgacgagtactttgagaccttccaaaaatacctgaaccgggagcagtccaagattgtgcagctgaacaagaggaatgaggctagaaggtttgagctctacgaacaatatgtatccggcgaaattgacactgatgcatataatcgcatgaccgagagaatcattgtggtggaaaaggatctggtaaccaggcagaaagagattgaaaagtcacggaagatcacagaaaagctttgcaagaaaaacttcagctggctcgcagaattttccaaggggaaaaatctcgaattcctcactaaagacgtcgtgaggtcctacatcaagaagatatctctgtacgaggacaagcggatagagatcgagttcaaattccaggatgagattcaggccttgagtgagatacttgaagagggagtgatccgatgtcagatggtttctgct

SEQ ID NO: 956 - DNA, 1548 bp, unidentified
  source 1..1548: mol_type = unassigned DNA; note = Bacteriophage uvig_200966 from the Index of /pub/databases/metagenomics/genome_sets/gut_phage_database (ebi.ac.uk)
atgcaaaagaacaacaatattggcaatcgctgcgttatctatgctaggtactcatgtagcaaccaaacagaacaatctatcgaagggcaaatgcacgactgcgagcagttcgccgccaggaacaacctgcaaatagtgaatagctatatcgaccgagccacgacagctactaccgataaaaggccacagtttctgaaaatgattgccgattcaaaacagtgtgtctttgatgttgtactcgtgtggaagttggacaggttctccagaaaccggtacgattctgccatgtataagaaaaagctcaaggataatggcgtccgggttatgtctgcgatggaaaacattaccgattcccctgagggagtgctgatggaaagcgtcctggaggggttcgctgagtacttctctaaggatctgagccagaaggtgaaacgcggaatgcgggagacagcggcaaagcacaaaattactaatcggattcccttcggctattgtaaaagtgaggaggacacctatattcctgacccgcatacagcaaacgccgtctgcaaagtatttgacatgtatattaccggattcagaaagtccgatatcgcagactggttgaatagtaatggctacaagacctcctacggtaatcagttcacactgacggcgatcactcccctgattaaaaatacaagatatattgggaagtactactacgcagacaatgagtacactgatgagacccaacgaatagtgacagatgatatcttttacaaagctcagcagaaagccattgccaatcaacacggcgggagttgcaaggcaattgaaagataccttttgtctaataagctgtattgcggatattgtcacaacaagatgatcggggaatgcggtaagaatcagaacggcttggcttatcattattacacgtgtgttggtagaaaaaggaagcatatttgcaacagaaaaaacatcaaaaagaaggacatcgagcagtacgtaatcaatgctatctcctgtctgcttaacgatgagtacgcaatcaacaagatcatcgagaccgctatcaactaccagcagaacgacgtggagcacatcaatgagatcaaggacatcgaaagcaccatcaaggagatcgagcgcaaaatttctaacatactctccgccatagaagcaggaatttttacagattctaccaaaaataggctgcaggaattggaaaatcagaagactcgacttacccaggaattgaactataagaatcagagctcaacaaagatacctcggactaccctgaaacagattcttaaaaatctggatctttccgaggccgctactaaccccgaaaaacagaatattatagacctcctcatccatcgcgtgtatctctggcaggacaagattctcatagtgtttaatcagagcaacttgtgcgacaacgaaatatcagtggacgatacggacgtcaacacaatcatcaagaccctgagcgagccaaacgccagtagctccgattcagtggagtacggtaccccagaccagagtcgcactggcgac

SEQ ID NO: 957 - DNA, 1440 bp, unidentified
  source 1..1440: mol_type = unassigned DNA; note = Bacteriophage uvig_540211 from the Index of /pub/databases/metagenomics/genome_sets/gut_phage_database (ebi.ac.uk)
atgaagatcggagctctgtacattcgggttagtactgacgaccagcttgaatatagccctgccgctcagcaaaaacttgggcttgattatgcgaaaaaaaacggcattgtcatacccaaggatttcatcttcgtagacgaaggaatttccggccgaaaggtaaaaaatcgcccagcctttcagcaattgatctctctcgcgaaaagtaatgaacacccgattgaggttattctggtgtggaagttttcacgattcgcacggaatcaggaagagagtattgtttataagaatctcttgaaaagagccggggtggagctggtgtccatttccgaacctctccctgatggagctatcggtcagctggtggagaggatatttgaatggatggatgaatactattcaatcaatctgggagtagaggttctgaggggcatgagcgagcgggcaagacagggcgggtgcaatgtgagcccaccacttggatacaagatggaagatgggtcccccgttatcgaccctgagcaggcaatcatagtgaagaagatcttcgacttctttgttaacgataagctctcattctatgatatcgccgtgaagctgaactctcttgggtacaagacaaaacgcgggggaaagtttcagaaccgcaccgtggcctatattgtgaggaacgaattttacgaccagcagcttgtgtggaataagaccgagaaagcgaccagaaagctgaaggactctagcgaatggatttctgtcaaaggggactatccccgcataataagccatgaattgtgggaggccgctcaggagcgagacaaggctactcgccgcccaaggggctccagacccgcaagcacttataggcactggctgtctggtatgctggtgtgttcaaattgtggcggcaagcttgtgcgggtcggcaccaacaagagtggtaatacatactttcagtgcacgaactataaccacgccagctgctcagagtctcatagcaccaacgccagagtaatccagtccgccatcctggagtcctttaaagatgtgattagtagtggcaatgtcgtctacaacgcaactgctaccaaaaaagacgactctgaaagagccttgatcgaggacagtatcaaaaagatctccttcaaggaggcccgaatcaaacaagcatacagggacggtattgatacgatcgaagagtacaaggaaaacaagcggattctctccgaggagaaagctaaccttgagcaaatgctgagcgagctgaaggatgataatgctgagcaaacattgcttctcaaaaagattcggtctgcctatgacattatagcgtcagatgaaacaagcgagacccagaaacatgaggcactgacttcagtggtccagaaaatcgtcttcaataagaaggaagagaaattcacactctactacttcatcaactac

SEQ ID NO: 958 - DNA, 1446 bp, unidentified
  source 1..1446: mol_type = unassigned DNA; note = Bacteriophage uvig_533354 from the Index of /pub/databases/metagenomics/genome_sets/gut_phage_database (ebi.ac.uk)
atgcagaccgctgccgcctacattagagtgagcaccgatgaccaagtggaattctcccctgacagccagatgaaggctattcagaagtacgcgaaagaccatgatatgattctgccacaggaccttatatttgctgatgagggcatctcaggaagacatgcagaaaacaggcccgccttccagcggatgatcggcctggccaaaactaaacccaagccattcgatgtgatcctgttgtggaagtttagccggttcgcacgcaatcgcgaagacagcattgtgtataagtctatgctgaggaagcaatgcggtatagatgtggtctctatttccgaacaggttggggaagataaaacctccatcctgattgaggcactgctggaagccatggatgaatactactcaatcaatcttgccgaggaagttagaagaggaatgcaggagaagttctctcggggtggggtggtctcccagccaccttatgggtataggatgggcgataacgtatttgtgatacagcctgacgaggcggagattgtgcgcaagatctaccatgactttctttccggggccggaaggagggaaattgccgttgagctgaatgcactcggcgtcgtgacacggaagggaagaccgttcgacaaccgcagggtcgagtacattttgtccaatccagtttataccggaatgctgcgccgatcaaagaacggcaggcagtcttcaggtgacccgttcaatcaacgggaggacatgcaggtgattcctggcaaccacgagcctatcattgatcgagaaacgtttgacgccacacagaaacgccttaaagaggcaaaaagattgtacgtcaagcatgcccacactgagggtcgacccttcatgctgaagggcgttgtgcggtgtagtaattgcggatcaacacttgtaatggcaatgcgcaacaccagcctgcaatgtcacctctacgctaaagggcagtgcgatgtgagccacgcaataagcatcgctaaagccaatactgcagtcttggagcgcatcaaagaggatttgcggctgggcgctgtgggcgtcaatgtcgagaaccagcacaagaagaagaagccaactgtggacgcgaccagtatgttgctccagaaagagaagcaaaaactcgaaagaatcaaagaggcctatgccgctggggtggacactctgcaagaatatcgagaacaaaagcagaaaatcacagcccggattgaagaactgtccaaaagtgcgacagtggagtatcacacgcccgagcaggtttctcgagaaatcgtgaagaggatccaggcttctttggaaatgttggaggatgctgccgttagtgaggagctcaagaaccaggcaatgagggtactcgtagagaaaatcatcttcaacagaaagaagaacctctttgagatagtctacagagacccctttgct

SEQ ID NO: 959 - DNA, 1509 bp, unidentified
  source 1..1509: mol_type = unassigned DNA; note = Bacteriophage uvig_424088 from the Index of /pub/databases/metagenomics/genome_sets/gut_phage_database (ebi.ac.uk)
atgctgagggccgccctctatggacggttctctagcgataatcaacgggaggagtccatcatggcccagttccgagatagcgaggaatattgtaagaagaagaactattgcatcgtggcacgatatgcggatgaggcgaaaagtggaaccacaactgttggtagggatcgatacaaccaaatgctggatgatgcccgccgcggcctgttcgatgtaattgtgttccacaaggtcgacagaaacgcccgaaatgaattcgactactacatgactaagcacaagctgcagcaggtcggcgtgcgatatgagtacagcaagcaagacataaacgccaccacaccagaagggcagatgatggagagtatgctggtggggatggctgcctattatagcagaaatctgtctaatgagataaaaaagggtctgcgcgaaaacgtgcttcagggaaagcacgccggtggcccagtcccttacggttttttgacggacgagaacaagaagtacatcatcaatgaaaaagaggcacccgcagtgaggatgatttttaatctgtatgtcgctggggtccactatggcactattcggaaaaagctttttaacgccggatataggaacagagctgggcgagagttcaccaccgctggaatctatgaaattctcagaaacaggaagtacgtgggcgatctttacctgggtaagacactgttccggaagggcaaaaggaattcccatcgcacatctgctgacgtacgatattacgaaaatgtgatacccgccatcatccctcggtcactttttatggaggttcaggaaaagatgaatagaaatcggagacggacagggtccggcaacgctaaaacagtttacgcactctcaggacttattttttgtggcagatgcgggtctgcaatggtggcacatagtaccaagaattcacgcggggtaaaaaactactactatagatgtcctaaaggcaggctcgtaggagatgagaaatgccaccagaagttcgtgaatagggacaaaattgaagctgctgtctacaaccttattagagacacctttacgtctccaaacgcacatgaccgcattaaagaagtcatatccaagaataagataaagatcaaccccgaggactacacggagcagatcaagcggctgaagcaacaggaagccgcggatgttaggtccctggaccgcttgtacgatatctacatggccgagcaagaagacgaattcaccataagcaagatgaagaaactcaaagagggcatcttgcgccttagaaaccagatcgaggagctcgaaactcgccagaaaattgtgcagagcgagaaatttgacattgacagggtgattgacactttccagaagcagttgaaacagaaacaatcaccagagttcatccagactctctttcaattggccatcaaaagtgtgacaatctaccccgataaaattcaggttgctctcctggtgacccaggagcggtttgaactgccgacccct

SEQ ID NO: 960 - DNA, 1389 bp, unidentified
  source 1..1389: mol_type = unassigned DNA; note = Bacteriophage uvig_334631 from the Index of /pub/databases/metagenomics/genome_sets/gut_phage_database (ebi.ac.uk)
atggcccagcctcagactgcactgcagcgagttgctctgtacatacgcgtctcctctgacgaacaagccgaacgaggggattccatcagggatcagaaggaacgcgggacaaagtacatcgatgaccatcaaaacatgatccttcaggacacttacattgatgacggggtgtctggccagaaacttgatagggatgacttcacacggttgattggcaatgtaaaagccggtctcgtggacctgattattttcactaagcttgatagatggttcagaagtctccgacactatttgaacacccaagttatcctcgacaagtacaatgttgcgtggaccgccattgatcagccctactttgatacatctaccccgtatggacgggcatttgtggcccaatctatgacatgggctgaactggaagctcagaacggaggactgcgggtggccgatgtctttagatcaaaagtagagcacggtgaagtgatcacgggcaaagtgcccagggggtatatgattcagaataagcacctggtgttttccgacgaggctcccgccatgctcgactccatccagtactttcatagagaacagggactggccaaaaccgtcaattatatgagggagacacacggcattaatatgagtatccagaacttgaagaactcaattctccgaaacgagaaatatacgggtcgatatcggggcaacgagaactactgtccaagacttatcagcgacgagatgtaccaggatatacaacgcgtgctggataacaacagcactatccggagcagccagaagtacccttatattttcagtggaattcttatttgcgacgagtgtgggcataaaatgtcaggctgtcacattaatgttgtatctcggaggacctccggcaaggtctatcgctacaagtatccagcctatgaatgcctgcagtatagagcatacaagaaatgctccaatggcggtgagatccgcgaaataaggatagaagagtatctcctggagcatgtcagagaggagttgtcaggatacctggtcgactttgagaccggggaagctaaacgcatcgacaatcgcgcgaaaaaaaataagattaggcgcaaactcgacaggctgaaggacttgtacttgaatgaagtgatcaacctcgaagagtacaagaaggaccgggcagagtacgaggagcagttggcagcactgccagatatggagcagcctatcaaaaatctcaagcccctgaaacaggtgctggattgcaacttcgaaatcatctacaacaacctcaataacgaagagaagagagctttctggcgaagcattatcaaggagatcagggtgagcaagagtatcggcagaaatcggaagtatcaaataatattcctg

SEQ ID NO: 961 - DNA, 1557 bp, unidentified
  source 1..1557: mol_type = unassigned DNA; note = Bacteriophage uvig_80185 from the Index of /pub/databases/metagenomics/genome_sets/gut_phage_database (ebi.ac.uk)
atggaacaatattgcctgtatctgaggaagtcccggtctgaccaagaagcggaagccagaggagaaggtgagactttggcccgccacgagcaggctctccttaaactcgccaagcaccagcatcttaacgtcctcaccatctatcgggaggtggtatctggggagaccatcgcagcccggcccatgatgcagcagctgttgcatgaagtcgagcagggggtgtggagtggggttctggtgatggaggtggaaaggctggcaaggggcgataccattgaccaggggatcgtggctcaggccttcaagttttcagatacaaagataataacgcccatgaaaacttacgaccccaacaacgaatttgacgaggaatactttgagttcggactctttatgtctaggcgagagtacaagacaatcaatcgacgcttgcagaggggtagaaccgcttccattaacgaggggaagtatgtggggaacatacccccttacggttaccagagaattaagctggagaatgataaaggattcactctccaaccggacccacaggaagccgaagtagtcaaaatgatattccaatggtatgccggaaactctggtgaacaactgggccctagcctgattgcacagagactcgatcagctgggcatcaagcctcgcaaaaacgatacctggtccgaggcgacgattagaggaatcctgatcaacccggtgtacatcggcatggtaaagtggcagaccagagcccaggtcaaaaaaagcatcaatggcaccgttaagaaaacacgaccaagaaatcatcaccctttgctgattaaaggcctgcaccccgctatcatcgacgaacaactgtatgatcaggtaagcaataggttggcttgttacgcaccagcaccaattaaccggtcacagacgattcagaaccccctcgccagcatcattgtttgcgctaagtgcggccacaaaatgattcgacgcccttacgtcaataagccctcaatgttgatctgtcggcagccaaattgtgacaatataggggcatcactcgaactggtggagaagatgctgctcgctgccctcaaggagtgggtcaaggacatgaaagtgagcactgatactctcgatcttcaacccgtgaatacactgagcttgaaaaacaaccagctgactattatatccaatgaccttaaggttgcttatacccagatggacaggacctacgacctgcttgaacagggcgtctacagtacagagaagtttctggagcggagtaacgcactctccgagaagatccagtcccttcagacacaacagaagcaattggaagtggaaatcaaaaaggaagaggaggaggtggcccagcggagcacctatctgcctaaaatcgagaagttggttgacatctactgggcgattgacgagcctggcgctcgcaatgatctccttaaagaggtgctcgatcatgtgacttattctaaagaggcccgcatgaaaaagaatcacagtgatgccggattcacactgaagatctacccactcattatgccaaagaaa

SEQ ID NO: 962 - DNA, 1611 bp, unidentified
  source 1..1611: mol_type = unassigned DNA; note = Bacteriophage uvig_538824 from the Index of /pub/databases/metagenomics/genome_sets/gut_phage_database (ebi.ac.uk)
atggcatctcagacaagaaaggtcaagcgaaacggggcccagattaaacgagccattgcgtacgctcgcttttcttctaataaccagcgagaagaatcaatcgatgctcaactgcgcgcgatccgggagtattgtgaaaagaacgggatcgtattggttgatgtgtttacagacgaggctattagcggcaagacagacaatcgcgacgactttcaaaaaatggtaaaaggggttctcaagggaaggtacgacgtggatgccatactcgtgcataagttcaacagatttgcacggaacaagtacgacagcgctctgtataagaaaagactcagggaaatcggcgtacgcgtggtttcagtcacccagaaaatcgacgacactcctgaaggcgagcttttggaaggcttcttggaggttatagatcagtactactcctctaacctcagtgtggaagtgagaaagggactcaaagaaaacgcccttaagggaaagcatgctggcggccaggtgctgttcggattctctttggacagtgaaggttattacatcccgaacgaaaacgctcccattgtgaagcgaatatttgaggagtttgccgcaggagtgcctaaaagtgagatctgcgagcggctcaataaggaaggctgccggaaccagaggaataagcccttcaacactcgcacgctgtacgatctgctgaggaacgaaaagtatatcggagtttatgagtacacaatagatcggactgagacgattagactggagaatgtgattaaagatccaattatcgacaagaggctctggaataccgtgcaacagctgaaccatgagggcagcactaaaggtcgctatcgcaagcagaagaggtactaccacttgactggtaaagccttctgttcctgttgcggatcacctatctcaggggcagggtctaaacggagcaggaatgggacgctgaactattactataagtgcgtaggtaaagtgaagcataagaacgggtgcgacaacccctccctgaataaggactggtttgagccaagggtcctgaagagcgtcgtcaacgccgttatgaccggcgaacagattaaacacatcgccaaactgacttaccaggaactcgaagaaatgagagagaaaccactggtagatgtgaataccttgaacaaggagctcgattcaattgcaaaaaagcaagaaatgttgaccgatttgcttcttgagggtcaaatcgataaggatatgctcaatacaaaaaatgcatcccttaaccagcgcaaattcgaaatccaggaggagctggagaaacggaagatgatagtcgacagtgacaacgtcaccgaggagatgatcgtgcagtatattcaggaatacgtcgagtacctgaagacaacctataccgccgaagaggaattcatgagagccgtgctgaatgagttcgtggagaaagtggaggttgacaaagagaatatcacagtctatatcctgtgtgagttctcccacatggacgggggcgataatgagtggttttccggagctagccaccaccttcccccggcgaaaatgaaaaggagattttcccggaagagaaatattcgaaataagaatagc

SEQ ID NO: 963 - DNA, 1557 bp, unidentified
  source 1..1557: mol_type = unassigned DNA; note = Bacteriophage uvig_390438 from the Index of /pub/databases/metagenomics/genome_sets/gut_phage_database (ebi.ac.uk)
atgaataccaatcagatacctgtggtgtcttattcacggttttcatctgatatgcaacacgaaacctcaatcgaagctcaacaagatgcaatcaacaagtacgctgcagcgaacgggtatacgattattgaagactatgtggaccgggccaagagtgcgacaacaaccgctaaacgcgatgagttcaacagaatgattgaggactccaaaagtggcaagtttaagtttgtcatcgtgcacaagttcgaccggtttgccagaaaccgaatagactctacaattgccaaggcaatcctggagaagtccggagttcgcgtcctgtccgtgttggagcctactagcgacactcccgagggcgagcttatggaaggcatgttcgagctgttggcccagtactacagcagtaacctgggccgcgaggtgatgaaaggctttaaggtgcgagctgggaagtgtcttcataatggcgggaaaccgccaatagggtatgatgtagacccagtaactgagaaacttgtaatcaatgaatcagaagcccagactgttaaaacaattttccaaatgtacatagacggtcacggttatgaggatatcatcaacacattgaacaagagaggttcccgaaccaagaatggaaatgagtttggaaagaatagcctgcatgatatacttcggaacaagaagtatgcaggttattacatctacaatagatgggacgggaaacataacaggcataaagaaaagtcacccgaggaagttatttgtatagaaaatgggtgccccgccattatttctgaagagatgttcaacaaggctgaaaaagtgatggaacagagaaagatgagccctggggcaaaaagcgctgtgaaaacatatcttctgacgggcctcatcaggtgcggagagtgcgggaacctcatgtccggcacccaaaggaagaatggtaagggatacatgtaccgaagctacagatgtaagcacaaaaatatggtccaccattgctccaataaggagatacgcgcagataaaatcgaggagtttgtcctgctccagctgcagaaatacatcttcgatgacaagaacattaccgccatcgtggatgaggtgaagaagcagctgatccagcacaacgcgtacgtcgtcgaagaactgcgcgagaatgagagggctctgaaaaggcttcagaatcggcggcagaacatcatcaatgccattgccgatggactgatgcaggacgactttaaggaggtgctggcccagcttaagaatgacgagaaaatcttgcttgaaaggcagcaggaactcactatccgcaaccctgatgcagcctttacagaggacgatctcagatctatgatttccgagttcagcggctatgttttgaaccgggacattcccgaatgtaaaaaattcatcgcgcagttcgtaaaacaggtgaccgtgtacaacactaagattgaagtcacgctccgcgttgcctctatcctcctgtatggcgctgattacaccattaccaaaagtatcggaaggactttcctcccaaccccagagctgcaa

SEQ ID NO: 964 - DNA, 1482 bp, unidentified
  source 1..1482: mol_type = unassigned DNA; note = Bacteriophage uvig_91735 from the Index of /pub/databases/metagenomics/genome_sets/gut_phage_database (ebi.ac.uk)
atgaaggagctgataccagccgtgatctacgctagattttccagctctggtcagagggaggagtcaattactggacaactgcgggattgtaagcggtatgcggagaaccatggcttcgagatcatcaatgagtatatagacgaagccaaaactgggacctccgataaccggccaagcttccaaaagatgatcaaagatagcgagtctaagcgattcaacgccataattgtgtggaaactcgacagatttgctagaaataggtacgacagtgcaatctatcgagccagactcaagaaaaatggcgtaaaaatctattctgcgatggaaaatattagtgactccgctgaaggaatcataatggaaggcctcatggaaagcatggccgagtactattccgccaatctgtccgagaatgttaagagggggaatcgagaatcagccttgcagttgaagacccttgggcgaaaaatctttggttacgggaggagcgaggacgaccactacattattaatgaaacagaagctcctgtcgttcgccgcatcttcaacgaatacacgtccgggaaaagtattcaggatataattaaaggcctcaataacgacggcattatgaatagcagaaacaacccgtggaacaagagtagcctgaagaacatcatcggaaacgacaagtacatcggcacctatcgcttcatggactatgtggtgcctgatggtatgcctgcaattataagcaaggatatgttctcaatagctcaggagatcaaagatcgccacaagaagtctcccgcaaggtccagagaagcaaggtacctcctgactggaaaacttttctgcggccattgtggatctcccatgacgggcgaatatggggtgtctaagaccggcaaaaagtaccactactatcggtgtatcaaggccaataagcacaagtgcgacaaaaagagggcgaaaaaggattggattgagaatgtggtagtcgccgaactgttgaaccagctcaacgacctgacttacatcgatcagctggctgatcggttcatggagtaccagaagaaacaacagtcagatgactctgaattgaaagtgcttcaggatcgcctccacggtgtgaataagagtcttggaaacatggtcaaagccatcgagatggggattattacacccacaacccaggcaagaatggaggagctcgaggaacagaaacagcaactgcataccgctattgaacagttgaagttttccaagccccctatgattgagcgcgatgagtttcttttttggattgacacactgaagcaggacacaggtaactacgatttcaaagagaaactcattgacatctttcttaacgcagtctatctttacgacgacggatatatcgatatcgggacaaacctgatcaagggcactaaacgggttgactcaagcaccctggagcagctgtgcctgctcaatcatccatttcaatacgagctggaa

SEQ ID NO: 965 - DNA, 1815 bp, unidentified
  source 1..1815: mol_type = unassigned DNA; note = Bacteriophage uvig_188377 from the Index of /pub/databases/metagenomics/genome_sets/gut_phage_database (ebi.ac.uk)
atgaagaacaccaagaaaatcgtgagtttgattcttgccgtgtgcatgatagcgtcactcgctatatctgccagcgccgccaacactgtggacgcctccggtggaaccgggacgtcctctgttactttgtcaagcactgctgacggaagcctggacggcgacccgtccgcaaccactaagtggagcgtcggggagtataatcggctttccaaggaagacggcgacaagcctgaaagcgatagcattcagaaccagcactcaattaaccaaaagcacttggaatacctccgagagcatggagagcagattgaatccgtcacagtttacagtgacgatgggtacgcaggagggtccttcaacaggccccgatatcaggacatgattcgcgatatcgagcgcggaaagatcaattgtataatctttaaggacaacagtcggcttgggagaaattaccctgaactgggaagactgatggaagattacttcccacaaaaaggtgtgagggttattagtgtccttaacaatttggacagcgttaaggatccaagaggctactgtagtgccatcgtctcattctcaaacattgtcaacgacgactacattaggcaactgtccatcaaaatcaagtgcaccctcgcgatgaaacgagaaagaggcgaattcacaggcaattatgcaccctttggctatcaaaaagatccaacagatcaccacaagctggtggtagacgaggaacaagcggagatcgtgcggaaaatattcgattggtatgagggcggcatgtcagctaattctattgccaaacgcctcaacgccatgcaggtgatgacccctggcgactttaaaatcagggacggttgtaaaagttttatcactcacaaccagaaatctagtaagatccggacctgggccgtcaacacagtggctaccatcctgaagaatgaagtctacatcggcaatatggtgcaggggaaacacaagtcagcctcttatcgctcaaagaaaatggtgctgacagatgaatccgagtggaccgtggttgagggtactcatgaacccatcatttccgatgagcagtttgctatcgtccacgagaggtacgccaggcgcacgagagtagcacccgagcagacccacacatacatactcagcggacttatcgcttgtgggcagtgcggtcatactatgagcagagtggtaagccaaggctatgcaagataccgctgcctgactcggacctacgcacctgataagtgtcaatgcccatctgtcaaagaagactatttggaagaactgattctccagaccgtgcagagccagatccagcgacttgtggacgtaaaggctgtgattgatgcggcccgccagttcaaatcttcttccggtgccaaaaatgagtatatgctggcgctcaataaggccaagcgcgagcaggaaaggctgcaggacgctcagtttcatctgtatgacgatcttcagtccgggctgcttagacgggaggagtatgtgcgattccgggagcgatacgaggccgagatcgccgctcaggagacaaaaattgagcagatgaatcaatctttgctgcaactcaaggaggcaaggcagcaggatgacgcttttgtgagctttttccaaaaatacggaaatatcgagcggctggacagggatacggttaatcagctcatacagaaggtagtgttccatgataagcagaacatagaagtttactttagattcgcagatgaatatgagaagctgtgcagtttcgcaaacaccattcaagagcagacgacatctcagtttgccgctgcaaca

SEQ ID NO: 966 - DNA, 1413 bp, unidentified
  source 1..1413: mol_type = unassigned DNA; note = Bacteriophage uvig_192283 from the Index of /pub/databases/metagenomics/genome_sets/gut_phage_database (ebi.ac.uk)
atgatccccgctattgtttacgcacgagcgtccaccgaccaccaggaatatagcgtcaaggaccaactgaagtacatcaaagattgggccaagcatcacgggtacaagatcatcaaggtgtacatcgacgacgggatctcaggggcattcgtcgccaagagacctggcttcctttcaatgatcgaagacgtgacaactaatatatctggtgcaaaagctctgttgatctgggatagttacaggtttgcgagaaatatggttgaatttctgacctataaacaaatgatacggcagcacggcgttagtgtgattgccgttaccgagcccatagtggaagacgaagatgctcagctgtacatcgatgccataaacggtgctagcggcgaactgtacctgcgcaaactgagcaaagactccaaacggggactccgagctaaggtggtggagagacacgagcacctgggcttcgccccatatgggtaccgcatggaccgcaataccggccagcttgagattcagcctgaagaagcccgctgggtccaatatatcttccagtccgtaatagatggtgcgccctatctgcagatctgcgaggccctcaggaaagccggggtgaagacccgcaaaggctgcgcctggacaaatacacaagtgaagtatactcttacaaataagacttattgtggccttctcgaagtccatctcgatggcaaacacggcgtatacgacggaaagcatgagccgatcattgacagggagacgtttgacaacgtacaaaccattattgaggaaagagcagccaaacataagaagtatgctcggaacactaataagtataaacattggctgagtggacttatgagatgtccttactgtggcggggccctctcttacgtgcagggatcaggagggagggctgatcggtatcggtgtaacagcaggactgatggtaaaggttgtgtgaatacatcagtcaaagtaaacgtcgctgcagactttgtgctggatcagttgcagcagatctatgatcgaccagagattctttgcactcttaaaactacgacccctcagcccgctaaccgggttgactacgacgccgagataaaaaagctgcgaggacagttgacccgcgccaagaaggcttacatggaggagattgacacactggaggagtacagggagaataagacaagaattaccgccgccattgaagatatggaaacccagaagaacgctgcagcagcaggaatcatcaagtttgacccagcggcgttccagaagaaatgcctgtccgccctctctgtgctccaatctgatgtggacacggagaagaaagtggcagttagccacaacttgattgagaaaattgattgcgataaccttaacaaggtcttgacaatctatttctactcc

SEQ ID NO: 967 - DNA, 1629 bp, unidentified
  source 1..1629: mol_type = unassigned DNA; note = Bacteriophage uvig_180924 from the Index of /pub/databases/metagenomics/genome_sets/gut_phage_database (ebi.ac.uk)
atggcaggccagcctaagtataacactgcactgtacctgaggctgtcaaaagacgacggtaccatgagtgagagctcctcaatacagactcagaaggagatgctgactcggtactgtcgagagaatggtttcgcgataagccagatctacatcgacgatggctggtctgggaccaacaccaacagacccagttttcagcgaatgctttccgatatcgaagatggcaagattaactgtgttgtaaccaaggacctcagccgacttggacggaattatctcgagactgggagcttcacagaaatctacttcccggagcacaacgtgaggtacatagcagtcacagatggcgtggacaccgcaaaagggtctacaatggatatcacgccctttaagaatctcctcaacgacatgtatgcgcaagacatatctaagaaaattaagtcctcactcttgaccagacagaaacaggggaagttcattgggactaaagccccgtatggatatgtaaaggaccctgccgataagaaccatctgcttatcgacaagagatttgcaccaacagtccgatacatctttaagctggccaaagacgggattggtataacacagattgcccgacagttgcgctcagaaaaagtgcctagaccagtcgccgctgccgccgaggaattggaatgttacgacagatatctgacaacagaagaatcaatctacaaatggtctatgggctccgtcagggagattctgaggaaccctgtttataagggcgcagtcaggggacagaaacggcccaaaataagcttgaagagcgagaagcgcaaaccagtgcagtctgctggaacattcgtcgtggaaggtatgcacgagcccatcattgatcccgaagaatgggagcttgtgcagaggttgatcacctcccgcaaaaaaacgagaaaagtcgagaaaaagtacgacaacatcttcagcggcttggtaaagtgcgccgattgcggctttgccatgactttcactaaggctcaccggaactggaattctgaaaatatctacgccaattacgattaccaatgtaacaactatcgcatggagggcaagagtgtttgcacccaccaccggattaccgccctgaacctctataatgcagtgctggccgacattaaaagactcgcttgcgaggctctgggggacgacaagcaaatgatcagtgctatcgcggctcgactcggaaaaagtgagaaggaaaatgtgcgccaggccgagcgggagctgaaacgggcgaataagcggctgtccgaattggatcgactgttcgccaaactgtatgaagagcatgtgaatggcaaggtgaatgagagaaactataattctctcagcgccacctatgaagctgagcaaaacgagttggagtccaggatcgctgagcttaacgctgcaattaagactgagcgcgaaaatgacgagaatgcagtgaattttgtggatcttattaaacagtacgctgacatcgatgagttgacgcaggccctgctgaacaccctgatcgatcgcattgaagttcatgaaccagaagatctcgatggagagctgattcaaaagttggacgtgtactacaagtttgttggaaggctggat

SEQ ID NO: 968 - DNA, 1497 bp, unidentified
  source 1..1497: mol_type = unassigned DNA; note = Bacteriophage uvig_129321 from the Index of /pub/databases/metagenomics/genome_sets/gut_phage_database (ebi.ac.uk)
atgagtgctaagaccgatcatcgacccgattttcagaggatgattaaggactccgccaagggcctcttcgatgtcataatagtctggaaactggatcgcttcgcgcgcaatagatatgactcagcacactataaagctctgctccggaaatatggagtgaaagttctgagtgcgacggaaaacatcagcgagggaccggaaggcattatcttggaatctatgctcgaggggatggctgagtactactctgcagagctgtcagaaaaggtcattaggggtcacactgaaaacgctttgaagtgcaagtataatggcgggactccaacctttgggttcatcatcgataaggagaaatgctaccagattgatccccatacagctcctgtggtgcttgagagttttacaaggtatgccgacggcgcaacgatgaaagaagtcatgcagtacttggtggagagcgggtttaccaccgtgaggggaaggaaaatcgaccttaacttcatcgcgcgcctcctgaaaaatcgaaagtatattggagagtacagttacagacacattgtaacgcccggtgggattcctgccattgtccctcaggatctgttcgatagagtccaacagaggctggaagccaataggaaggccccggctagacataaagccgaagatgactatctgttgacaactaagcttttttgtggcacctgcggtgccatgatggtgggagagtccggcacttccgcttctaaagggcggaagtatcactactaccggtgcgtgaacacaaaaaaacacaagacttgtaacgcaaaacataaaagtgtacggaagatccctctggagaatgctgtcgtttcagccgtgatggcaaaggtaatgaacgatgactttgttgaatacatcgccgacagagtgcttgaaattcaaggtatggaatcttccgagctgcctgccctgcggcaacagcttgccgaaactgagcgcggaattgagaatatgctcaatgcaatacagatgggaatcatcaatcaatctacaaagcagcgactggatgaactcgaagagaggaaaaaggagatagagcttaggatcatccaggaggagataaagaagcccatgctgtcccgagaagacgtgaccttctggatttgtagatttcgcaagcttgatgtttcccgacttgaagagcggcggcgcctcatcgacagcttcgtgaacagcgtaaccatcttcgacgactacctcctgataacctttaactacaaggacggcgagacaagacttgacttcaaagatatcgagtcctcagacttgcagagcgtgggcggccgagaccggttgcgcgtggacattccattccgcatctcaacctgctttgttctcctgagcattcgatacagacggctgccaggtatgccatcctctgggcagcagagcagctatgccaccggcacagggaaggatagcgcgtgtggccacactctgtctcccgcattcaga

SEQ ID NO: 969 - DNA, 1557 bp, unidentified
  source 1..1557: mol_type = unassigned DNA; note = Bacteriophage uvig_127383 from the Index of /pub/databases/metagenomics/genome_sets/gut_phage_database (ebi.ac.uk)
atgttttatgcaggtgtctatgcgcgcgcgagccgagaggatggcgacagaacagagtctgaaacacttgccaatcagagggagctcattctgaacttcctcgagaagaccgacgacattgaagtctttgatttctacaacgatgacaattatacaggtaccaatttcaacaggcccgcatttcaacgaatgatggccgacgcttacgagggtaagataaactgcatcatcgtaaaagacctgtcaaggttcggtcgggactatatcgacgtcggcaactacattcagcgcgtgttcccaaagatgaagattcggtttatcgccgtgaatgataatgttgatagctttaaaagacctgagtacgatatattgatgccagtgaaaaatatattcaacgaacagtacgcccgcgatattagcaataagattattagcaccgtacgctctaagcaacacagtgggaagttcatcggagctttcgcttcttacgggtatgctaaggaccccaacgataagtataaacttgtgatagatccatatgccgcagaagtggttaggaagatctacgcactgttcaataacgggatggggaagatttctattgcaaaaaaacttaacgacgaaggaatcctttgtcccagtgagtacaagaaagtgagcggccagaaatacaggaacagcaaaaagttggaccggacctcatattggacctactctacgattaaccacgttttgaggaatagaatctacgtgggcgatatggttcagcatagagccaaccatagtaagtttgactatagcggacgggaagtggacaaaaatgactggatcatcgtggagcacactcacgagcctatcattcaacgagatatctgggagcgaactcaagatctcctgaagcgacggggccggaccctgagactgaaggatcgcgtctcactttttgctggatacctggtatgtggagattgcgggcgcgccatggctaaagtcgagtacaaagaccagctgcagtatatttgcgggacttataagaactgctcctctaaactctgtacaaggcacagaatcaaccacgatactctcaagaacattataattgccgacattaatttgatactctccaaagtggaaagccttaatgagatgatcgaagacagagagcaaaaaaatcagggaatctccacctccgacaagaaaactcagttgaatggcctgcagatacagttggacaagctcaaggaaaggaagaaatcactttacgatgattacaaggaaggcctgattgacaaagaggagtatattggctatagaaacgagtatgatgggcgcatatctgacacaaacacactgatcagtaaactgggcgaagaaccgaatgaggagacctcaccttccgaaaactcattcatcagccagctcaagaatacttccaaggtcaatgacatcaaccggatcatcctgtccacgttttacgataaaattgtgatctacgaggacaagaagatagaactgcggtacaagcattcccagatcatcgagcatcttaaaagtctg

SEQ ID NO: 970 - DNA, 1563 bp, unidentified
  source 1..1563: mol_type = unassigned DNA; note = Bacteriophage uvig_184013 from the Index of /pub/databases/metagenomics/genome_sets/gut_phage_database (ebi.ac.uk)
atggacaacaagctgaaggttgtgctctacctgcggtactcaagccacaaacagaacgaacagagcattgaagggcagcagaggatatgtgaggactttgctaagcagcagggatataatattgtggatatctacattgatagggcaacctctgcgaagaccgatcacaggcccagcttccaaaaaatgatcgccgatgccgccaagaatcaatgggatgcaattctcgtgtacaagctggacagatttgcccggaataggtacgattcagcaatctacaagaccaaactccggaaatacggagtgtcagttctctctgcgatggaaaatatttctgactcaccagagggtgttatcctggaatctgttttggaaggaatggccgagtactattctgccgacctcagccaaaaggtgactagaggcatgctcgagggcgcccacaagtgccagaccaatggagtgagaatctatggttacacagaaaccccagataagcattacgccattgacgagcatgccgcccaggcagtccgaactatctttaaaatgtatacggctggtgagtaccccaaagaaatcatcgcctatctgaagtcaaacgggtacaagacctacgagggcaaggacttctcctattcaaaaatccaacgcattctcaatgatgaaagatatactggggtctacaagttctccgacattgtaatcagtggaggcatccctgccatcattaatacagagacattcaacaaggctaaacagcgcgcaaaagctaatcaactcaaaaaaagcacgcagaaggctaaagtgaagtatatgctgacttttaagctcttttgcggaacttgtggcgcagctatggtcggcgagtctgggagatccaaaaacggcaacacatataattactataagtgctctgcccacaaaaagggctccgattgcaaagggcgaaccatccgcaaggaatacatcgaggacattgtcattaacgagatctacgataacatccttatgcggaaggacataatcgagaagattgcggtgaggattagcaaaatctatatagatgaggcaaaacagaacgacaacagtgaacatcttaagaaggaactggctgaaacggagaaaagcatctccaacttgcttaaagccatggagcaggggataatcaccaattccaccaaggaacgattggaggagttggaatatttgaagctggatctgaaaggtgcacttcaaaaggctgctatctactccgcgcctaagataagcaaacaggagatcgtcgactatttcagtaacatcgccgacggagacaaaacagacatgaaatatcgccagaaactggtggatatgttcgtgaagtccattcacctgtatgacgataagatcattatagcctttaactacggcgctcctacagatgatacagacgacgataagaagttcaaaaataagatcagcgagataccgatagacataagtgagtgttccgacattaaaagtacagggaccccctctggcattcggactctggacactcttattaagagtcaggtactg

SEQ ID NO: 971 - DNA, 1686 bp, unidentified
  source 1..1686: mol_type = unassigned DNA; note = Bacteriophage uvig_538870 from the Index of /pub/databases/metagenomics/genome_sets/gut_phage_database (ebi.ac.uk)
atggctaccaataagaatattcaaggacaagaagtgaaaataaccgcactctactgtcgcctgagccaagacgataaccttgaaggagaaagtaacagcattagtaaccaaaagaagatactcatgacttatgcgaaaaaaaacggttacctccatcctcagttctttgttgacgacggcatttctgggacaaccttcaaccgacctggtttccaggagatggaaagcctgatcgaggccggcaaagtatctacagtgatagttaaggacctgtctaggtttgggcgcgaacacctgttgtgcgggcactatactgaaatcgtctaccctactctgggcgtgaattttatcgcgatccaagagaatgtggacacaaccaaagggatgggtactgaaatgatgccatttcacaatatctttaacgaatggtatgcagcacaaacctccaagaagatcagagccgtgaacgagatgaaagctagcaaggggatgaggataagctccacggtcccctacggttacaagaaagtggaggggaataaggagcagtggtatattgacgaacccgccgccgaaattgttagaaagatcttctcactgtgcataagtggcaaggggccaagccagatagcccgacagttggaggctgagaaagtgttgactccaaccgcatatttcaattcagttggaaagaagacatccaatccgatgccggtgaacatctatcactggcgggaaaatagcattgtgcacatcctcgagaatcgacagtacacaggctgtaccgtgaatggcaaaagtacgactgtatcttataaggtgcacaagacagtcgagcggcccgtggaagactaccaggttattccaaatacccaggaggcaatcatttcagaaaatacctggctgcgcgtacaggaacttcggaaaaacaagagaaggaataccgctacaggcagaaagtctctcttttccggccttgtgtactgcgccgactgcggctttaagctgcacttttgtgccagcaagagtctcaagaaaaatcaggagttctggcgctgcagttcctataaggacggtaggggaacttgtacaatccatttcatccgggatgtcgtcctggagaccatcgttaaagaggccatctccgagcttgctgattttgtcaggtgttataactccgcgtttttgtatctcatctccgagaaaaaaggagctgaatctgtttgcagggaaaagtccctgcgcgtaaaaactgaaagcgctaagcagagaatctcagatttggataagctgttcagtagaatctacgaggacaacattctgggaaagctttctgacgagcggtactcacgcatggccaacgagtacgaagccgaacagaaaaggctgatttctgaggtggaggaaaacgagaaatcacttattgagctgcagaaacagaccgtggatatgaaaatgctgtaccagggacttatggagttcacggagatgaagcaacttacacccacagtcgtgaataagctgatcgagcggattgagatacataacaacgagaaaaagcattcacataacaacgtgaaggtcgatatctacttcaccgctgtaggcctcttcgatattcctactgagcagcagcttattgatacgatggaacgagtcaaacagaagaacgcagagaaaagcgcc

SEQ ID NO: 972 - DNA, 1332 bp, unidentified
  source 1..1332: mol_type = unassigned DNA; note = Bacteriophage uvig_254484 from the Index of /pub/databases/metagenomics/genome_sets/gut_phage_database (ebi.ac.uk)
atgaagcgggctgtcatctacatcagggagagtaccaagtttcaggatccagacacccaagaaaaagagtgccgcgcatattgtaaggaaaacgatttccagatcgtgaagacttaccgggacatagccagtgggaaaaaaaatgacagaaaaggcttcttgcaaatgctcgatgacttggatgaggatcggttcgacgtgctggtgctgtgggaactgtctcggagcaccagagattttatcacttataagacactgctcgacactttgattcagaataataaggaactccattccctccaagagggaatactgacacaggacgacatagatgttgaattttccaacgacattagagctcttatcaatgcccacgagcgcaaaagggtgggcaggcgcattaagtttcgaaagaatttcaaaactcgggaaggttactggactaacggacaggccccgtttggctataagctggacaatggggttctgattcccgacgaagaagaggcacccgtggttaaagagatctttgagttgtttatcgctggggcaaccattagagagataggggagaaattcaatattccatggaggagaatctcccgagtgctgaccaacgtcgtataccttggcaaacttaaagtgaatgagacggagatgataaacgataagagagtccgcaataaggaggtcgagattattgaaggtaaacatgccgcgattattaacgaggataccttcagcctcgccaactcattgaaacgaaaaaagcccaataagtataagaacggcaagttcatcctgcctaacgtgtactgttggaccggagaaaggatgtatccttttacttcattgaaacaggaatactattctacgaagttttctaggcactacgttgaccgagagtttctcgaaaagattgtcctcgacaatatcctgaatttcaactttgacacactgaacgagaatatggaggtcgtagattacacagagcggagagaattttacaagaaggaagtcgagaagctgaagaacaatgagaagaaactcctcaagaaatatttggacaacgtaatcggagaggacgtgttcgataacttcatgcaggagaacaagaagaatatcatcgagttcgagaagaagatcagcgaaatcgaaaaacttatccttaacagctccaaaaaagaggataacgctaagctgctgaaggaatacctgaaagcccttaaaaacacaaaagatagggtgcaattgcagcagatcctgaacattctcatttcagaaattcgcctggttaataatttccgctgcgtggtgataaccacaatcttc

SEQ ID NO: 973 - DNA, 1707 bp, unidentified
  source 1..1707: mol_type = unassigned DNA; note = Bacteriophage uvig_295592 from the Index of /pub/databases/metagenomics/genome_sets/gut_phage_database (ebi.ac.uk)
atgtccaaaaaacagattgatatctaccgcaccgggatctatctgaggctctcacaaggcgacgaagacatagatggactcgagaaaaaggagagtaatagcatctcaaatcagaagcttctcttggaaggattcatcgatgctcatgatgatttgaaacttgtagacatctttatcgacgacggatattccgggagtaacttcgagagacctgaatttcataggatgatgacttctatgaaggccggtaatctggactgtattatcgtcaaggatctgtccagactggcacgcgaacggataggggccgatgagctgattcagaagacgtttaagaaatacaacgtcaggttcatcgcaataagcgagggttacgactcccttactgctagcagctccgagacgcataccatcattcccttcaagaacctgcttaacgagcagtacaacggggacacaagtatgaaagtcagaaccagccaaggcattcttcgaaggaacggcttgttcatcggagcctttgcaccctatggctatcaaaaagccgaagataataagaaccacctggttctggacccatacgccgctggcgttgtacaagggattttcgctaagaagctctctggaatgtctgcatcaggaattgcaaaaatactcaacaagaattgcgtgctggccccaagcgagtacaaagctaagtgtggcgagaagtatagcactagtttcaaaggggccggccagtctaagtggtctgcccagactgtgtcccgaattcttaagaacgtggtctacatagggacactcgcgcaggggaaaagaacaacagtgtctcacaaggtgaaaaaagagattgcggtgcctgagtgcgactgggtagtcgttgaaaacgcccatgaagccatcatctctagaatggactttgacgcggtgcaagtgctcatgtctagggatacaattgctgtggccggcaagaacgagagttacatgtatgccggcattctgtattgcggtgactgtggcagtagcatggtacaccgaaaggagtcatacaagggacgggagtacatcaactacatatgctcaaattataatcgcaacggaaaagacgcttgttcccgccactgtattcgagaggaagatctgaaccagattgtgctgggtgagctgcaggggtacatcaactccatgtgcgattgcgaaaaagtgctggctcacctcgatgaacttaatgtgaattatgacgaagctgtggcacacgacaaagaaatcgtcgcccttaagcaagagctgaccaagtgttcagccttcaaggcgagcttgtatcaggatctgcgggatgaaatcatcagcaaagaacagttcacccggtatcgcgaggaattttccgccaaagagcgggagctcgagcaggctatccgagaacaggaaactataatcagggatatctacgagaatggcatagccgtcgccaaagatttggagcagtttcgcgagggcctggttattggtaatttggacagagtggctcttttttccttcatcgatcggattctcatctacgacgactttcgggttgagattgtctttaagtataggcaggagatggaaaaggttgcaagactgttcgacgtggcaaatgaaaagaatgcagagcccgtgtacaccatggtcgacggacttccggtgctggaattgaaggaggcagtt

SEQ ID NO: 974 - DNA, 1620 bp, unidentified
  source 1..1620: mol_type = unassigned DNA; note = Bacteriophage uvig_280868 from the Index of /pub/databases/metagenomics/genome_sets/gut_phage_database (ebi.ac.uk)
atgagaaagaaagcaaacatcgccccggaggcccgggctgtcatctacgcccggtattccagtgccaaccagagagattgtagcattgaacagcaggtcgctaagtgtagagaactggctgctaggctgggtctggcagtcattgaggtgtatgaagaccgggccatctcaggtaagactgacagaagaccttcttttcaacgcatgatgaaggatgctgaccgaggcatttttgatattgttcttgcctggaagagcaatcgaatgggcaggaatatgcttcaggcaatgactaatgaagaacgactccgcgacaacggcataaggaccatctatgcggaggaagattttgatgataccgctgccggaagattcgcactgaggaatatgatgaacgtgaatcagttctacgtagaaaacatggccgaggatattagccgggggttgatggacaacgcttcaaagtgtctttcaaacgggagcctgcctcttggatacaaacccggcgaggaccacaaagtggtactggatgaggcagaggccgccgtggtgcaggaaatctttacaagggtcgcatgttatgaaccctttatcgatattgccagggacctcaaccgacggggcataaaaacgaaaaagggggccgagtggggccgctcctcattccataccatttgccgcaacgaacgctataggggcatctacatctatcgagacgtcagagttgagggcggaattccacgcataatctccgacgaactcttttacaaagttcaggaggtactgaaggttaaaaagaatccacaggggcgaaggaaacgctctgggtatgaagagtacctgctcactggtaagctgtactgcggacactgtggatctccgatgactggaattgccgggacatctaaaaccggcgctatgcactattactatacttgccagaagcggcggaccgaacattcctgcgacaagaaggcggtccgccgagaccagattgagaaagctgtggcggtcgccatccagcagcaacttctcgatgacgagactattctttggatggtggatcaaacaatggcgtataacgcaaagacggagatagagtaccgcttgcaagggctgcaggatcagctgaatgcgaataagacagctaccgctaatcttttgaaagccatcgagatgggtattatcacagacactaccaaagcaagactcctcgagctcgagcaggaacagggctgcttgcttgccaaaatcgacgccgcaaagagtgagatggtgcctatcgaaagagaggacctgatcgccatattgacgagatacaggaagggaagtttggatgacaagaagtacctggcagctctgtttgatacattccttgtgcgggtggacctgtacgacgatcatctgaaaataacattcgatccaaccggtgggaagaccccagtggatatccccattggagtagaggattctcctgagagccccggggacagccctgactccgcagatttcagcgctccctctcaagacgccgaaaaagtgaggtttgactccagtcagctccaccaaaacccacggaccttcgtgcggggcttcttcgtgcttgttatctgcctgggc

SEQ ID NO: 975 - DNA, 1689 bp, unidentified
  source 1..1689: mol_type = unassigned DNA; note = Bacteriophage uvig_428055 from the Index of /pub/databases/metagenomics/genome_sets/gut_phage_database (ebi.ac.uk)
atgcgggaggtgcaggtcctgcaagctacaaaaactgcaccgaatagcaggggcaggaattctaactacgccgtacaaatagatcgaattcgagtcgctgcatattgtagggtgtcaaccgatggcgatgagcagctgggctcattcgagtcccaaaagctctattatgaggagaaaattcgcaagaataaggagtgggcaatggccggtatctttgccgatgaggctattaccgggactaagatcgacaaacgggaggggttccaggaaatgatccggaaatgcctgaacggggaaatcgacatgatcctgacaaaaagtattagcagattctccagaaacacgcccgatactataaagtacgtccgcatgctgagagataagaatatcgcgatcatgtttgaaaaggagaacattaataccctggacatgaatggtgagatgctgctcacaatcctttcttccctggctcaggaagaggtggaaagcctgagttctaacgtaaagatgggccttcagatgaagatgaagcgaggcgagctggtgggattcaatggatgctttgggtacgactaccaccaggacaccaaaactatcacagtaaacgagactgaagcagagaccgtgaggctgatctatgatatgtacctgcaaggcaacgggtgtgggaccatcgccaaacgcctcgttgaactgggaattaaaaataagaggggaacagtcgaatggcacgatcatggcgtgatggggatgatcaaaaacgagaaatacaaaggagacgtcctccttggaaagactttcactgttgaccccattagtaagcgaagactcgctaatatgggggaggagaatcagtattatatccgcgatcatcacgaggccattgtgtcccgggagatatgggacaaggccgaggaaataaggctcaaacgcgctaagcctaagcttatgcagaccacgggcaatagagagcggtacactcggcagttcacctttagctcaatgttggaatgtggctattgtggtcataaactttccagacgaacccgccaccaaacaacaaccaccaaaaagccagtctggcagtgtatgaatgccaccaaaaacggcattgataactgccctaactgcaaggccgtggatgaggttatcatcgaaaacgcgtttctggaggcctttagattgctcgccgacagcttcgacgacgtgctccaaagcgtgctgaatacaatcgaggacattctgaaggacgatacagagctcaaacgggtcaagcagctcgaaaaggacatttccacaatagaatccaagaaatcacgactgacagacctccttatcgacggaaagatcgaacaggaggactacgacgaaaaaaagctgtctttccagaggaagctccacaagattacggaggaaaaagcgtacctcgaggaaaacattggacagcagaaaaatatcagccgccggatgagtcaactcagacagactttggaaaacgagaacgcattggatgaatttgaccgcattgtttttgaatctatagtggagaaagtgatagttggtggctatgatgctgaaggcaatccaaccccctacaaactcacgttcgtgttgaagtgcaatcagaccttgaaggtagataacgcaaaggccgattacagggctaaccagaagggtaaaaaggtgtca

SEQ ID NO: 976 - DNA, 1539 bp, unidentified
  source 1..1539: mol_type = unassigned DNA; note = Bacteriophage uvig_565627 from the Index of /pub/databases/metagenomics/genome_sets/gut_phage_database (ebi.ac.uk)
atgaaacgaataaccaagattgaagccgcagacacgggcgccgtgagaaaactgagagtggctgcttatgcaagggtatccacggatagtgaggaacaactgatttctctggatgcccaaaaaaatcattacgaagtccttatcagaagcaggcgcgactgggaatatgccgggctgtattacgacgaagggattagtggaacaaaaatggcaaaacgcgatggcctgctttctatgttggccgattgtgagaggggactgattgactatatcatcgttaagagtatatcccggttctccaggaacacagtagagtcaattgagaccgtgcgaaagctctgtagcatgggcatctacattctcttcgagaaggaaaacatcgacacagggaagatggagggcgagctgcttctctcaatcctgagtagcctggctgaaagcgaaagcagaagcatttccgaaaacgaaacctggtcaatccagaaaaggttcagaaacggcacatataagattgcataccctccatacggttatgactacattgacggcgagatggtggtgaacccagaacaatctgagatagtgaagtggatttttgctgaggtgctgtcaggaagctcaactactcacatagccaacgcgcttaatgctagggggatttctaccaaacgcggaggccgatggactgggcacacaatcaacggaatgatcaaaaacgagaaatacaccggagacgtgatcttccagaaaacctattcagatgacacttttacccgcagaagaaataacggagagcgggatagatttttcgtccaggggcaccacgaggcaattatctcccatgaggattttgatgccgccaatgatatgatcgcccgaaatgctaccgaaaagggtatctatgctgactcccgcaagtaccaaaatcgctatgcattctccgggaaaatcatctgtggagactgcggcgccgtctggaagcggcggaaaatttctgggtacttcggttacgcatgcacaacccatcttgaagataaagacgtttgcggcatgaaaagtattcgggaggattctattatggctgcctttgcgacaatgatgaataagctgatattcgcacgggacaaggtcttgctgcccttctctaacgccctcaagaccgccgaacgcgcagagtatctggacgagttcactgcgcttgaggaaggtctcgagaaaaatcttcagaagaggcagcagattactcagctctttacaaagggttatctcgatcccgcggtttacgctcagcagaatgatgaacttctctccgccagcgcccgcctgacagccgagaaggatgcaatcatcgctaagataagcggcggcagccggcagaagaaggctttggaggacatcttgcactacacctccggggcctctatgttgactgagttcgacgaggacctgttcacgaggtttgtggaccgagtgatcgtttacagtaggactgagatcggatttgatatgaagtttggccctgtctttagagaacggata

SEQ ID NO: 977 - DNA, 1698 bp, unidentified
  source 1..1698: mol_type = unassigned DNA; note = Bacteriophage uvig_118880 from the Index of /pub/databases/metagenomics/genome_sets/gut_phage_database (ebi.ac.uk)
atggccgaaaaaataatgcaaggaattaaacaaatctccgagctgatcggtcaggcagtcaaaaaaagagttgtgtgtttgtacagagtgagtaccgttgggcaggtcgagaaagacgacatccccatgcagaagcaatattgcagagaattttgccgcggccagagcggatgggaaatcgtcaaagagttctccgagaagggagtatctggctttaaggtcagcgccaaagatcgggatgccatccaggagattcagaaaatggctctgaaaggcgaatttgacattctgctggtgtttatgtttgataggctggggcgaagagacgacgagacccccttcgtggtggaatggtttgtcaagcaaggcatagaggtgtggtctgcgatggaaggacagcagcggttcgacacccatgtagataaactgctgaactatatccgctactggcaggcctcaggcgaatctataaagacgtcactgcgcgtgaagactagactcgagcagctgacccaggagggctactatacgggagggcgggttccattcggttaccaggcagtgaaacggggtaggatcaataagaagaaccacgaggttcgcgacttggccattgagccgggagaggccgaagtcatgaaaattattttccagaagtatgtgtacgaggggtatggggccctcagactgcacaggtaccttatggaccagggactgaggactaaggacggtaagacaataaccatgggtataattaatcgggtgatcaagaaccctatctgtatcgggattatacaaaaaggagagagccaatccagcgtgctgcctgaattgaagatcatcgatgaggaagtctttgctagggcgcaggaaatcgtccgagagcgggtggtgccccaaagtgaggtaccccttactactcgggggcagagccttctggtgggaaacgtctactgcggccactgcggcgctaggctttctctcgctaccgccggcaggaattacaagaagaaggatggcacagtagtgaaaaagacatatagctgttacaagtgctacaataaggcgatggctgccgaaaagtgtgacggtcagacaacatatggggttagtaaacttgacaacctcgttgatcagatcattcatatccagttgcagagaatccagaaagcacctccacaggccctgattgagaagcagcgcgatcgcgaggctgaacaagtgaaagcgaaagcaaagcttctcagggagcagtaccaacagaaacaacgggactatcaggatctcaaagaagagacacttaaagtggtgcgcggcacgtctcgactcaacgtagatttgctcaataatctcatcgaagagaccactgttcagatggcagaacttgaggggcagattcgcacagccgaagccgaacttcgagaggtactgtccggcgccgaacaggtcagacaagagtatgctcagctgatggattgggccggactgtacgacaattgttcattcgaggctaagaagatgattgctgcacagttcgtcaaggcagtgcgggtgaagagaggctacgaggttgacattgagttcaacgtgtcatttgaggaattccagaccttgtatctggaaccagaatccgaggaggatagacgatctaggagcgcaacttatctgtcccttgtggaaaagagtgggcaagctggc

SEQ ID NO: 978 - DNA, 1584 bp, unidentified
  source 1..1584: mol_type = unassigned DNA; note = Bacteriophage uvig_124951 from the Index of /pub/databases/metagenomics/genome_sets/gut_phage_database (ebi.ac.uk)
atgaacaacaaggcagtcctctacctccgcctgtccaaagaggacaggaataaggttaacaagggagacgattctgagtctattatcaatcaaaggatcatgttgagcgactatgctatgcgccataactttcaggtggtgaagatctattccgacgacgatgaaagcggactgtacgaagaccggcctggtttttctcaaatgatgcaggatgctgagcggggcctgttcgatattattatcgctaagagtcagtctcgattcactcgaaatctggagcatagtgaaaaatacctccaccataaactccccctgtggggcgtcagattcatcggggtggtggatggggtcgatacaatggatgagaataataagatgacaaggcaggtgaaaggactgaccaatgaatggtactgtgagaccctctcaaaaaatgtacgctctgtgttcctgagcaagatgaaccaagggaagttcgtggggagcagctgcccttacggctacatgcgggatagcgaagatcacaaccaccttatcatcgacgagtatgcagccaatattgtgagaaaaatctttagattgtacctggagggcaacggcaaggcgcacatagcctcaatcctgtcctctgaaaacatcctcattccaagtctctataagaccagggttctgcagcagaactattacaatagtaaactgaaagatactactaagacttggtgctatcagactatccacacgattcttaacaatcagacgtacctgggcaagatggttcagcataaggatatcaaaatatcctacaaagacaagaaaaagagacgcctgccgaaagagcagtggatcattgttgataatacacatgagcccatcattgaccaggagatcttcgaccgcgtacaggccattcagaaaatcaagcggaaatcagtcaacaccgaatatagcgacaacatttttgctggtattcttttctgtgcagattgcaagcacgccatgaaccgcgcttacgccaaggagaataagaagggatcaatagggtacatttgtaaaatctacaagaccatgggcaaaaagcactgcccatcccacatgataaaaaatgaggagcttgaggaggccgtgctgagctccattaaaaatgaagcaaggaaaattttgacagaagacgatatttccgacctcgacaaggtacaaaagatcgactcccgggagcagttttacaaaaagcagatacagatcgtcgatgccgaactggagaagtatcagaagttcaaaaaaagagccttcaccggctatatggaggagatgattacaccccaggagtacagatcttatgtcgctgagtacgaagaggaaatcagtaagctcgaacgacaaaaggaggagatcttgacaaaacttgccgacgaaaattcactgcaaaaccagcacgacgaatgggtcgaagcgtttaaggactatatcaacatagagaagttgacccgagatgtggttatagaactcattgaaaaaatagaagtgcatgaggatggaggtcttgacatctattataggtttcggaacccttttcaagtggcaaac

SEQ ID NO: 979 - DNA, 1695 bp, unidentified
  source 1..1695: mol_type = unassigned DNA; note = Bacteriophage uvig_295592 from the Index of /pub/databases/metagenomics/genome_sets/gut_phage_database (ebi.ac.uk)
atggctcgaactaaaaacaggttcaacgcagtgcagatccccgagccagccactgcagacattcccgccaaacagaggaagagctttcgcgtggcgctttatgcccggctctcagtcgagttgaaatccagaccttccgaatctatcgcaaaccagctgagcatcctgagagagttcattcgagacaaggccgaattcatcgagtatcaggagtacgtcgatagtgcagtttctggcacttccttcgatcgaccagcttttgggcagatgatggatgacgtccgcgagggtaagattagttgcattattgtaaaagacatgagtcgctttggcagggattatatcgaggcctccaactacatcgaaaccatcttcccattcttgggggttaggtttatctctgtgagcgaccatttcgataccgaggcggagtttaatcagaacaaggcgctggaaatcgctctcaagaatctggtgaacgatatgtatgcaaaggacattagcaagcgggtgtccgtgtctaggcgcctcgatatggagcggggcaagtttaccggttcaaatgcaccttacggctacaaggtggactctggcgacgccttgcgaaagtatgtgattgatagggctgcagccgcagtcgtaagacagatttttgagctcgcagccgacggcgtcacccttagggagatagccaaagccctgcaggagtacagaatagcccttcctggggattacctgaagacaggaaacttgtacgtggaggagggcgctgaggccaaagcgtggtaccctgggacaataagcaatattctcaagaatcaagcctatatcggaaacatggtccaagggaagagaagaacgagtctgtatgacaacgaagccagacatgcaacagatgaaaacgattggatcgttgtggaaaatacccacgaagcaatcgttgacaaggagttgttcaacaaggtgcgagctgtgatggacaaaaaagtcgaagaatccatattcacctccgatcgcgggaaaaatttgcccattaaggaagacatctttgccggtatactgttttgtggtaactgcggcagaaggatccccctggcttcccgcatactcgaaaaagacggagtgctcgagcggcaatatttttacagctgtcggtataactacgatttcggagggaagcagtgcggatgcacaattatggagcaggacctgattaaagtggtacacaatctgctgactacgcagatcgcggttcttaccgacagcgcccggacagaagcctctatgcgcggagtcatggatcgggaacttaaaaatcacgacatgcgcatacagaagatccaaaagcagattgacaggaagaattatgaagagtcaaaggagtaccagtcatacgtcactggtgagatcaccaaagctgatttcaagtgtcgccaagaaaaaaatgccgatgctattatgcgcctgagaggacagatctctgatgaagaagctagtcggaggcgcgtgaaacggttttgtgagaaaaagatccaatggctcaaagctatctaccgattccagagcgaagtgacacttgacaagaatatgatcaaaatactggtagactcaatctacttgtacccgggcaaaagattggttattaacctgaatttcaaggacgagtatgctcggatggccgatggcgaggagatt

SEQ ID NO: 980 - DNA, 1431 bp, unidentified
  source 1..1431: mol_type = unassigned DNA; note = Bacteriophage uvig_30637 from the Index of /pub/databases/metagenomics/genome_sets/gut_phage_database (ebi.ac.uk)
atgaagatagctgctgcttatctgcgggttagcaccgaagagcaggatgagtacagcttggattctcagctcaagctgattcgcgagtacgcgaagaacaatgactttcttgttccagacgaattcgtgtttaccgacgatggtgtgtctggcaggaatgcccgcaaaagagagtccttccagagaatgattgctctggccaaacagaaagaacctccctttgactctattctcctgtggaaattcagccgcttcgctcggaaccaagaggaagcgatcgtatacaagagcttgttgaagaaggcaggcatcggggtcatcagtatctccgagcctctgcctgacggaccattcgccagcttgatcgaaagaattatcgaatggatggacgaatattattctatccgactggcaggtgaagttaaacggggaatgatcgaaaaggtgagccgcggggagcccgtctgtcacccagccttcgggtacgaccttaaggaaaagcgctattacccaaattcagacgccgactgggtccggtgggtgttttcttcattttcctccggcatgggcatgagacagatcgcagcccatcttgctgatcacggagttaggactggccggggcggcctccccgataacaggttcgtggagtatatgctgaataatccactctatattggaaagataaggtggtcacccgaagggagaaaggcctctcggaggaaatatgatgacccctcaaacatgattgtcgatggcctgcacgatgccattattgatatggaaacatgggagaaaacccagggtcggctcaaacagcttaaagcagcatacagaaagcatcagcgacctgggcaaccggttcagttcatgcttaagggtttggtgcactgctcatcctgcggggccacgctggtgtaccagtcactggcatgtcctagtctgcaatgccacaattataacagaggaaagtgtaaaactagtcattccctgagcgtgagtaaagctaacgctgccgtaatcagtgcactcgagtatagcgtcgacaacctggattttgccttggacccggacgagaatacaaccaaaagggcctccgaacgcgattacaagaagcttataagtgccgagcagacaaaactcggcagggtccaacaggcctacgaggcaggaatagataccctcgaggagtacgcggagaagaaacgaagaatcttggaggaaattgagtccctgcgacagcaggctaacgaagaaaaaaatgtgcagaaatttgaccctatcgagtacgccaagaaggtgtctgctgtgttggagctgattaagaaccccactgtggcggagaatgcaaagaacgaggctctgaggagcatcctctcccgcatcgtatacgagaaaaagaagcaaaacttggccctgtatttctacata

SEQ ID NO: 981 - DNA, 1584 bp, unidentified
  source 1..1584: mol_type = unassigned DNA; note = Bacteriophage uvig_230232 from the Index of /pub/databases/metagenomics/genome_sets/gut_phage_database (ebi.ac.uk)
atgctcaaggaagatggcatctattatgcctacctcaggaaaagccgggaagatcacattgcggaaaagaatggggctgaagacaccttggccagacatgaatttctgatcaaagaactggcagccaggaaccacatccagatctcacgctggtacaaagaggtggtctccggagaaacaattagcgaccggcccgagatgttgcggctgctgagcgacatcgagatgacctctcctgacggtgtgctggttgtagaggtggaaagattgtcaagagggaatccgcaagatcaggggcgcgtcatggacacattcaagtactctaatacgctgattattacgccgatgaagatctatgatctgaaccaggagtccgacgaggaatggattgacttcgggttgctcagaagtcgaatggagtaccgcaccattaaacgccggatgcagaatgggcgcctgacatctgccatgcaggggaagtatataggcaacatcacaccttatggctggatacggcagaaactgaaaggcgagaaaggatacactttgatcccagatcccgaaacgtcaagaattgtgaaactgatgtatcaattggtgactactggtaacgagacaaccggatggaccccagtcgggacccctaccgtcgcaaggatgctcgatgacatgggcatcccaacgccccggggttcagctgagtgggagtgtagtgctatttctaaaatcattcaaaacccagtaaacatcggaatggtgcgaatagggcatcgcaaggaagtaatcagggttgttgacggtgttatgaagaaatcacggcctcttaatcatgatgccgtcctggtgcccgccagatgggagggcatcgtggaaaaggacgtctacgacagggcttgcagcaggtttgcaaagtacgctagactgggaacttttgtggaaatatccaatcccatggctggagtggtgcgctgtaaactctgcggcaggcctatgagtggccggccctctccaaaacgcaatatgctcttctgtcgaactcgaaattgcccaacagtaggcgcttacactgacctggtcgaggagcgactggtggccagccttgaggatttccttgcggattacaaacttcacgtcagcagcccttcccttcgagttctcaacaccgagtccaacgataaccaggctattttgaatgagttgcatgcaaagctggataagcttaatgcacaatacaagaagatttgcacattgttcgagcaagatgtgtatgatgtccagacttacttgactagaagccaggatgtgaagaacgaaatcgccgcagtgaacgctaggattggtgccatagacggaaagctggcaaaggcccagcaggacgccaccgtgcgggagaatttcatcccgtattttgagtatgtgctcgcctcttataaagagagtacagaccccaagtacaagaacaagctgctcaaagaaatagttacaagtgtagactactccaagaccaccagggccggcagaaaccagaagggcatggactcctttgtgctggatgttcacgtcaatcttcaggcgcaccctatc

SEQ ID NO: 982 - DNA, 1611 bp, unidentified
  source 1..1611: mol_type = unassigned DNA; note = Bacteriophage uvig_220226 from the Index of /pub/databases/metagenomics/genome_sets/gut_phage_database (ebi.ac.uk)
atgtctgataccaataagatcacggctctgtactgtcgcctttcccacgaggacgagctggctggggaatcaaactcaattagcaatcagaaagatatactgcagaagtatgccgatgataacgggttctacaataccgagttctacatagacgacggctatactggagtcgacttcgaaagaccggccttcaaaaggatgattgacgacgtggataacggcagaataggaacaatcataactaaagaccttagccgcctcggcagaaatcacctccatgtaggcctgtttactgaagagtacttccctaggaacaatgtgcgctatatagctattaacaataacatcgacagcgacaaccctgactcaagtgccatagacatggcagcattctacaacatttttaacgagtttcatgtaaaagacacctcccgcaagattaaggcctcttgcctcatcaagagtgaaagggggcagcgggttgctagtagacctccctacgggtacatgaaggaacctaatgatcactccaagatcattccaaacccagagacagtgcccattgttcgccatatctttcagttgtgtgccgagggtctgggacctgcccagatagcgcatcgactcgaagaggagcagatctacactcccgccatgtacgagtattccaagagtggaactgtgatttccaattttgacaccagctacccctaccggtggaacccgactgttgtggccaatgtgttggaagatgtttcttatatcgggcacacatgcaacttcagattcggccgggcttcttacaaagatcacaggaaacttaaacttccagaatccgaacatcgactgattgagaatacacatgagcccataatcgatatcaatacctgggagatcgtacagaggctcaggcagtcaaagcgcaggtttacccggagcggtgagaaatctatcttcgcgggcattatcttttgtgcagattgcaaacaaaaattgtatttccacagacacgtgcgagaaaagccagagaactggaaatttgtctgtagcagttatcgcaagaatagccgggaacagtgcacaatgcacgggattaaagagtctcaccttaaggaaattgtgctgcacgaaatccggaatgtcaccgctttcgcacgcgagagaacagacgagtttgcagagtatatttctctcaagtccaactccgcggtgaagaaggagctgagtgacgccaacaagaaactgaagaaatcagaaaagcggttggccgaggtcggaatcatctttaggaagctgtatgaagaccacgttttgggcacaatcgataatgatcaatttcgaatgctgagccaaggatacaccgatgagcagaatcaacttaaagcagaaatttccgatctgaataaggctatccaagagctcaagtctcagaccgccaacactgctaagttcacagccatggcaaaaaaatataccgatatcacagaactgactcaggagatccttcatacctttgtcagcagaattgaagtccatgagaagcggaaagatgacaacggctcagtgacgcaggagatcgacatctatttcacgcacattggtatcgtgaag

SEQ ID NO: 983 - DNA, 1593 bp, unidentified
  source 1..1593: mol_type = unassigned DNA; note = Bacteriophage uvig_229288 from the Index of /pub/databases/metagenomics/genome_sets/gut_phage_database (ebi.ac.uk)
atgaacgtcgtcatctacgcaaggtatagctgcgagcgccagacagaacagagcatcgagggccagcttcgagagtgtgaggagttcgccgagaagcatgacatgaccattgtggacacttacatcgaccgggccatttccggcacatctactaaccaccgggaagcctttttgaaaatgatcgcagacagcgaaaagcatacattcgagggcgtgttgatgtataagatggaccgctttgctaggaatagatacgactctgccgtttacaaagcgaagctcaaaaaaaacggggtgcgagtatactatgccaaggagcagattcctgaaggaccagaaggcattattctggaatcactgctggagggcatggctgagtattactctgccgaactgagccagaagatcaaaaggggaatgagagaaaacgctctcaaagggaaagctaccgggggcagcactgcaataggttacaagatcacccccgataaaacttttgcgatcgatgaagattacgccgacgtagtgcggcatattttcaggagttacgctagaggtgagcgggtcgaggatatctgcaaggacttgaatgaaaagggcataagaacacctaaaggatatctctttaatcaatctaccatgcggaagatgctccagaacgagaaatacattggcgtgtatatctgtaaggacgtgcgcctcgaagatgctatcccaccgatcatcgataaaagtctgttccacgaggtgcaacagatactggcaaagaaccgaaaggcccccgccagagccaaggcaaaggtggactatcttctgtccggtaaagcttattgtgggaagtgcggtaatggcttggtgggagagtcttccaatcctaactccgattctaggccccactactactataagtgcgccaataggaaaaaagggctggggtgtgataagaaaactatccgcaaagaagagttggagaacttggtggcgcagaaggtcgcagaggtggtgttgcgcccagagaaaattaaggaaatcgcccaacgatgtgaggaaatgcagagagatatggttcgaacaattcggaatccagaagccgatatgctcaaaaagcaacttgagaagaccaaaaagtccattgcgaatatcatgctggcaatggaacagggaatctttacgaagagtaccaaagaacaccttgaggcattggaacaacggaaagagacactggaaatagagattcagagaacctccatggttgagaaggtagatatcattacggcagaccagattgaattcatgctgctgcagttcctcccggaggctaacacagacgtcaccgcctatgctgacgacatcatatcatgctttgttcatagtgtctacctttgggatgactcatgcgccatatggctgaacctgtcaaatcagcagcccaagcctcacaagaacaggtgtgctaaggtgacccccgagtcaacgcagcgccttcaactcagcgtggatctgttgagtgggaatgtcaagaagaacctggtacagaaaaacgttggagagaattcccacctggaaactagcccacctccccataaaaatact

SEQ ID NO: 984 - DNA, 1602 bp, unidentified
  source 1..1602: mol_type = unassigned DNA; note = Bacteriophage uvig_51701 from the Index of /pub/databases/metagenomics/genome_sets/gut_phage_database (ebi.ac.uk)
atgaagcgcattcacacgctgtaccgagttagcaccaaaaagcaggttgataaggagaagaacgacatccctatgcagagactggcttgcaaagagtttgccgaacaacaggggtgggtcataacccgggagttcgaggagaagggagtgagtggttttaaggtcagcgcaaataatagggatgccatccaagaccttaaggaggccgccattaaacatgaatttgacgtactcttggttttcatgttcgatcggattggccgaatcgatgacgaaaccccgtttgtggtggaatggttcgtaaaacatggcatcgaggtttggagtgtcaaagagggtgagcagcgcttcgattctcatgtggacaaactgactaactatatcaggttttggcaggcatccggcgaatctgaaaaaacttcaatgcgaatcaagacacggaaagagcagcttacactcgagggatgttacactggcggaaccgtgccatatgggtatcaactgatacgcaaaggcaggctgaataagaaagggaatgaaatgagggacttggcaatagaaccagctgaagctgagatcgtccgggagatctttaacaagaccatccacgaaggatacggctcctacaggatcgccgatatgctgaacaagagaggcctgagaacacactctggctccaagttccagtgtaatacaataattaggatccttcggaatcgcctctactgtgggtatatagtgtccggtaacgtgacctccgaagctctgagcgagctgacaattgtagagtccgacatcttcgaccaggctcagtatatccttgaccagagagcggaaaaagacacgcagaagagacagatcgcctttaccaccaaaggacaagccctcctctccgggaacgtgttttgtgcccattgcggtgggaaactgactacaattcgatacaaggataagtatatgcgcaaagacgggtctgagtactcagtggatcagatcaagtattcttgctatcaccgcagccgaaaactttgcaagtgcgacggacaggccacctaccagtcagagagagtggacgccgctgtgattcaaattatgcacgacattttcgataaaatggcgggagcacccgatgaagacaggttgaaagctatgatcaagcgccagactgtcggctgtcaagcgaagcagaggaagctctccctcgaactgcagaagtcaaaggcccagcttgaaaagctgcagctggagattgccaatgctcttaccgggaatagcctcttctctcccgaggatttgagcagtagtattactacgatgaagggtagaattgcagcggcagagactgaactgcacgagttggaacagtctgagttccaacagagacaaagcatcgcaaaaatcctgcctgcttacaaccagttcaagtcatgggccgatgagttcgatagtgccacaaaagagcagaaaaagatgattgcctgtcaattgtttaaacggattgagatcggccggaactacgcaatcacttgcgagctcaacatgacctaccagcagttttgcgaggaatggagcaacacagaaatatcaaagaagatggctata

SEQ ID NO: 985 - DNA, 1659 bp, unidentified
  source 1..1659: mol_type = unassigned DNA; note = Bacteriophage uvig_254558 from the Index of /pub/databases/metagenomics/genome_sets/gut_phage_database (ebi.ac.uk)
atgctctctaataacttgagcaaaacttatctgtgcggcggctatcttagactctccaaagaggatggtgattttgccggctctgagacactgcagagcaatagtattgaaaaccagaaggaatacatcgaggattacatccactcaaaacccgaaattgagatagtagatttctacatagacgatggttattcaggcgtgaacttcgataggccagattttcagagaatgcttcaggacatcaagaacaagaaaattgactgcgtcattgtgaaggacctgtccaggcttggccgcaattacatcgaggtcggtaagtatatcgagagactcttccccctgcttggagtgaggtttatcgcaatcaacgacaatttcgattcagcagacgacactgccgtcagcaacaatatcatcattccgttcaagaatctgatcaacgacgcctattgccgggacatttctatcaaaattagaagtcacttggaagtaaagagaaaacgcggggaattcataggtgctttcgctgtttatgggtatatgagggggaaagacaaaaataagcttatcgtggatccatacgctgcagagatcgtgaaagaaatatttggaatgaaaatggatggaatgtcacaacaggcaatcgcggacgaactcaatagtctggggatactgtcccctgccgagtacaagaaagaacaagggtctggatataagacggtgtttcagacccactccaaagctaagtggacggccatggctgtgatgcgggtattgacaaacgagatctacgtgggtactctgatacaagggaaggagtccacacctaattataaagtaaaggtccgcgagaagaaaccccgcgaagagtggattagaattgagaacgcccatgaagccatcatctccagggcggattttgagatcatcagtgacattattcaaaaagacactcgggtgaccgccggcaagcgagccgtgtctatctacagcggctatttggtgtgtgccgactgtggatgtagcatggttcggaaaaaagcatactccggctcttttgagtatgtctactacgtttgctccggaaacaagaagaataaggacacttgtagtagccatcggatctcagaaaacgctctgaatcttgcagtcaccaaaacactccagctgcatctgaagcacctggccgacctgcaggaatcaattttgtacatacgaaaaacaagttgtaactctgacaagatcaagatgatggttctccagtttgagaaaatcaagggcgacattgagaagtataatagactcaagctcgagtgctacgaagactataagaacgagctgattacccaggatgaatacctgctgtttaagaaagagctggataaccgaatagaagataccaaaaaggccgctaccaaactctccaagaagaagaggatgttgcttgacgggcggtacgagaaagaaagcttcatggagaagttcttgacatctaaggatatcgagctcaaaaggagcctgtttgttagattcattagccagatctacgtctatgaggatcgccgaatagaaattattttccggtaccaggatgagattgaacagcttgctggccttgtgggagagattaagcaagaaaccgcggtgcgcgaggtgatt

SEQ ID NO: 986 - DNA, 1554 bp, unidentified
  source 1..1554: mol_type = unassigned DNA; note = Bacteriophage ivig_3141 from the Index of /pub/databases/metagenomics/genome_sets/gut_phage_database (ebi.ac.uk)
atgaactaccgcagttttgagatgcgcctgttggtgtatctgcgaaaatctcggtcagatgtcgaggaagagcgcaaggctgccgccgaaggcagagagtacgacacattggctaggcatcggagaaatctgatggatgttattaagagggagggccacattctggtcgagcctccatacgaagagcttgtctctggcgactccatcatcgagcggcccgaggtccaaaaaatgcttaatcggatggacgagggcgatatcgacggagtgctcgtgattgacatcgatcggcttggaaggggcgacatgtatgatagtgggatactggatagagcatttcgctacaataacataaaactcattacgccaactgaaatctatgatccggaggaggagaattgggaacttgtgttcggcgtaaagagtctggttgctaggcaggaacttaaaagcatcaataagagacttcagggtggacggcgagacaaggccaaaatgggaagaagcatctccaaaaaacctccctatggttatctgcgagacgagaacctgaaactgtaccctgacccagataccgcatgggtgattcagaaaatctttgaaatgactgtcaaaggaaacggtagacaggccatcgccaaaaagttggatgagtggagcgtggctcccccggacaccaaccgcaatcactggtcaccgagcaccattactgctatcgtgaaaaacgaggtatacattgggaagatcatttgggggaagataacctatctcaagcgcgggggccagtacacccgccgcaaaatgaaaccagaagaatggattgtcaaagacgaagctcatgaaccactcgtgaccaaggagctgttcgatgcggccaacgcagctcattctggccggttcaggccttccacaaaggcaaacaatgttcttagcaatcctctcgccggaatcctcaagtgtgagctttgcggttacacaatgctttatcagccacgaaaagatcggcctaattcaatgatctattgcacaaaggcccaatgtagggggaagcaaaaaggggctatgttgtacctggtggagaacaggatactcgtatcactggaacagtacattaaagagtttgagatccccaagcagcaggatgccaagaataactcctctattatacaatttcaggaaaaggcactggacaagaagaagaaagagatcgccgaggcaaataagcagaagagcgcgctgcacgacttcctcgaaaaaggcgtctacgacataaacacattcatggagaggcaaaaagtgctggtagacagaatcgaaaagctgaaagatgaaactagactgatagtggaggatatggaaaaggaaaagttccgggaaaagaacaccaagcagttcatcccccttgtgaagagtgtgttgaccgcgtaccgagagactgacgacattgaaaaaaagaacagactgttgaaatccgttctcgagagggccacgtttctccgaaaaaaggagtggacaaagatcgatcagttcgttattcagctgtatcccaagatt

SEQ ID NO: 987 - DNA, 1689 bp, unidentified
  source 1..1689: mol_type = unassigned DNA; note = Bacteriophage uvig_123245 from the Index of /pub/databases/metagenomics/genome_sets/gut_phage_database (ebi.ac.uk)
atgtatcagaatattaacaagatctatcacgcagcaatctacgtgaggttgtccaaagaagatggcgacatctctagctccgcaaagctggagagcaatagcattagcaaccagaaggccctcatactcgatttcctcaaggacaagaaagacattgaggttgtttctgtacgggtggacgatggctacagtggaagcaatttcgaacgacctgcctttcaggcgatgctggaagatattcgccacgggattgtggattgcgtagtggtgaaggacctgtcacgattcgggagagaatatatcgacagcggaaagtacattgagcggctttttccggcattgggagtcaggttcatcgctatcaatgataattatgactcccttaaaggtaaaaaccaagctgacgaaattattatcccattcaagaacctgatcaacgacgcctactgtcgcgacatatctattaagatccgatccaatctggagattaagcgaaaaaagggggagtgcgttactccattcgtagcgtttggctatcggaagactaaaaccgataagcacaaactggaaatcgacccaagtgctgggggcgttgtgcaggacatctttaagatgaaattgcaggggatgagtcaggatgctatcgccaataggctgaatgagttgggtatcttgagcccttttgaatacaagattagctcaggctctaggtatgagacaggttttagacagaaggagcaggccctgtggtcttccgtgactgtgcgcaggatccttgagaacgaagtgtacattggaaacctggtccaaggaaaacgcacgacacccaaccataaggtcaaacagacgtatgttaagcccgaggatgactggatacgcatcgaaaaaaaccacgagcctctggtctcagatagagactttgagatagttcaaaggctgctgggcatggataccagaacatcaccagaccaaaaacaggtgtacctgctgtccgggattgccgtgtgtgctgattgcggcgctcccatgacccgcaaagtgagtaccgtggccggcaagaagtacgcgtactatctctgttcaactaacaaggaaaccaaacggtgctctagccatcgaatcccggagaaggatcttgaggatgccgtacttgtgatgctcaaacagcatatccagaacattctgcatctcaaaagagttttggagttcatcggtactgtcccttttcaagagataaacatgaaaaagctccaggataggcttgaaaagaagaaacaagagaaagagcggtgcaaggagttgcggatgatgctgtatagtgatatgaaggagggaatagtctccaaggaggactacgtggaacttcacgcagcctacggcaaacgcctgagaaatgctgaagaatccatccgggccattcagaaagagatggacaacgaattggaaaaagcagataaagccaatacctggctcgactacttcgtcaagtatcaggacatcgaggaattgtctagaacagtcgtggtcgaactgattaggcagataagagtgtacgataagaagaacatcgagatcacattcgacttcgacgattgttatcagaccttgctcaatcaactccccgctatgggggtcgatatggttatagacgacgacaataatctgcaggtgaacgtaaaagaggtggtg

SEQ ID NO: 988 - DNA, 1623 bp, unidentified
  source 1..1623: mol_type = unassigned DNA; note = Bacteriophage uvig_138779 from the Index of /pub/databases/metagenomics/genome_sets/gut_phage_database (ebi.ac.uk)
atgagcgagtcaacacttaaaaaagccgtattctatgggcgctattcctcacaccttcagcatgagacttcaattgaggctcaacgagacatcgttacacggtatgcactgaataacggctacgagatcatcgcagaatatatcgacagggccaagagtggaaccacgacagcccggagagaccggtttaatcagatgatcctggacagtaggaatggtgaatttcagtatgtgattacctccaagattgatcgatttgcgcgcaacgtcaaggacttctacatttccgaaaataagcttgatgaaaatggggtcaagtacatatccgccacagagtactacgacgatagcactatgtctggaatcataatcaaagccctgggcgtggcagcagccgatgggtattctaaaaacctcgcaaacgaactcgtgaaagggaaaatggttaatgctaagagggcaaaacacaacgggggcattgccccactgggctatgatgtcgaactgagcactggaaccctgaaaatcaacgaagaagaggctaaagccgtgagactcatttttgatatgtacgtgagtggcaacagctacggcgacatttgccataaactcaacgagttgggatacaccacaaagaagcagaggaaattcggtaagaatagcctgtacgacatactccataacgagaagtatatgggggtatacgtgttcaataagagagctggcaaaaagaatagccacgcccgcaagccggacaatgaaattgtacgcatcgagaatggggtgcccgccatcataagcaaggccgtcttcgataaagctgctaaactgatggagtacaataagaggaattccggtgccaataccgcaaagcacaactacatgttgtcaggcttggtgaggtgcggtcactgtggatgcatgatgtctggatgcgcgaagaaaaacggcaaaggcattgtcactcacgtgtatagatgtgggcataagccaggcgagaagtgcgaaaaccacgaaattaattcagacaagctggatgagtttgtcatcaccatggtaaagaagtatctgctctgtaaagataacatccccgttctgttgaacatactccgagagctgagcgctaagagaatcaccgggattagtgatgatatctctgagtactcccggagactgaaagacattaagacaaaacaggagaacctcctcaacgcccttgaaacgggaggccagatagagagtgtcatcgaccggctgaaaaagttggagcaggataagagtacagttgagagcaagatctctgaactggaacaaaagaagtccgtgtctgtgactgaagagcagcttaacaaggctctgaatattcttcctgcgttcatcatgtctggaagaacccccgagtgtagactctttatccgcaacattgtcgagcaagttatcgtgtccaaggacaacgccgctgttactcttcgggtgacggctgtgtcctgcatgcgaaataggaaggaccgcaaacatatactctcatctggtattgaccctaagatctatcaggaggataaacaccatgaaaggaaacagaaatgtcgcgccgtgtgtaaaatccaattgcggtacgcagcg

SEQ ID NO: 989 - DNA, 1671 bp, unidentified
  source 1..1671: mol_type = unassigned DNA; note = Bacteriophage uvig_22285 from the Index of /pub/databases/metagenomics/genome_sets/gut_phage_database (ebi.ac.uk)
atgttcatcgacgacaatagaccgaagagagtggccgcttactgtcgggtgtccacagataaaactgatcaggctaacagcctggttagccagcaacggtacttctctgaatatatcaatagaaatcctctttgggagctgtacgatatctatgtagatgatggtattagcggtaccaataccaagaagcgggctgcctttaaccatatgattgaagacgccgtaaacggaaagttcgatctcatcattacgaaggagatctctaggttcgcccggaacatagttgactctatcacatatacacgagagttgaaaaagcacggggtgggcgtgctctttctgtccgatggaatctacaccctggatagtgacggcgaactgaggctcgcattgataagcacaattgcccaggaggaatctaggaaaaccagtgagagagtaaagtggggccagcgcaggcagatggaaaaaggcgtggtgttcggaaaggatatgctgggatatgacgtgaggaacggaaaactgtttatcaatgaagaaggcgcggagacggttagaaagatcttccacaagtttctcgacgaagggaagggcgtgcatcgcatcgccaaagaacttagagaggaaggcgtgaagacagcagcaaggatgaaagattggtcctacactaacatactccggatcctcagaaatgaaaagtactgtggggaccttgttcagcagaaaacctacacccccgactatttgactcatcagaagaagcgaaactatggcgaggtggagaccgtcacaatccgggatcatcacgaacccatcatcagtcgagagaggtttgaggcagtgcaaagagaactgaaacgccgacgacccagcgagtctaccatcaaagcgtacgccaatcgctatgctctgtccgggaaaatcatatgtggtgaatgcggtgctgggtttgtcagacggcagaaaaagcgcaaggacggaacattcaacgtgaagtgggtctgcgccgagagccgcaaaaatgggggttcacaccaagagaaagacggcgagaccgcggggtgcaccacaaattccattagtgatagggacataaaacagatcttgcaacgcgtggtcgcagatactatgaatgggcgggaggaattggtgagtaagctcctgcagactgtggaatccgtcatcaaaacggtctcaggcaacgatgacctgtacaggattgagaaggaaactgagaaatgtgcggaaaagaagaagcgccttctggacatgtgcttgaatggctacattgaggccaaagattatcgggctgcctgtgacgcacttgaaactcagatcgccgagcttcaatctgccctggtcaaagagaaggagaagcagaaaatgatcgccgataaggagaagctgattgaggacataaaaaagttcatttcaaacatcagctgcggagcagagtggaacgacgccttctaccgaaacattgtcgataagattgttgtgtataaaggaaggaaaatggacattcaccttaagtttataccagaccgatggcaggtccagattttggcaggagttaaagagattaacgcttacgaatccaagatgcgcgctagcgtgtgctcagctccaatttccgtatctagaccttttaatagcggctcagggattgag

SEQ ID NO: 990 - DNA, 1581 bp, unidentified
  source 1..1581: mol_type = unassigned DNA; note = Bacteriophage uvig_67879 from the Index of /pub/databases/metagenomics/genome_sets/gut_phage_database (ebi.ac.uk)
atgaatattcagcagaacaggatcacggcgctgtactgccgattgtcccgagacgatgatttcggtggtgactcagctagcattcaaactcaaaaaacaatgctgtctcagtatgctagagataacggcttcactgtgaccgagttttacgtggacgatgggtactctgggacaaactttgataggccagacttctgcaggatgatagacgacattgaacgcggcaagatcggggccgttatcgtgaaggatctgagccggctcgggcgggagtatctgaagaccggctactatactgagattttcttccccgagcatgacgtgcgcttcatcgctgtcaatgacaacgtggattccgaccacggggaaaacgaatttgcaccgttcaagaatattatcaacgagtggtacgccaaggattgttcccggaagattaaaagcgccctgcatctgaaggccagaaatggtgaatttctcggcggttatcccgcttatggatacagaaggtcaaatggcgatcgccactcaattgtccccgatgagaacgcacctatcgttaagcagatatttgaactcttgttggaaggcaaaagctgctacgaggttgccaagtatctggagcagaatctcattctgacaccacgcgccttcctcgccgaaaagtacggagtctacaagaacagcgcaagcgccaaacatccatatgcatgggaggacagatccgtctacagcattgcaaccaatcctgtctacgtgggcgatcttgtcaatggaaggcggaagtgcaaaagttttaaaagtaaaaaagtatgtaagacttctgaggacgaatggatcgtagtgcgggataaccacgaacccctggtcagccgagaggatttcgaagcggtaggacaaagactggcggtgaagcagcacagaaaagtggagaaccctgacaatatttttcgagggcttatggtatgtggggagtgtggcaggaagatggtgttcagtaagagtggaaagagcggaagatacagctgtgccatctacaagcggtacggcaagagtgaatgctccaggcactctataacactgaagcagatcaaacaggtggttctgacatcaatccaacgcaacgctgccctctcttctgagggcaaagacaggtttgtggaacagatgctttccgcctcaagctcaaaaaaatcagcggaactgtccgctttgaagaaagaagccgagaaactgaccgctaggaagcttgcactggctaaaatctttcagtccctctatgaggacaaggcactcgggaaactgtccgaggaagtctacagtgagttgtccggaaatgtcgagagagagcgaacggaaattcaggaacgcttgcggcagatatctgagcaacttggtaaaagtcagcttctgaccgaaaacgctgagaagtttgccgagttgattcgccggtataccgacataacagagctttctgaggaattggtgcatctcctgatcgaaaagatcgttgtgcacgagcgcgattgcgtgactaataccatgagagttgagatctattatcgattcatcggaaaagtggac

SEQ ID NO: 991 - DNA, 1566 bp, unidentified
  source 1..1566: mol_type = unassigned DNA; note = Bacteriophage uvig_505551 from the Index of /pub/databases/metagenomics/genome_sets/gut_phage_database (ebi.ac.uk)
atgccaaaggtcagagtgatacaagcgactaaaggcagccttgctaaccgcctgcctgtggctgcttactgtagagtctcaagcaatagcgaggatcaacgccactcctttgttgcacaggtccgcgaatatacagctcggatcgcagagaatgataagtgggagttggccggaatctatgcagacaaagggataacaggcaccaatgcgcggaagcggcccgagtttcagcgcctgatcgaggactgcagacagggcaaagtgaaaaggattctcacgaaaagtataagtcgcttcgcccgcaatacccaggaatgtctggaatatgttagggagctgaagatgctgggagtgtccgtttacttcgaaaaagagggattggacaccgctgacatcgcgggagaactgctcatcagtgtatttgggagcctggcacaggaggaatcctcttctatcggtggaaatatgagaaagagctatgaataccgaatgcaaagcggtaagttcatcggcaacattgccccgtatggctataggtggaaaaatagatctctcgaaatctatgaacctgaggccgagatagtcaggtggatctttaattcttacctgaacgggactggtagggcccagattgcacgagaactcaaccagcgggagaatggcaggaacatgtggtatgtgactactatacagtacattctcaacaacgaacgctacattggtgatgctctgctccagaagaagtacacaacagaaatctacccaaagcaagaaaaaagaaataggggcgatgtcccccagtactatctggtagagtcacatccacccatcatcagtcgagacacgttcgaacgggcccagagactgtgccagcgaaggagaaaccctcaagtcaccccctcctcacctaccgataataataataccttttttcgcaagaaagcctactgtgcagaatgcggccgggcactgcggcgaaagaagcagagctctggatatgtttcttgggtgtgctcacggcacgatgagtccaagatgctgtgtcccgcccctccagtggctgaggcagccctcctgaactcctacaaaaatatggctggtattctgctgtcttcaattgatcggattctcttgccaatggcggtgcagctgaggagacttcgagagcgctctattatggggaatgaagacattaacatccttaatcagcagatcctctccttgaccgaccaactgcacgccgtgagtaagcttcataacctgaacattttggacgtaagtgcctaccgagagaaaacaaacgcccttaacgctcttctcgatgaggctcagcgcaaacggaaactgttgataagcgggacaattgaggatgataaacttgagaagaccgaggcccttatcagcattctccaagacacgatgcagtccccgactgcccttgaggacggagaaatcttcgagcagatcgttgacaaggtgttggtggacaggaacaagaagatcatgttcagactgattaacgggctcgagctcactgggtcagaaggcaactccgatggcgagaag

SEQ ID NO: 992 - DNA, 1587 bp, unidentified
  source 1..1587: mol_type = unassigned DNA; note = Bacteriophage uvig_433950 from the Index of /pub/databases/metagenomics/genome_sets/gut_phage_database (ebi.ac.uk)
atgatcccattcagcgttagttcatctgctctccctgacgggtgttcaggattcctgcgcgccgtcatctatgctcgattctcccctggcaaaaaccaaaaggagattagtattgaaggccagcttcgcgagtgcagagagtttgccgataggaataactacgaagtggtcggcgaatatattgaccgaagaatcagcggaaggagcgacaaccgagccgactttcagagacttatgagagattgtgagaaaagatgctttgacgttgtgatcgtgtggaaattcgaccgcttcttccggaatagacaggaatccgccatatacaagaaacacctggcggatttcggggtcaaacttgtgtctgctaaggagttcattcccgacggctctggcggcatcattatggctggtatgattgaaactgtggccgagtggtacagtgcaaatttgagtgaaaatgtgacccggggcatgtacgaaaccgcatcaaaagctcagtcaaccggccacctgccactgggatacgtgaccggcccggataagaggctgaaaatccagccagtggaagccgaggcggttcaaatcgcctttcagatgtatagcgatggtgcaaacctcaaagagattgctgacgcactgaatgaaagcgggcacacgacaaagactggacggcccttctgtgtcaatagctttggggctattctgactaacccgaagtacattggtgtgtataagtggcacgacgacatcgaaattcgggacgggtgccctagaatcgtgtccgacgagttgttttttagtgtgcaaagacgcttggaaaggacccgcagaacatccggccgcgggcgagcgaccacagagtattttctgtctaccaagatattttgcggtcattgtgggaagccaatgtgcggagaatccgccctgaagcgggggatgcggtactactactatgcctgttccgagaagaagcgctttcacaattgcaagaagaagaacgtacccaaggataaaatagagaacctggttttcgaaaaaacattggctatgctcacggatgataatatagcttatatcgccagggaggtcgaaaggatagcagcagatgagaatatcaatcttgccgcgttgaggcaactggagggacagttggcagaggtgaacaagcggttgtcaaacattgggaacgctatcgcccagggcataattactgaaacaaccaaagaacttttggtatctgccgaagccgagcgagccgcgatcaacaagaagatcgcacaggagcgcctgcttatgaagggaacagtaaaagctgagaatgtggcatgctggctgcacagctttaaaacaaagaaacggtcagatctcgagttcaaaaggcagctcttcgccagtctcgttcatagcgtgtacgtctatgatgatcatctgaaagttattttcaacgtcgagaagtacggtgcagtcgagatctccttcgacgagctgagctctgccacttcttccgacgtggtgggcctcgcacagcccgccaaacgacctcagaggaccctgatcctgtgtggactccttgcttttgtaactcat

SEQ ID NO: 993 - DNA, 1689 bp, unidentified
  source 1..1689: mol_type = unassigned DNA; note = Bacteriophage uvig_123245 from the Index of /pub/databases/metagenomics/genome_sets/gut_phage_database (ebi.ac.uk)
atggctcgcaagtcacggaagaacatccctgaggtcgtgtcctctgccacagtgcagaccgaagtgtcacggccatttcgggctggactgtacgcccgcatttccatggagaccgaggaaaccttggagcggggaacaatcgagacccaagtggaactcatgaagaacttcgtagcagacacagaggatatagcggtggccgaaatctacaaggactccgattactctgggactaatttcgatagacccggattcacgcaaatgatggaagatatcaagcatggcaaaatcaactgcgtgattgtgaaagatctgagccgcctgggcaggaattacgtagaaacctcaaattacattgagagggtgttccccttcttccacgttcggtttttggccgtaaccgatgattttgacagctttagggagggcgttgacctcaccgtaccgttgaagaatataatcaacgaattctactccaaagacttggcaaagaagtctagctctgccaagaaggcgctttggaaggaggggaagttcacaggcgcttgggaaccttacggttatcggaaatctgaacaggacagacaccagctggtggtggacgaggaagccgcaggccatcttagggagatttttactatgtatatggacggatgttcctacagtgatatagcaaaaagattgaacacagacgggattctgagcccaactctccaaagagaatattataagaccggcgagaagccctcccccgagagcaaaccttggaataactacgaggtgaaaagggtcctgcaagacgtccattgtactggtgattcagtttatgggaagtaccagcagtctgtctttcagggaaacaagcagcgcaatttgccagagagcgaatggctctatgcggaaaacacacatgagggcatcatagataaggagttgtttcgacaggtccaggagaagatccgcgaattcactgaagcatataagaaaaagcaccagttgaacaatggcgccatcagaaatcacaacttttacactggcaaaatccgatgcggcggctgtgggaacaggatggtccttagccgggagaagaccgggacgttctactatatctgcggagctgatgctaatcataaaagtggtgggaatcagtgcaaaggacaccgagttaagaaggaatacgttgacgaagacgtgctgaggctgattcagagtcacatgaaagctgtgctggatactgagaaactgatccgcgagatgaacagtgcctcacggaaccagacacagtacctgcttcttgataaggaagtgggaaaactccgaagggagctgtccagaatttctaagcgcaaatccgacctgtatgaagactacagtgaaagactgattacggaggaggagtacatgcagtttagtcgcatctatagcaacgagattgagaatatcaagaatcgactcgacgtcgtcttggccgcacaggtgagatatagcaaagattatcatattgaggagggttgggggaaagtgattcacacatacatgtccaaaagaaagctgaccaaagagatggctgacgcctttgtcgattctatcataattcacggtaagtatgactacgaaatcaagctcgtttatgatgaccaattcgccgacctgcagaaactcaagaaagagaaagaagctcaatcaagg

SEQ ID NO: 994 - DNA, 1632 bp, unidentified
  source 1..1632: mol_type = unassigned DNA; note = Bacteriophage uvig_205573 from the Index of /pub/databases/metagenomics/genome_sets/gut_phage_database (ebi.ac.uk)
atgcctgccgaaattaactttaatttgcctggaaacaagaagtccgagcataactcaagagacaaaattgcagtggtttatgcccggtatagctctcattcacagacagaacaaagtatagagggccagctggctgccgcccaggcctacgccgcagcccacgattacaccatagttcacgaatatatcgaccgagcaaagagtggaagaaccgactctcgcgaacagttccaggctatgctgcacgatactgccaagaagcagttcggagtgatccttgtctggaaggtggaccggttcggcagaaaccgggaggagctgacgatcaataagctgaagtgcaagaaaaatggcgtccgggtggaatacatcgcagaaaaaatacctgacagcccagagggggtgatcttggaatccgtcctggagggattcgcagagtactactccctccaattgagccaaaatgtgcgacgcggtagggcggaaagcgctgaaaaatgtcaggtcctgggcggtacaaatctgcttgggtacagtactgggcccgacaagaagtacgtgattgatcctaacaccgcacccactgtgaaaatgatcttcgaaatgtatgctagcggcagcacgacgcccgaaattgtacgccatcttaattctctgggcctgagatctagcaggggtaccccgttcacgaaaaattccctgtgtggaatactcaaaaatgagaaatacaccggagtctacacatacaaggataagcgcatccccgggggtataccgcgcatcatagatgacgagacttttcagaaggtacaggccctgctgaaggtgaacaagcgggcaccaagtcacaagtggtctagagccgaatacatcctcacagacaaacttttttgtggaaagtgcggttcaccaatggccggggagagcggcacatcccataccggagctaagcacaattattatttgtgcacaaaacataagagacaggggaaaagtgcgtgtgataaaaaggccatcaggcaggaacagatcgaggatgctgttctgaacgctgccattgagttggtgtccaacgatgagctgattgattttatcaccgattgcacctgggaatattatcagaagcaggactttactaaagctgaagttgaggcgctccaaaaagagctctccagggtcgaagctgcaattaaaaatctgttgcatgccattgagctggggatctttaacgaggctactaaagccaggatggatgaactcaccgcccagcaaaaagagctgaccgcatcaatcgcggagaaagagctcgctagcggctttcgacttacaagggaccacatcaagtacttccttgggcaattcaagaataagaactataaagaccgggagtgtcagaagcagcttattaacactttcgttaactcagtgttcctttacgacgatcacatcgacctcaatttcaactatagtggcggctccagaactctctctttgaccgagtccgaggaaaaagggggctctgagggatttgtatgctgtctgccatgctcaacaattacaaggacctacgagcccaacatcgtgtggtttggccacgtctttaagattcgaattcgcttgcctgagtcttat

SEQ ID NO: 995 - DNA, 1410 bp, unidentified
  source 1..1410: mol_type = unassigned DNA; note = Bacteriophage uvig_311654 from the Index of /pub/databases/metagenomics/genome_sets/gut_phage_database (ebi.ac.uk)
atgcgaaaaaaaatacgggtcgcccagtatgagcgcgtgtctcacgaggatcagaaaaaatttggcagctccattgctgcacaaaggcaacacctgaataagttcttggacgagcaccctgaaatggtccttatagacgagtattgtgacgaggggatcagcgctgacaaactgaataagagaacagagctgcagcggatgctgaaagatattgaggaagggaaaattgatctcgtgatttttacaaagctcgatcgatggtttcggtcagtggccaagtactacaagattcaagaaatcctggaggccaataatgtggcttggcaggcagttctcgaagactatgagactgtgactgcgaacggcaagttcaaagtgaacatcatgctcagcgtggcccagcaggaaagagaccgggattctgagcgcataaaagatgtgtttgcatacaaagtgagtcagggggaagctattgtcccaagttcctccctgcattttcctttcatcgtgaaagagatcgatggtgttaagagggtggtgcacaatccggagactgaggccatgacatacgattggatcgaacatctgaaaacctataactctcaatctagggctgcagcatatatcaatgagaagtacaataaggacttcgactacaactccctcgtaaagacaagcaaggacacactgctttatggttgctaccgcggcaatgaaaattactgtgaaccctacatgacgaaagaagagttcatgcagcttcaggaaaacctcaagaagaacatccgagtcaaaaagaacaaccatgtctatatcttctcctctaaaatgaagtgcccacggtgtggacaaagtttggtcggcggatggaccatgtacaagacgaaagagagcgacaagaattattcatactactacaagtgcaatttcgcccaccataagagaaagatcaagagtgcgaaagcctgcagctatactcgcgccattggagagaattacctcgagcagaaaatgatcaccaacctgaagaagtacataattgatttcatctccgagaaagaagcgaacgttaagaaggacgtacccaaaaacaccaaaaatattaaacggaagctgcaggatgaaattgagaggctcaacaagatgtaccagaagggcaggatcaacgaggaagactatgacgctgagtatgatagaatagaaaaaaagatcaacgccttggaagaagagaagaaagaaagctacgattcaaccaaacttgaggagttgctgaagaccgacgtaattgaacagtattataactctgacagattgactcgccaggggttctggaacaccctggttaaggaaatcgagattgacgagaataaggagatcgttagagtcgatttttttaggctcacatcaatg

SEQ ID NO: 996 - DNA, 1590 bp, unidentified
  source 1..1590: mol_type = unassigned DNA; note = Bacteriophage uvig_268018 from the Index of /pub/databases/metagenomics/genome_sets/gut_phage_database (ebi.ac.uk)
atggctcaggagaactatatcatctacctgcggaaatcacgcgctgatgcggaagctgaagcgcgcggagagggggagaccctggcccgacacgagaaggccttgctggagttggccaggcggcagaaacttaacgttactgacatctaccgagagattgtgagtggggaaaccattgccgcaagacccgtcatgcagagggtgctggccgaggtcgaacagggaagatgggccggcgtgctggtgatggaggtagaaagattggccagaggtgacactatggatcagggtctggtggcacagaccttcaagttcagtggagccaagatcatcactcctatgaagacctacgaccccagcaacgaatttgacgaagaatatttcgagtttggactttttatggcgcggcgagaatacaaggtgataaaccggaggatgcagagggggagggaggctagcgcccgggaagggaaattcctgggaaatcatccgccatacggctatgtgcgcaaaaaactggagcgggagaaaggctatactctggagccccaccctggacaagctgacgtcattagaatgatcttcgatctctatacaatcggatacccacttgaggatggcgcctatagacgcttgggtgtgtctctgattgctagaagactgaacgagatggccatacctcctcaaaagggcggggcatggtccgagtcctcaattcgggatattttgattaatcccgtgtatgccggcatgatccgctggaacaccaggcctcacgtgaagaggatggtcgacggccagatcacagttaccaggccccgagcccgaccagaagatagaatctgcgtgaaaggcctccacgagccccttatttctacagacacatttgacgccgcccagaagctgatgagttgtaataggccagctcccattggccgagcaaagggggtaaagaatcccctcgcggggattgtggtttgtggtgtgtgtggacgcaagttggtcagacgcccgtatccagctggcagggggcagcctgacacactcatgtgccctaacgcgtcttgctccaatgtcagctctgcccttcattacgtagaggagcatatactgtccgcgttgcgcgactggttggcagagtacaagcttaagctgttgacgcagggcgaaaccctgtcaccaagcgctctggcaagcaagaaaatgacgttgcgagtcgttgaggcagaactctccaaacttaacaagcagatggagcgactgcacgatttgctcgaacagggagtatacgatgtcgacgtttttctgaatcgcagccggatcctgggcgaacaaatagcaaaggctaaagcctccattgaggccctcaacgaagagatcaaactcgaagaagcaaggtcaggggcatataagaatatcattccaaaggttcaacacctgctggatagttaccatgatctcagcaaccctaaagcccaaaatgacctcttgagagaggtgctggataaagcagtgtacactaaaacaatcaagggtcggtggcatgctgctccggatgacttcgagataaccatctttccccggctctct

SEQ ID NO: 997 - DNA, 1539 bp, unidentified
  source 1..1539: mol_type = unassigned DNA; note = Bacteriophage uvig_490592 from the Index of /pub/databases/metagenomics/genome_sets/gut_phage_database (ebi.ac.uk)
atgccaacagtgacggtgatccagcctaccatttccgaggagcaaaacaccaaaattcgctgtgcggcctattgcagggtgtcaagtgactccgaggatcagctgaattccttcatggcacagatgcggtattacagccaagtgttcgacaactcagaaactgaggagcttattgacatctacgctgacgaaggcatcactggtacacgagaggataagcgggacgagtttcagcggctgatgaaagattgtcgaaaaggaaaaatcgatcgcatctacaccaaaagtattagcagatttgctaggaatacccgcgattgccttaagaatgtgcgcgaactcaaatccctgggcatcaccatctacttcgagaaggagaacattgatactgccaacatgacggatgagatgatgattaccataatgggaggattggcccaggaagaaagtaccagcatatcccagaatcttaggtggggaatcaaaaagagaatggaaaatgggactattaaaatgtgtacacccgtgtttggttacgagctggtcgacgggaacttgatcttgaagtcagatgaagcagagatagttaggcaaatattcgattggtatctgaatggctacggactggctgctattgcacagatgctgaacgccttgaaaatcgagcgattcggccgaacttctcactggacagcgtctactgtcggggtcatgctgagaaacgaaaagtatattggcgaccagctttttcaaaagaagtataccaccgatactctcccattccggcaagtcgtgaataagggtgagagagatcagtactattacagcgaccggcacaagcccatcatctctcgcgatgatttcgacaaagtccaaaacattctggcggaacacaagaaaagtttcaaggggctcaaacaggaccatattttcgcaaagaagatctattgcggagaatgtgggagcacctttaagttcaagtgcaggaagaataagaactactgggtgtgccgcctgcacgatgccgaatctgacaagtgtagcaacaagcagatcctggaagcaaatgctatttctgcttttatcatgctgtgcaataagctctggtataattacaaacagattctgctcccttgtcaggccgccctccaggacttgaagcttaaaaagttttccggcaaaacacaggttatggatattcacaaagagatcgccaaactgagagagcaggcccatgttctcgcaagattgaagacaaaagggtttcttgacgaggccaagtacctggagcaaacgactgagcttaccgctaaaatcaataagcttcagacagaattgaaaaagctcacacggagcgacgacgaggatgaaatgctggaacagatcgagatgctcatcgacttctttgagaaaagggaaaacatcatgatcgactttgacgagtcagccttcgaaaacattgtagagaaaatagtggtaatagaccagtatgagttggagtttcatctgataggcggcctgaagttcaaggaaaacatt

SEQ ID NO: 998 - DNA, 1464 bp, unidentified
  source 1..1464: mol_type = unassigned DNA; note = Bacteriophage uvig_220844 from the Index of /pub/databases/metagenomics/genome_sets/gut_phage_database (ebi.ac.uk)
atgaatgctgtgatctacgcaagattctcatctgatagacagaacgaagcgtccattaacgcacaagtcagagcctgtaccgaatatgccgaacgccacgacctgacagtgacgggtatctatgccgacgaagccatcagtggaaaggagtctaaaaccgctgctcgagcacaataccagaagatgctgagagacgcacataaaggactcttttccgtgatcttgatacataagtacgatagggtggccaggtcactggcagagcacgtcaacctggaagggcgcttgaaggcggataacatagaactggtggccgtcgcgcaagatttcgggaatactagcgaagctaagattatgagggcgctcatgtggtctatgtccgagtactaccttgataatttgagcgctgaggtccagaaaggtcacagagagaccgctcttaaaggactccataatgggggctacgctcctttcggctacgatgtggtgaatcagcagtacgtgatcaatgagttggaagcagcttatgtccgccggattttcactgcagctcaggaggggacgggctttaaaccaatcattgccgagctcgaggccgccgggattacaggcaaacgcgggaaacccattcgctacactcagatctatgagatgctgaggaatgagaaatacacaggcgtgtatctttacaccccacaggaggccaccgagagggcccaaagaaggcagaagccagaagcaatcagagttgagggagcaatccctgctattgtaacaaaggcccagttcatggaggtgcaggcgatcatgaatagtcggaagaatgccggccgaaaagcagactacatgtgctccggtctggtttactgtagctgcggcgccaagatgcacgcctgtaagagtacacgcaaaggacacacatattatcggtatgtttgctccgagcattgcggccggcccacagtactgatgagcgctgtcgacgaggccgcaataagatatctccgagagttgctttctgaacctaaccagatgcttattaccgctgctatgaggcggtatcagtcagattccaaaaaccgcctcacagctttttatgatgtgctcaatgcccgaattgcagagaagcaaaaagagtacgataccctgctgaagaacttgagcagtggagtgctgccgtcagacgttgtagccgacatcggccagcggatgactgagattaaagacgaaatcaaggctcttgaggccactgaaccccctgaggactacaccgtagataccatcacccggtggctgaacgccctcaagaacgaccccgacgaaaaggccgttaaacttctggttaagaggatcgatgtgagcggagacaagaagaacaacgtctttaacatacagagcaccctgaatacgttgctggaaataatggtggccgaaactggttttgaaccagcgacttctgggctg

SEQ ID NO: 999 - DNA, 1605 bp, unidentified
  source 1..1605: mol_type = unassigned DNA; note = Bacteriophage uvig_127324 from the Index of /pub/databases/metagenomics/genome_sets/gut_phage_database (ebi.ac.uk)
atgtacaatgccacaaagtatcttagactttcctacacctccgaccgggccaatgaaagcgattccatagcgaatcaacggaaatacatagatgagtttgtcaagagaaaccccgacatcaaaattgttaatgagcaggttgacgatggttatagtgggattgtttttgacaggccagcctttaagagtatgctggaagacattaaaagtgggaaaattaactgtattattgtaaaggatctgagccgactggggcgagaatacaacgagacattcacttatcttcgcagagtgtttcctgctctgggggtgaggttcatcgctatcaatgacaatattgatacagccaaagaggctgtcaccggcgatatctcagtgtcattcaagggcgtcatgaacgatgaatactgtagggatatatctgtcaaagtgaggactgcactgaatatcaagaggaagaacggggattatgtaggagctgtgcctgtgtacgggtataagaaggctgatgacaacaagaatcaactggtggtggatgagtatgccgcacaggtcgtcaaagacatctttaaaatgagaaccgacggctattctgccgagcgcatcgcgaatgaactcaactacctcgcagtgcttagcccacgcgaatacaagaaggacaataacatacctttgccaacaggaggctactgtgacaaagaaaactctaagtggagcgccactacggttatcagaatcctgaaagatgaaatctacactggtaaactgattcaggggaaatgtggcaagcccaactataaggtcaaggaatacgtgaaacggaatgcggacgagatgttcgtgactgagaatgcacacgaagccattataggcaggcaggatttcgagctggttcaaaaaatcatgcgcatcgatacacgaacttcccccaaaaagaacgaactgcatctctttagcggcattctgatctgcggctgctgcggcaacagaatgactcggaagacggtcacccacaatggagaaaagtatttctactattattgcccgaccggaaaaaagaatggatgtaccggtggtaatatgattaaagagacagacttggtgaactgtgtaaccgactccattaaaggccacattaagaacgtagccagcctcaacgctctgataggaggaatcaataataacgctataaacaaggatatgtgcaacaagatttcagtgcagatctccgaagtgcagaaacagttggacaagaccagcgagtataagtcaacactctacgaaaactatatttctggtatccttaacaaggaggattacaagagtctcaatacatcttactcaaaggacaaaaagcgcttggaggatgctctcaagcaactcgaaaccgagttggacgagtgccgaaataatacctccaaaaaactccagtggatcgagcggttcaaagccttcgaaaacatcgacaagatagaccggaacatcgtgatccgcctgattgagtgcatccatatctacgacaagacgcatattcagatcgcctttaatttcaaagacgagtacgagcaggcactctctgcactgaacgagtatagggaggttgtg

SEQ ID NO: 1000 - DNA, 1629 bp, unidentified
  source 1..1629: mol_type = unassigned DNA; note = Bacteriophage uvig_418530 from the Index of /pub/databases/metagenomics/genome_sets/gut_phage_database (ebi.ac.uk)
atgtcattctccccaccgcgaaaagccgcgctttacgcaaggtttagcaccgaacaccagtgtagcattgagatccagttcgccaaaatgcaagaattctgtttggcccaaggtttttccgtgagcccccttcatgcctactcagatgaggccctgtctggcatgcgaacggcccggagatcagggtttcaggaccttatggtggccgccgagaggcacgagttcgacgtcgttgtgctgtatgatctgactcgagggtctagggaggtggtggattggttcacatttcggaggaagatgcagagcctgggcatccaggttctttccatgcacgaccgcctcgggaatctggacgaccccgctgacttccttccggaactgatatccgtagggatgggacaagttcatgtccttacaagtcgcttgaagtcaatggataaagttgacttcttggcacaacaggggaaatttctgggtgggtacgccccattggggtacgagattaaagatggggagtattttatctgcgagcgggaagcggcttatgtgcgcaccatctacgcaatgtatgcggacggaaaaagttacaatgagattcttgccgctctcccctccgctctgagaggcaagagaggccggcccataggtaagaattctctgtacaccattctccgaaatgaccgctatattggaaggtattcatggtgtaagcgacaggtcaagtacttctccgaatgggccggcggcggccagtccgacagagcagttatcattgaagatgctatccctgccatcatcgataaagctacctgggagcgagtacagacccggatgcaagaaaaccggattaacaagactaatcacagctcagctcatagagaatatcttctctccggggtgcttttttgcggctcctgtggagcaagctttttcggtgccacaacaatcaacaagaaaggtttcgagtataagttctacaagtgtggtaacaagaaccgcaccggcacttgtcatagcaaaaatatttcagcgaacgacatagaacctctcatcgtgaatttgctcagaaatgctctgctgaacgggtccctgatagaaaagaccgctgatgcaatactgtctgtgggagcaggaaatagttccactgatctgaaaactttgaacgcccagctcgcgcagttggatctcaagatcagcaatctggtcgacgctctgtctaacggccttagcagcgacgccgtaagagagaaactcggcctgctggaatctgagagggcagccctgaaactcaaacaggatagccttgaaccctgccatgagactcttgatcgggattttatcatttcagagctccaacgcgactgcgagatcctgcagaacagtccttctgcaatgaagcagcttatcaagaagtacatccctcacattgacgtcttcgatgaccacatcgaaattcactgcgtggccgatctggccgctacaagtggcattccacttaagacgaagaaagacggagtcagtaacatcagtgcagagaacacaatcacgaatggatgcggatctgcacagcacggcgtgctcgtgtttaccataccaaggagcattctggctctgttgaacttttctgcc

SEQ ID NO: 1001 - DNA, 1572 bp, unidentified
  source 1..1572: mol_type = unassigned DNA; note = Bacteriophage uvig_169032 from the Index of /pub/databases/metagenomics/genome_sets/gut_phage_database (ebi.ac.uk)
atgaaaagggttctgtgtctgtaccgagtgagcaccattgggcaggtcgatcacgacgacatcccaatgcagagaatcgcatgcagagaattcattaaccagcaccctgactgggtgctggtggaggagatctccgagaaaggggtgtctggttacaagaccaaaactgaggacagagacgctctgacgcggattaaagagaaagctctggcaaagaaattcgatattctgctcgtttttatgtttgatagaatcggcaggcgcgacaacgaaactccattcgtcgtgcagtggtttgtggaaaacggaatcgaggtttggtccaccaaggagggtgaacaacggttcgacaatcatgtggataagctccttaactacatccggttttggcaagctagtggcgaatccgagaagacaagcatgcggataagaacgcggcacttgcagatgattcaagaaggattgtatcgcggaggcctgattcctttcggatataagctggaattcatgggacgcactaataagaaggggcagccggtccgagacctggtgatagacgaggcggagagcaaaatcgtaaaagagatctatcataagagtgtctcagacgggtggggcgcgaacagaatcgcaaattggctgaacgaaaggggcattccaactaaaaggcagaaaaccttttggcgggccacaagtattcgggcactcgtccgaaaccccatctacacaggtcgcattcgatttgggggtgatctgtcagagcctttcgatcatctgagaattattgatgacgatttgttcggcctctgcgaccagactattgagggtcggtgcccccgccaccccgataagcgagtaggccatttgaggagcacaagcaacgggctcctcactgggattctttactgtggctcctgtggcgagcgcatgtgcttcaatcacaacaccaccgtgcgaattcttgccgacgggaccaaaagatcttatgagcgagatgtttatagatgttatcgcaagatccatagccggaggacatgccagggaaggtctacatatagcgccgaaaggatcgaaaaggatatactggccgtagtgcatacctactttgagaatataaggtctaagcctactctccagatgctggccgccgccggaaacagaaaacgctcaatacaacaagacgctatagcccaggctgaggccgcgctcaaaaaggcccagatcgaactggcagccctcgaagatgcggccgttaaggcaataacgggcgagaccaatatggatctcgagcttatcaattccctgtttcccaagcgacgcatgaatttggacaaggcaatgcaggaggtggagaggctcagggccgaactggcagattctgaaaagcttgagtcagctgctaaccacgaattgaatatgattctcagttgggctgacacctttgatgctgcctcaagagaaacccagcggtccatcatcgccatgctgatcgacaaggtcgtcgtgaacacaaattaccacctggacatccacttccgaatcacagctcagcaataccttggaaaagcatct

SEQ ID NO: 1002 - DNA, 1497 bp, unidentified
  source 1..1497: mol_type = unassigned DNA; note = Bacteriophage uvig_572866 from the Index of /pub/databases/metagenomics/genome_sets/gut_phage_database (ebi.ac.uk)
atggatgccatctacgcccgccagagcatcgaaaaaaaggattcactgagcatcgagcagcaaatcgacatgtgtaagaagagtgcagccgacgccgtcgagatctacaaagacatcggttacagtggcaagaataccactagaccagacttccagaggctgctgggcgacgttaaaagtggcacagtcaatagagtgatttgctacaggatcgatcggatatctcgaaatcttctggactttatgaacatttggcagctcttccagcagaatcatgtggagttcataagcgtgtctgagcaattcgatacttctactcctgtgggtaaagctatgctgtacatcgcaatggtctttgcacagatggagagagaaacaataggaacgcgaattacggataatttttatgcacggacagccgctggggcctggggcggaggtccagcaccgtacgggttcaaaaaggtgcgcgggatgctccatgggaaaactcagaccctcctggaaccagtacctgatgagcaggaaaacatcaagtggatgtttaccgaatacgcaaccggactgcggtcacttggctggcttggccgggagatgtggaagagagaccctgatagagggattagatggactaacgttagtttgcggagaattctcattaaccccctctatgctgcagctgacgccgatctctatgccttcttttcccgaagtggaattaacatcgtgtctccactggctgcctgggacggcaaacactcagccctccagaccggttcccgcagcgccgacacaagggtgcggaggcccatcagtgagcagcagctgtccgtttttagcacgaaccccgtggtctcttcccaaacatatatccgcgtgcaaaagcaactggctaaaaataggcaaatcaagaatacaggcaagggccagtggtcctggcttagcggcaagataaagtgcgcggagtgcggatattcatgcaccttgtgtcacagccctggagtaaccaggacgaaggcctacatccgctgttccggaaggtatgggcaacttgcggagaagcggtgtaccacaagacatactgagactattgagtccgttgaggagtatgtgcttgcccagttgaaagaccacctgtctggcgtcgctccatctaagcgctcaaaaaagtccgctgcccaggagaggaagcgcaacgaactcaaactgcaactgatagaagtgcagcagaagcagcagaacgcagcggcagctattgccgagggtggggctaccatcatgcgcttgatgatgcccgaaattgagaaactggacgcggaagccaccaaaatcacagatgaattgtccactttggccgggagcgaacagcagtcttggatgccggacatggcactggacttcgacgcgattgatgatacaggactgcgggatctcgtcgctttgaccatagataaggttctcgtaagcccctcacgacctcccgaaatcatttggaaa

SEQ ID NO: 1003 - DNA, 1557 bp, unidentified
  source 1..1557: mol_type = unassigned DNA; note = Bacteriophage uvig_327543 from the Index of /pub/databases/metagenomics/genome_sets/gut_phage_database (ebi.ac.uk)
atgaaaaaagtgacaaagatagacaagatccaaccagctaaaaacgcagagaacaagctcagagtggccgcttattgtagagtttccaccgctacagatgctcaactggagagccttgaggcacagaagaatcactacgaaaactatattaattcaagagatgattggtgttttgctggcgtctactacgacggaggcataactggcaccaaggcgtctaagcgccctgagctcatgcggctgttggccgattgcaaagctaaaaagatcgacttcgtcatcactaagagtatctcacgcttctctaggaacaccatggactgtctgaaaattgtgcggaccctcctgaacttgaatatccccgtatactttgaaaaggagaatattaacactggatccatggagagcgaactgtttttgtccgtgctgtcaacaatggccgagggcgagagcgctagtatcagttctaacaatagatggtccatcaagaagcggtttggtaacggtacttaccggctgtcttccgcaccatatgggtacaagctcgaatccggtgggcttcaggtcgtttctgaacaggccgatattgtcaagcggatctttcgagagctgctgtctggtaaagggatgtattcaattgccaaagagcttaatgcggaacaggtgcccacgcagaagggcggacggtggactagcacgagcgtgcacaacatcttgaccaacgaaaagtacacaggagactgtattttccagaagacctacgccgatagcaatttcaatcgccacacgaataacggcgaattgaacagatacttgatacaaaatcaccatgaggcgatcatatcccacgaggatttcaacgctaccgcggccctcattgaacagagagccgccgaaaaaggaatcgagagcggcaacgataagtatcaacaacgatacgcattttctgaaaaacttatttgtggcgagtgcgggaatacgtttaggcgcaggattcataaagggaagtataacagttacgtcgcctgggtatgcaatacccatctcagtgacacaaaccgctgctctatgttgtttgtgagggacgacgcacttaaactggcattcgccacaatgcttaataagctgatattttcataccgactgttgctgaaaccttacctggccgcaatgcagtccaacactgctgatgaggcactcctgcggatccagtatctggagaatcagctggaccagaatgctgagcaaagaagcacattgcacaaactcatggcacaggggtatatagatcagattatctacacacaggagagtaacgagctcctgttgcaggcccgcgacttccggtccgagattgaggccctgaacaatactgtggccggagacactaccaaggtgtatgaaaccgagaggttgattaattattgcaagaggggcgaaatgttgaccgacttcaacgagagcctcttcgaactgtttgttgatcatatcctgatctattcacgacagaaaattggattcgttcttaggtgcgggctcacattcgaagaaatgatc

SEQ ID NO: 1004 - DNA, 1518 bp, unidentified
  source 1..1518: mol_type = unassigned DNA; note = Bacteriophage uvig_177600 from the Index of /pub/databases/metagenomics/genome_sets/gut_phage_database (ebi.ac.uk)
atgtactgtatctatcttagaaagtcccgcgccgatatggaagctgagcgacagggaattgacaccctcgctagacacgagaagatcctcacgtcatatgccgctgagcacggatactccattgggaagatctaccgcgaggtcgttagcggagatacaatcgccgcacgccctcaggttcaacagatgctccaggacgcggaagcaggcatgtgggagggcgtgttggttatggaggtggaacggctgtctcggggcgccaccatcgaccagggaattatagcccaagtattcaagttttccaacaccaagatcataacaccttacaaggtgtacaacccgaacgatgagtatgacgaggagttttttgaatatggcctgttccagtctagacgagagtataaagccattactaagaggcaacaaaggggtgtgcttcagtcttgtcaggaggggaagtgggtgtacaacaaggtcccatatggctatgagcgatataagctcgaacatgagaaaggatattcactcaggattgttccagaacagggaaaagtggtacgcatgatctacactctgtatcgcgatggtatggggtacagcagcatatcagattatctgaataatatgaatattcctgcccctggggaccactggacttataacacagtctgcagcatacttcagaatcccgtatacaacgggaaaatcaagaggggtgcccgggctgtcgtgaaaacaaccgaaggcggcacgcttaagagttcacgcccaagaaacaagcattacaacatctatgaaggcttgcatgagcccattattgatgacatcctgtggcgaacagtgcaagataagttcgccacacacccaagcaaacccgtggcaaaagctttggagattaggaaccccctggcagggctcgtgtactgccaagtgtgcggtcacaagatgattagaaggcctcaggaccggtgcagaaccatgattatctgtcccgttaaaagttgtcacaatatctcttgctatgagtctgtacttgagcataccgtcatagattacctgtgcaagtaccttgaggaactgaaaactaataccggcattagcatcgacactaccacactggaaatgttgaaagcgtcccttcagaaatccaacaaggaaatcgagcagctgaacaatcagatggacaatgcttacgacctggtcgaacagggggtgtacagtgctgatatattcatgaagcggcagaaaagtatcaactgtaagctggcggcagaaaaattgaaaaatgagggcattacggcacaaattcacaaagaggagaaggtgatccggcagagagacaccctcattccccgaattgaaaatactcttaatgtgtactgggatctggaccctgccgagaagaataggatgctgtgtgatatcatagaccatatcgaatacgtgaagaaagaacggtccaagaaaaacggaccatacaataactttcagatcgtcgttcacccgcgaatcccagtc

SEQ ID NO: 1005 - DNA, 1587 bp, unidentified
  source 1..1587: mol_type = unassigned DNA; note = Bacteriophage uvig_457951 from the Index of /pub/databases/metagenomics/genome_sets/gut_phage_database (ebi.ac.uk)
atgaccgagaccaatatctccactgccagagtgccgcaggtaactgtaatcgacccccgcatcccagagaaggctaaactgagagttgccgcatatgcccgcgtttcttctgacagcgaggaccaggtgaatagttatattgcgcaggtcgatttctacagcaagtacattgcggggaaagaagaatgggaaatggttgatatctatgcagatgaaggaattagtggacttgaggcaaggaaccgagatgacttcaacagaatgatgactgattgccgggagggcaaaattgaccgagtgctctgtaaaagtatctcaaggtttgccaggaacactcaggaatacatccagttcgtgcgggagcttctccggcttggcatctcaattcacttcgagaaggagaacatagacaccggaaaaatgacatcagagcaagtagcccagatctacggggccttcgcccagatggagtctacgaaccactcctctaatatgcggttttctgtcagaatgaggatggagaagggactttttgtgccttccagtgtcccatacggatatagactggccggccgcgatctcgaaataattcctgaggaggctgaagtggttcgcagaattttttcagcttacctcagtggacaagggaaagatgacatcgctcgggagctgaaccagctcggcgtggatcgagggcgcaacagggaaaagtggcaccctagcactgtggcctacatcctgaccaatataagttataccggggatatgatatggcagaaatcatgcgccacagacacaatccccttccgacaggtcagaaatctcggccagaaacccaggtacttcgtggagcattcacatccagccattgtgagctgtgcggactttcaacgggtccaagaactgatgtccagccgaaagggccagtttcatggtacccaccgaattagcaagggttccctgtatgataaacacatctactgcggtgggtgtggcagcttgtgtcgaaagaaaattacggtaggaaagacatattgggtctgcaggcgacatgacggcaataaggcagactgcccaactccgcagatccccgagccagaaattacagctgcagtgcttagactgtaccacaagcttaaactgggtcaggagacagttctgaggcccgtgttgtcccaactgcaggaattgagagaacgggagctcaggagcaatcgaaagatctccgacatcgacaacgagatcgctaggatctctgaacagaaccttgttctggtccggttgaagtccaagggctatgtggattctgctctgtacctcagccaaatggacgagattgacaggaagctgcgcgagttgagaaagctgcggagacgccttctggaagcagccggtgaggaccgccagatacatgataccgagaggatgatggaatatcttgaggatggccctgaatggcttgatgaagtgcccgctgagctgttcggggaactgattgagcgcatcatcataatttcccctgagagactcaaatttcggctgcttaatgggatggaattggcagaaaacatagagcgcaccgtgcgg

SEQ ID NO: 1006 - DNA, 1425 bp, unidentified
  source 1..1425: mol_type = unassigned DNA; note = Bacteriophage uvig_580269 from the Index of /pub/databases/metagenomics/genome_sets/gut_phage_database (ebi.ac.uk)
atgactacagccgctgcctatatccgcgtaagcagtgaacgccaggacgagtattcaccagactcccaaaagaaacttatccgggagtacgcgaaaaagaacaacatcgaagttccggaggagttgatcttctttgacgacggcatttcagccaaaaccgcaaccaaacgcacgcagttcaacagaatgattgctctggcgaaagagaaggaaccacctttttccgctattctcgtgtggaaattctctcgctttgcacgcaaccaggaggaatccattgtctataagaacattctcaggaagaaaggcatccaagtgatatccatatccgagcccataatcgatagcccctttggagacctgatcgaaaggatcatcgagtggatggatgagtactatctgattaatttgagcactgaggtgaagcgaggtatgaccgaaaagcttagtagaggagaggctctctgccctcccgcatacggatacgatattcaagacggtaagtacatcattaacagcgatgaggcgccacacatcatagagattttcaacgattttctttccggcctgccgatgcgacaaattgcacttaagtgtgccgccaaaggcctgaggacacataggggaaaccccttcgaagctaggactgtgagatacattctctataaccctgtctatgtcggaaaaatcaggtggtcaaccgacggtagagcttctagcctgcgggatttttctaatccaagcactgttatagttgatgggatccatgaacctatcatttctcaggaggtgtgggaggcaacacaggccaagctgtcaaaaattcagactatgtatgggaagaatcagaggcccgaccaacaggtcgaatggatgctcaaagggctcatgagatgcgaatgtggcgccacgctcaccatgctggggacctcatgcccaagtatgcagtgttacgcctacacgaaaggcacagggaagtgcgtaacctcccactgtcttagtatttctaaagccaataagttggtgattgcaaatcttgaacgattggtcaataacaagcagttcaattttgtgcctgctgagaacatcacacagaccgtggactacgatactctgatcaagaaggaatacgcacggctggctagggccaaggaggccttccttgcggagatcgacactgttgatgaataccgagaaaataaggcacggatcaccaaaacaattaaacagctggaacgggagaagtcctctcataaggtcgaggaaatagacgtggacgagtttagtgagagaatcagacaggtactgcgcacaatcaccgatgccagcgttagcgaaaaagctaagaatgagacattgcggactgtgatcgccaaaatagtgtatgagaagtctaaaaagcggctggtgttcttcttccacacc

SEQ ID NO: 1007 - DNA, 1551 bp, unidentified
  source 1..1551: mol_type = unassigned DNA; note = Bacteriophage uvig_576757 from the Index of /pub/databases/metagenomics/genome_sets/gut_phage_database (ebi.ac.uk)
atgaataaggtctggaatgttgcaatctatgccagggtatcaactgataaaaaagaacagagcgaatctattcccgttcaggtcgaaaatctgaaaaaatggctcctggaaaaatccaaaacagataccgatgcgatctacaacatggtggatatctatgaagacaacggtaaaagtgggagtaatttcgatcgggacgagttcattaggatgaaaaatgatatcgagaacaagaagattaacatggtcatcacacgggacctgtcccggtttagcagaaactacattatggccggctattacctggaggactactttaaggtgaacaacatacgctttatcagcgtactcgataacgtcgacacgataagcgagtacaatgacatcattccgttcaaaaacatcctgaatgaaatgtacatcaaggattgttctaggaaggtgaagagtgccttgaatacgcgcatgcaaaatggatcttctatcgcttctaaacctccttacggctataagtttgatgaagtgtacgaaggcaaccaaaagaaaatagtgctgataccaagactcgacgatacaaccgaagtggttaaagaaatctattcattgtaccttaatgggtggggagctggaaaaattgccacctacctgaataacaaaaagattcccactccctcccaaaatattaagaatttcgcacgcgcaaagttcggtaagtggaataataacacaataatgtcaatcttgcggaaccctaagtatgggggttatatggtccagggacgatacaagaaaccctcatataagtccaaaaaaatcattctggctagcagagacgagtgggtgtacggcggggaatttgatggtatagtttccaaggaggtatttgacaaggtacaggaggtcatgaatatcaggtcctccaagaactataggtataagaacggagtgattcatccattctctactgtgctggtctgtggcgggtgcaggggatcaatgacttatcgcggaaagtatgaaggttacaagtgcgccaatagccagatgggcgggaaaagatgcaccccacactctatcaaggagaaggatctgatagagattgtgagtatcaacctgaaagagctcatctccaagtacatcgacgagaaatccatctgcgagggctacgataagatacagatcttcgacaactcccagaaccaattggacggaattgaggagaagatcaccagactgaacattaagttcaagaagctttacgaggacaaaatagacgggattatcagcgagtacaacttcagcaatatgattgagtctttgcagatggagcaggaacagctgcttaaaaaacgagagaagttcattcgccttattaataacaagagtatcaaaaatgacttgctcagcgagtataagggccagttgaagcagctccttaacggcgaatgtatcgatcggaaactgattgagtcactcgtggacaaaatcgtgattaacgaggttggcgggaatcgagaaaaagaagtgaacatctattttaagtttagtaat

SEQ ID NO: 1008 - DNA, 1563 bp, unidentified
  source 1..1563: mol_type = unassigned DNA; note = Bacteriophage uvig_157917 from the Index of /pub/databases/metagenomics/genome_sets/gut_phage_database (ebi.ac.uk)
atgaagaatggcaactacgcaatgtacctccgaaagagccgagccgacagggaagcagaagcccgcggtgagatggaaacccttgcgcggcatgagaaattgctgttcgaaaccgccaaaagaatgcaaataactgtgtcagctgtttacaaagaaatagtgtctggggagactatttcagctcggcctgtgatgcagaagcttctcgtcgaaattgaacaggggatttgggatggcgtcctcgttgtggaagttgagcggctcgctagaggcgatacgatcgatcaagggatcgtatcacaggcgttcaaactgagcgacacaaaaatcatcactccagttaaggtgtatgatccgaataacgagttcgacgaggagtattttgaattcggtctgtttatgtcccgaagggagtacaacacaattaaaagacggctgcagcgcggcaggctggcctctgtgcgggaagggaaatacgtggggaatcgacctccctacggatacgagagggtgaagattcccaatgacaaagggtttacattgtcacccctgcccgaacaagccaaaatcgtgaagtatgtttacgatctctacgcctatgggctggacggagaggagatgggaaccgcaaaaattgtaaggaaattgaacgacttgcaaatcccaacccaatctggcggaaagtggatccctcctactatacgcgatatgctttataatcctgtctatatcggcaagctcagatggaacagacgcgctgctaccaaaaaagtgtgcgatggcaaaattacatattctcgcccaactagtaaggagtatgagatctgcgacggcctgcaccccgccatcattgacctggaaacctttaagatatgtcagaagaaactttcaaagaaccagagcagaccgatcagcctgaataagacaatcaagaatccactcggcggacttgtgatttgctccaagtgtggacacagaatggtaaggaggccctatagcaagacaggtcagcggtctaccctgatctgcccctacacacattgtgacaacgtcagtagccctctggaagatgtcgaaaccatggtgctcgaggcaattgctgatattgttaaaaacgagaggatcgagcctactacctccgtaatacccagcgacacaatagatattctcaaggacgcactgaagaatcaggaaacatctctggagactctccaaaagcagcagaatagtctctacgatctgctggagcagggtatctacaccaccgacgtgtttctcgagagatccaacaccttgaaggatcagattaacacggcaagtgcgtccattcaggacctgaaacgcaagatatccgccgagcagaatcgcttgaaggtccaggctgatttcatcccaaagtgtgagtacctgcttgacgtctatgacacgctggacgccccggagaaaaaccggatcctcaaggaactgattgatcacatcgactacttgaaagaggagaagaacgtgcctttcacgaagaaagatgccaaggtctttatccatgtgtatccaaaaactccagaa

SEQ ID NO: 1009 - DNA, 1530 bp, unidentified
  source 1..1530: mol_type = unassigned DNA; note = Bacteriophage uvig_555782 from the Index of /pub/databases/metagenomics/genome_sets/gut_phage_database (ebi.ac.uk)
atgcccaaaaacgctgtgatctacgctcggttttcatccgagaaccaacacgccgagtctatagaggcacagatcgcagaatgcagcgcttactgtcgaaggaaaggatatgccgttgttaagacgtacgccgatgaagcgatcacaggcaccagcaccgccaaacggcgctcttacaacaagatgctcagtgacgcaaggataggggtcttcgacatagtgatcttccacaaaattgaccggaatgcgcggaatgagattgactattataggtttaagcagtccatcctggctctgggtttgacatatgaatacgccgcacagccgatagatgctacccccgaaggtcagttcatggaagcagtgatggtaggccaggctgcttactattctcgcaatctgtccaaggagaccaagattaaggccatccccttcgccaaaaagtcaaactttatgggaggcgtcccaccactgggctacaagatagttgataaaaagtacgtcattaatgaggacgaggcacacattatccgcagaatcttcagcatgtatctggctggtaagagttatgcgtccatcctggacgatctcaacgggagcggttaccgcaccagacatgggaatgtgtttggaaaaaatagcttgcacgacattctgagaaatgtgaagtacgcaggaacctacatctacaacaaggtcgtgaagcttcccaatggaagtagaaactctcatggtgagatctctccggaagctatcattaatcagggggccctgcctgctatcatctccgagattgacttcgagagggtgcaagaaatgttgaataagagaaagaacagccctggccagttcacatctaaacgctcatacatcctcagtgggctcgtgcggtgtgggatttgcggaagaacgtacctgggccacactaagactatccggggcaaggtttatagttactatgaatgtagcggctcatatagcaaaggacgcaaggagaaatgcaagaacgcccatcttaacgccgagaaactggaagatatgatcatcaatgccgtcctggacaatatttgcgaagaggaccttgacaacattttggaggatgccgaaaaaatcataaacggcaacgcggaggtgaaagagcagctgtccaaccttgagaaaaagaaaacaggacttaaggtccgaatgaataacctgtattcagccgtggagaggtctggcatggatgagtttgatattgagaggctcacgaccctgaagaccgagctcagaactattgaaaaagagatatcccaactcagggtgcttcccgagttgcatgtgactcgagaagaattgcaggcctgttggaaagatttcgtatttgcattgaaacaaaagacagatccaaccttggtgaagagtgtgctcgagcggacaactagcgtagtcgttatgcctgatgaactgattgtcacaattgacgtagcctcagtgttggttcctggcactgggatcgaacctgtgcgagtctccctgccagaagggttt

SEQ ID NO: 1010 - DNA, 1503 bp, unidentified
  source 1..1503: mol_type = unassigned DNA; note = Bacteriophage uvig_193710 from the Index of /pub/databases/metagenomics/genome_sets/gut_phage_database (ebi.ac.uk)
atggccgagattacgataatccctgccaagaatcacgctgacgaaattgtcaggaccgctgcctatgcccgagtttcatctgattcagaagaccagctcaattccttcgccgcgcagatcagatattacacagagctcctgcaaaactccactgatgcagtgtttgtagacatgtatgctgaccagggaatcacaggaacaagtgccgccaaaagaaccgagtttcagcggctgatgagcgattgtcgcaagggaaaaattgaccggatcctgactaaaagtatttctagattcgctcgaaacacgaaggattcattggaagcagtcagggaattgaagactttggggatctccgtgtactttgagaaagagaacattgataccggagagattagttcagagatgatgcttgccatctacagccagtttgcacaggaagagagtatgtcaatatctaggaacgtgcggatgggctttcagaagcggatggcagatggatcttatgtacccagtgctgttccatttgggtacatacgcgagaacggcaagttcgtgatcgataaagagaaagcggagatcgtgcggggcatttttagcgactatctcaatggggtgagcgccgaatggcttgcggaaaagtaccgggtcaagcttgcaactgtcaagtatgtgctcacgaatgagaagtacacaggcgactccatttttcacaagtggtatacaaccgatactctgcccttcgattgcagagaaaatagaggtgagcgcgacaagtattacgtaagcgaaacccacccggcaataatcagccgagaggtcttccagtccgtgcaaaggctgatcgaacgcaaaggcagagcacataaaggcaaaaccacacagtcctacccattgcgaaaaaaaatctactgcggcgagtgtggcaccttgtacaaacgcaaggaaagaggcagccgcgtgtgttgggtctgccgcaatcatgattcttctgccgacaagtgctccgccaagcagattgacgagagagagatctacggggccttcatcgttatgttcaacaagctgcttcaaaactacaaagttattcttgtgcctctgcaaagacagattcaggaacttttcaatctgaagatgcgcgagaatgcgcagatcgtccagcttaggaaggagctggctgagagccgggaacaagcttacctgattgccgggctccggagcaaggggatcctcgatgccgcttattatacagagaaagcagctgcactcgagaagaacattgattctttgcaaaaaaggttggacgcttttgaggaagacgacgaaaacgggcgaatcctgggcaagttcaggaagctgattggtatctttgaaagggccgaaactattaccgaattcgacgagatcaagtttggtcagatcgtggagaaaattaccgttctgtccgagtcaaaaatacgattcgaactgataggtggaataggattcgtggagcagatcatgagg

SEQ ID NO: 1011 - DNA, 1452 bp, unidentified
  source 1..1452: mol_type = unassigned DNA; note = Bacteriophage uvig_363401 from the Index of /pub/databases/metagenomics/genome_sets/gut_phage_database (ebi.ac.uk)
atgagtaacaatactcccagctccctccccgacttgcgcacaggcgcattgtatatcagggttagcacccatgaacaagacgacctgagccccgacgctcagactaggttggggctggactatgccaagagtaacaatatcattgtgcccaaggattacatcttcgttgagtcagtttctgggcgcaaggccaagaacaggcacgaatttcagcggatgataggtctcgcgaagagtccagaacatccaatcgatgccataatcgtctggaaattttcccgattcgccagaaaccaggaggagtcaatcgtctataagagcatgcttaaaaaagacaacgtggacgtcattagtatctccgagccacttgtagacggtccctttggctctctgattgaacggatcatcgagtggatggatgaatactactcaattcgcctctctggagaagtgctgaggggcatgaacgaaaaagctctccggaacggctaccaactgtcccctcctttgggatattccgctgtgggcggaggaaatccgtacatcatcaacgaggacgagtacaagatggtaagctacattttcgagcagtatgacgtgtacgacaaagactggacagctatcgcaaggtcaatgaatcaaaaaggctggaagaccaagcgaggctcagcttttgatatcaggtccgttgaacgggtacttaagaatcctttttactatgggctggtggtctggaacgatacaagcttcatgggaacacatgaagttaggctgaccaaagagcagtatgataagcgcatagagaagatgcagaaacggtaccgcccaattaagagaagaaacccgtccacttgtttgcactggctctctggggtgctgaaatgtggtcactgcggggccggcctggtgtacaacagcgcaaatcggtgccctaatttccagtgttggagatacgccaaaggtcttcacaaagggtctcactgcatcagcgagaaacgagtggtagcagcagtgtacgaatatttcgaacagatacttgacggaaacccctttacatatacctatagagctccaatccagcccgaaacagatgatgcccgcaagtccctgctggacgagctggagaaactgaaaattaaggaacaacggataaaactcgcgtacgaaaatgagattgatacgttggaggaatacaaagaaaataagctcagattgaaggccgcccgagagaagattgaatctgagctcgaggagattgctgccgaggaggcccagaataagcctactgggcctaccaaggaggaggcactggcgaaggtgaagaccgtgtacgatataatttctaatccagacgtcgattatacgaccaaaggcaacgtcctgagatcattggtcgagagcattacttattataaagaggatgagaagctcgaattcgtgttctacatcagt

SEQ ID NO: 1012 - DNA, 1521 bp, unidentified
  source 1..1521: mol_type = unassigned DNA; note = Bacteriophage uvig_195006 from the Index of /pub/databases/metagenomics/genome_sets/gut_phage_database (ebi.ac.uk)
atgcgcaaaaaagtggcctaccttaggaaatctcgagccgatatagaactggaaaatacaaccggcgaggacactctgaaacggcacagggagatcatcaaaaagctcgccaaacagaacagtgtcatcctcgacacctattttgaggaagtggttagcggagagacaattcaagctcgacctaaaatccaggagctgctcaaagaagtagaaaacaacgaaattgatgaagtgtatgtcgtggatgtggataggctcgccaggggagataccgaggatcaggggcgcatcagcaaaacgtttaagttcggaaatactaagattgtgaccccgggtaaaacctatgacccaaataacgaattcgacgaagacttcttcgagtttggcctctttatgagccgccgcgaatataagataattaacaagcgactgaaccgcggtcggctgagctccatcaacgaagggaaattcatcgggtctgtgtgtccctatggatactccaaggagaaattgaaaggccagaaagggtataaactgatcatcaatgaagaggaggccaagattgtaaagatcatcttcaatctcgctctcagcggtattggagcctctaacatcgcaaatcacctgaatcgcataggctcaaagccccggaaggccgagatttgggtgtctgctagcataagagatatcatacacaaccctgtgtactacggaatgatcaagtggaattacagaaagacaattaaaacgatgaagaacggcattatctacaaatcaaggccaaagcagaaggaatacattctggtcgagggcctgcacgaggctataattgacgaggagacttggaagatcgctaataacaactcaaaaatcaaagaaggcaaaagtgtgaagaaggacttgacgctgcagaaccctttggcgggtttggtagaatgcggcatttgccatagaacaatgcagcggagaaactacagatctgggcatattgatgggcttatctgtcccctgccccattgcaagaatgtcggcagccatttgcacatggtcgagaatgcaatcctggactccctgcaacgatatctcaatcagtacgaggaaaccctcgcgtcatataagaagaacgagcaagtccatgagcttgacacaaataacgttgagttgatagagaaggaaattgagaagacaaaaaaccagctcaacaaggcatttgatctgctcgaacaagagatctacgataacactaccttcatcgagcggtccaaaagtcttaagatcagaatcgacgagcttaaaaaggagaaggagaagtactccatcaaaacaaaacaggagaagattgagaagataaaggacattataccaaaactgagaaatgcaattaatacttattcaacttctctccctgccaccgaccggaatgaactgctgaaatccgttattaataaggtgtactatatcaagagtgttagggggaagggacacgaagaggaatttgaactgcagattaacatcaagctt

SEQ ID NO: 1013 - DNA, 1533 bp, unidentified
  source 1..1533: mol_type = unassigned DNA; note = Bacteriophage uvig_180433 from the Index of /pub/databases/metagenomics/genome_sets/gut_phage_database (ebi.ac.uk)
atgctttggaacatcggtgtatatctgcggctgtctaatgatgacggcgacaaagctgaatctaactcaatctccagccaacgcaccttggccctcgattacataaagaaaaatatcagcgatggggagatcatcgaggtctttatcgacgatggattcacaggaacgaatttcaacagaccagactttaaaaggatgattcagttcattgagaacggggagattaactgcgtgatcgtgaaagatctgagccggtttggacgagactatataggcgtcggcaactacattgaaaaatatttcccccttcatgatgtccggttcatcgccattaatgatggatacgattccagcactaagaatagcagtgatgacttttccatgccaatcaaaaacatcttcaacgcccactactcaaaggacatctctaaaaaagtgaagacaagctttcgcaccctccagaatcaggggcagtttgtcggtgcattcgcttcctacggttacaagaaagacgagaataataagcacaagctggtgatcgatgagcccagcgcaatcatagttaggaaaatctttaacctcttcctctccgggaacggcaagaactcaattgccagaatattgaacgaagacggaatcccttgtcccagtgaatacaagcgcctgaacggcctgaaatataccaatgggtctaggcttgaactgactaagtattggacctacccgactattaattcaatcctccataatcggatgtacatcggtgatatggtgcagaataagtatgggcggaagtttgtgagaggcaaagccaaaaaaaatagcgttgaagactggatcatcattgagggcacacatgaacctattatagacaaacacacctgggaactcacccaagatttgttggctaagaacacccgacaattgagtctcgattctaatgtgggtatgttcgccggctacattatttgcggagattgcaagagggcgatgtctaagattaagtaccgaaacaataagagttacatctgtggctcctataagcgctatggcaaggacatatgttataggaactctattaaagaggaagagctcgaggagatcatcctggcaaaacttaacgagcagatttcaaagatagacaagttcgaggaaattaaggcgaacacaaaagactacacaagcgatatcaacaagctgaacattctgctgaataaggtaagatccaagaaaaagagaatctatgaggattatcaggacgacgtccttacgaaagaggagtatctggggtacaaacaggattacattaaagaagagagtcacctgctgaaacagatagaggaactcaacaacgaaactaataagctgctggacaatgacacttggctccaaaaaattaataagtacaagaagatcgagcacttgaatcgcgaaatagttgctgaacttatcgagaagattatcgtgtcacatgacggagataaggacgacagttccattaaagtggaggttatattcaagtttaagtttctc

SEQ ID NO: 1014 - DNA, 1569 bp, unidentified
  source 1..1569: mol_type = unassigned DNA; note = Bacteriophage uvig_557335 from the Index of /pub/databases/metagenomics/genome_sets/gut_phage_database (ebi.ac.uk)
atgatacctgccgttatctacgcccggttttccagtcacagccagactgagcaaagcatcgaagggcagcttgcagcgtgctacgatttcgctgaacgggagggatacacagttatcggggaatacatcgacagagctatcagcgctcggacggacgataggcccgactttcagagaatgattgcagactccgcaaagcatacctttgaggtgatcctggtgtatcaactggacaggttctctagaaatcgctacgactcagccgtcaataagcaaaaactcaaaaagaacggagttcgcgtggttagtgcccgcgaaaatattacagccgacgctagcggggtgttgatggaggccgtcttggaaggcatggccgaatattactccgcagagcttgcacagaagattagacgcgggatggacatcagtggctctaagtgtctggccaccgggggcaggcccgccttgggatacaaggtggacgagaccaagcactaccagattgacgaggataccgcaccaatggtggtcaaaatcttcgagatgtacgcgtcaggcatgactgtagcccagataattacggagctgaaccagcagaacattaagacatcaacaggcgcggatttcaacaagaattctctcaggaaaatgctcactaacaagagatatatcgggatctacacatacaaaggcactgagacccctggcggtatacccaggatcgtctctgatgagctcttcaatagagtggccgaaatgatggaaaaaaataagaaagcgccagctcgggccagggcgaaggaggagtatttgctgacgactaagctgttttgcggacattgccgcgaaatgatgacagggatctccggcacctccaagaccggtacaattcacaattattatacttgcaatggacgaaaaaagaaactctgctccaaaaagaacgttcaaaaagagtacatcgaagacagggtgattgcactggctcgagcacaactgaccgatgaaaacatcagcaagatttccaaagccgtggcagccttgtgtgagagagagaaagaaagttctgaatatcgcaggctggagcgacagcggcgggatattgagaagcagaaagctaatctggtagatgccctgaagtatggtaaggctactgagacccttttgaacgagatcgctaaactcgagtcttcaatagaaggaattgacagacagatcttgatggaaaaggttaagtgtctggatctgaaagagcccgaaattgctttctttcttaccaagctgcgagatggcgatataaacgacataacctaccgccgagcaataatcgccgtgatggtcaacgccgtgtatctctatgatgacggtcggctcacggtgatttttaatagcagcgaccggcctgtggaagtgaccgaggggttgcttgcagatgtggaggaggatgccgctgagttcgtctcaggactgtgtcgcagtacaaaccttattgctggtaggactccggaagtcacaatcgtcgtactgccatatggcttcgtactggccacacagatcaaagacagattg

SEQ ID NO: 1015 - DNA, 1575 bp, unidentified
  source 1..1575: mol_type = unassigned DNA; note = Bacteriophage uvig_89445 from the Index of /pub/databases/metagenomics/genome_sets/gut_phage_database (ebi.ac.uk)
atggcaaaagtgactataatcccttccaagaagaaccccatcaccctcacaccaattaacgagataatcaaaaaaaaggtggctgcctatgctcgcgtgagcactgacagcgatgagcagttcacctctttcgacagccagtgcaaagtctacgaggattatattaaaagtaaacctgactgggagttcgttaaggtctatgctgatgacggaataagcgggacaaacactaaaaatagggtacaattcaatcagatgatcgaagacgctcttgccggcaaaattgatctgattattacaaagagtatatcacgctttgcccggaatacccttgataccatttcctataccagaaagttgaaggcctccggtattgaagtttacttcgagaaggaaaacctgtggaccttcgacgacaaagccgaatttctcctggccatcatgagtagtattgcccaggaagagagcagatctatctcacagaatgtgaccatgggaaagaggtggaaaatgcaggagggaaaagttcagttcgcatataagaatttccttggatataagaaagaggacggtcaaattaagatcgacgacgaccaggccgtaattgtgaaacttatctacaagatgtttctggtggatggcaagacatgctcatacatcgcgaactacctgaatagcaacaacgtactgacaccggcccgccgacataattggtccaagcaaaatatcctgtcaatactgaagaatgagaaatacaaaggggacgctatcttgcagaaatcttacattaaggacttcctcgaacacaaagcagtcaaaaacaacggggagctccccaagtattacgtcgaaaattcacatcccgctataatcgaaaaggatatgtgggaaatggttcaggccgagttgaaacggagagagctgatcggggcaagctactcttcctgtaatgtgttttcctctaaacttatctgtggcgactgcggtgcgttttacggcaagaaagtgtggcactccaatgacgcttggcggaaagaaatttttcaatgcaataagaagtttgccaagggcaagacacgatgtaaaacaccatcttttagcgaacaggttatcaaggataagttcatcaaggcctacaatttgatgatggtggacaaaaacactgtcgtgaacgatgcaaaggatgtgattaacaagctgactgataccactacgctggatgtccagatttctaagtacgagaacgagatggagatcgtttcagagcttgtgaagaagcttgtgaaggacaatagtatccatctgcaagatcagaacgattatgaggtaaagtatcaggagctcgtgaacaggcacaacaaggctaaagaactgtatgagaagctctccgaagaaaaaaaatataaacaggccaaggcgatcacgctgaaaagttaccttagcaccctcgaaaacgctgataccgagattctcgagtggaatgacgcactgtggatgactgtgcttgacaaggcaattgtcaacagggatgaaacaataacgttcaagtttatcaacggcaaagagatcaccttg

SEQ ID NO: 1016 - DNA, 1527 bp, unidentified
  source 1..1527: mol_type = unassigned DNA; note = Bacteriophage uvig_576812 from the Index of /pub/databases/metagenomics/genome_sets/gut_phage_database (ebi.ac.uk)
atgaaaattgctatctatagtcgcaaatccaaggaaactgacactggagagtcaatcaaaaatcagattaggatgtgcaaggaatacttcaccaggcaatacgatgactgtacgttcgaaatattcgaagacgaggggttcagcgggggtaataccaatcggcctgcgttcaagaggatgatgcaacttgctaagcataagcagtttgacatcatcgccgcttatcgcattgatagaatagggaggaacactctcgattttctgatgatgttcgaagagcttaagcaatacgatatcaaacttatctccgtgaccgagggctttgacccagatacgcccgccggtaaaatgatgatgtctatgttgtcttccatggccgagatggagagaatgaatattgctcagcggatcaaggataacatgacagaactggcgaaaatgggcagatggtctggtgggacacccccgactggatacaagtcaatcaccaatgtgaacagttacggaaagaaagaaacatatctggacctcatccctgagatggaggaaaagatcaagtacattttcaaaagagcagccgagggttacacaacatttcagataggcaaagagaccaacctttcaagcaagacagtttacaatatcataaccaacccggtgtacgtcaaaagtaccgaggaatctgccaagtatctcgaaagtttggggtacctggtttatggcgagctcaacggcctgggctttatgccatataatcgccgccctaagaaatccggaaaaaagctgtttaacgcaacaggaatgtttgtgtcagtcagcaagcataatgctatcatcgacgcacccacctggattaaagctaactctaacatatcaaatcgggggcaggaaagccgaccacgcataagccctaacagttttctgagccaccttatcaagtgcagctgcggaaataatatgttcgttcaccaaggtagggccaactcctccggcgagaaagtctactattttcggtgtagtgcacagaagaataagcagaacgattgtaccgccaagtggctgaaggtgtcatctgtcgaggaaagcgtcctgaaaatcctcgagggcttcgcactggacaagaaaaccctcgaaaaattcattacctccaagaaagatatcgattatgacagcctgataaaggacgtgaagaaggacattggccgaaaaaacaaggatattgaaaatttgactgaaaaactcatcctgattgaggggcccgccgttaagattgtgactagtaaaatcaacgagctgtctaaagagatcgacaacttgaactcagagctcttgagcctcgagcggaaaaagattttccaggagcaggacaaaattaacatcaatacactgcactcctccatcataaagctggtgaatcattttccaactctgcccatcgaggataagcagacgtctatcagaggaatcattaaggagattcgattcaacggcaatgatgaaattgaagtggtactcgtagggggaatt

SEQ ID NO: 1017 - DNA, 1569 bp, unidentified
  source 1..1569: mol_type = unassigned DNA; note = Bacteriophage uvig_1903 from the Index of /pub/databases/metagenomics/genome_sets/gut_phage_database (ebi.ac.uk)
atgaccacctcaaagcttagagtggccatctattgccgcctgtccgaggaagacaggaacaagcagagcgagacggatgacagcaattccatccagaaccagaaatctatgctcctgcagtatagccttgaacagggttgggaagtgtacaatatctattccgatgacgattatactgggtccgaccggcggcgaccagaattcaatcgccttcttaatgacgcggagaaccataagttcgatattgttctgtgcaaaacccagagcaggtttactcgggaactggagcttgtggaaaaatatattcacgggttgttccctgtttggggtatccggtttatctccattgtcgataacgctgataccgcaaacaagggtaacaagaagagcaggcagattaacggcctggttaatgagtggtacttggaggacatgtccgagaatattaagagtgtgctcacggatcgaagaaaaaatggatatcatattggcgccttcgcactttatggatacaagaaggatcctgaccagaagggccaccttattattgatgaagaagctgctaaggtggtgagagaggtctttactctgtttagtcagggctacggcaagacagccattgccagaattctcaatgatcgcggaattccaaaccccacagaatacaaacgacttcacgggctgcgctacaagcagcctaaaactcaaaactcaactctgtggagatattttgccatctctgacatgctcgtcaatgagatctacattggaaacatggtgcaggggaaatacggcagcgtctcttataagacaaaacagaacaagccaatacccaaggatcagtggatccgggtggaaggcacccatgagcccatcatcgaaagggaactttgggatagagttcagtctatggtaacagaaaaagcaaaaccgttcactgtgggcaccgtgggcctgttcgccaggaaagctaggtgcatgaattgtggatacacgatgcgcagctcaaaaacatcagatggtcggcgctatctgaagtgtagctgtagacacgttagcaaagacagttgtataggatctttcatctctatacctaagctcgagaaagcagtgattgacgagttgaactgcctcagtcgcgagtacctgaacaaggacgagctcgaacagaaagtacaattcaacaacaatctccaggagcaaaagaagtctgtcgagaatgagatctccatatacgagaaaaagatctcagaatataccaaagggatcagagagctttacctcgacaaagtcaagggggtgctgtcagagagtgattacctggaccttagtaaagacttttccaaggagaaggagaggctggaaaagttggtggcggatacccaaaaacaattggatgttatcgagcgaaagatgcaagccggcgacaaccggcgccagctgatcgagcagtacacaaatctggaacatctggacagggaaatagtagagatcctgatagactacattttggtagggaaaaaagacccagtcacaaagaatgtgcccatcgagatacactggaatttt

SEQ ID NO: 1018 - DNA, 1563 bp, unidentified
  source 1..1563: mol_type = unassigned DNA; note = Bacteriophage uvig_151346 from the Index of /pub/databases/metagenomics/genome_sets/gut_phage_database (ebi.ac.uk)
atgaatgttattctgtattgcagagtgtctacagacgagcaacgggaatatggtgcttccatctctttccaacaggatgctcttaatgactattgtattcgccgagactacactgtagtgggctgctacatcgaggactattctgcaaagcaccacgacatgaagagacccgagatgcgcaaactttacgagtactgtaagcgacacaaaagagaagtcgacctcatcctttttctccgctgggacagattcacccggaatattgagttcgcctctaagtacattcgcgagttcaaggaaatgggcataactgtcaacagcattgagaacccgattgattttaatagtccagattggtcaacactgatcggggtctactgtggcaacgcgcaggccgagaatgccaaaatttccaaaaggactaagcaatgtataagggagaccctcaagaaggggaagtggtccaataaggctccgagagggtataagaatgtgaggacgagtaagttcgagacccacatagaaattgatcctgaaaccgccccatacatcacacaagcattccgcgaggtggcgaagggagtggagtcagtggagcgaattagactgcgcaaatttcgcaacatcccacagagtagctttttgcccatgctgagaaacccgttttacatcggcaaaataagggttcccgctacaatgaccgaaccagagcagcttgtagatgggcagcatgagccactgattgatgaagaaaccttttatcgggtgcaggacattttctccggtaaaaagaaggagagccccaaacttagcaagaccgccgatcccatgctttttctccgaaaatttctcgtgtgtcctatatgcggccattccatcacaggagccacaagcaaaggcaacgggggacggtatacctattatcattgctgccacgaccctaaacatctgagggccagggccgaggcggtgaatgaagctttcgccaagtacgttggcgccttgcgaccaaacaatgcggtaatgaggctgtacgaggcagtccttagggatgtcaatggcgaagacatcttgaatcggaaggaggccatcaaaagactcgaaaaacagcgagatgaagtgtctgagaaaatcggcaaagcagacgacaagcttctggatggggtcataaaccagtcaactcacgacagaatcatggagcggtgcaaaaatgacctggctgacattgctgaacggatcgcaatgctggaaacctgtaaccggactaaactggagcccaaactgaagtacgcaatgtctctcatcaataacctgtacactatggtgaccgatgcccctatggaggttaagattcccgttttgggtagcatgttccctgaaaagatcgaattcgacggagaaaagtacaggaccaacagttataacaaggtcctggatatcatctatcagcagacaaacgagttgagaggaggtgataaaactaagcgcggagctgactactccacgcctcagtttagcacgcggactcgagcaaggacaggaatggattgctcaaacggggtg

SEQ ID NO: 1019 - DNA, 1437 bp, unidentified
  source 1..1437: mol_type = unassigned DNA; note = Bacteriophage uvig_282034 from the Index of /pub/databases/metagenomics/genome_sets/gut_phage_database (ebi.ac.uk)
atggaccaatccaataaggaaaacattaaccaactgagagtggggtgtttgtatatcagggtcagcactacggatcaggaggaactgtccccggatgcccagaaaaggctgctgttggactatgccaagagtaatcatatcgtggtaccagacgagttcatctttgaagagagtgtgtctggcagaaatgcccagaaacgccccaagttccagcagatgattgcccttgcaaaaagttccgagcatcccgtggacgtggtactcgtgtggaaattttcacggttcgcacggaatcaggaggaaagcatcgtatacaagtcaatgttgaggaaggatcacgtagacgtgatctccgtgtctgagccacttgtggatggcccattcggatcactgatcgaacgaattattgaatggatggatgaatattactccatacgactctctggagaggtcttgagaggcatgaaacagaaggcgctgaataatgggtaccagtccagcccctgtcttggttacgactccgtcggcaaaggcaagcctttcatcattaatgaggaggatttcaaaatagtcagctacatcatggaccagtacgacaaccacaatatggacccaaccgctatagctaggaaatgcaatgagattggttatcggacccgccggggtggactgttcgaaaggcgatccatcgagtacatcctccggaaccctttctactgcggagttgtggaatggaacggaattcggtttgaggggacacacgaggtgcgatatactcgcgaacagtatgaaaacagaattaggctgatggattctcgcaagccccctaagagacaccggaacatttcagcatgccagcactggttgagcgggcttctgaaatgcagcatctgtggggccacgctcagctataactataataagcagtgctcatttttccagtgttggaaatacgcgaaaggctttcataaacaaagcagctgtatctccgtcaagaaggttgaacgcaccgttaaagaatgccttgagctgcttatgaggggcgagaactctgcctatatcaggaggcaaccgaagcccgttgataacaccgacgagattaacagtctcacccgagagctgaatagaatttctgtcaaagagatgcgcgtgaaggatgcttacgagaacgggatcgattctctgcaagagtacaaggaaaatcgcataagacttaataagcagcgccaggaattggaggagagaatcaaggtcctcgactctcaaacaactcattgtaagagtgagagtgagtttcttaaggattgcgaggctgcctacaacgctattgtggatcctgacgtttccaacgaagaaagaggcacactgatacggacagtgttcgaaagcatctcatttgaccgcaagtcaggagagctgctctttgacgcaaaaagt

SEQ ID NO: 1020 - DNA, 1731 bp, unidentified
  source 1..1731: mol_type = unassigned DNA; note = Bacteriophage uvig_69193 from the Index of /pub/databases/metagenomics/genome_sets/gut_phage_database (ebi.ac.uk)
atggctcgaaaagtgcggaatcacccagtgcctcgggacaagatgtctgaaaataagctgtctgagcaaactccaaaagtcaagacccatgatttttcagtcgcactgtatattaggttgtccaaggaggactccggaaagaataaccaaaacaccgtagaaaaccagaaggccctgctggaagacttcgtgaaagacaagccggacatgaaagttgttgatatctacatcgataacggcttcagcgggacaaactttgagcgccccgccttccagaagatgatggaagatgccaaacgaggcaaaatcaattgcataatagtgaaggacctcagccgattcggtcggtcctacttggaggccggcaactatctcgaaaaaatttttcccttcctcaatattaggttcatcagcgtgacagaccactttgatacattcgccgttatttcttcagaagacgtaaggggagtggcaaatgggatagaaatacctctgaagaacatcatcaacgaggtgtatgcaaaggatatctcacgcaaggtagggagcgctatagaaatccagaaaagagagggcaggtatgggggcggcgtcgcgccttacggatataagaagtcctcaaccgttaaggggaaatatgaggtggatgaggaagctgccgaagttgtccggtatatctttagactgaggtccgagggatacggctattgttctattgtgaaaatccttaacgagaaggggatcaaaagtccatctgcttacagatatgaaaagggcatcgtccgcaatgagaagggaagcaacgtgttgtggaaaatctacgcaattgaggacatgctgcgggatgaggtgtatcttggcaacatggtgaggggtaagactcacagcgcaatgcacaagggagagaaaagacattacgtgccccgagctgaatgggtcattgtgccaggtactcacgagcccattgtgtctaaagagctgtttgaggccgtccaggccgtcaacgagaaaaaagcccaggaacataaggacaacctcgaaaaggcgaaagaaaatcctaagcgggataacctttttaaaggaaaaatcttctgtggggactgcggaataacgatgggcggcgccgtgggcaattacaatagcatgtcctattactgtccgaattacagggaaaatggtgcaatggggtgcgttaaaaagcatatctctgctagaaagttggagaaagctgtcctcgaggccgtccaaatccacttgaaaattttccttgagggaagagaagaaatcagaagtaggaacggaagcgctgagattggtaagcgcagaatggtgctggaatccgagacccgagatctgcgccagaaggaagcacaataccagcagaagctcagttcaacctaccttgactacaaggacaaactgctgacagttcaggagtacttcatgcttaagaacaagtaccaggcggccctggccgagctcgaggtagcacgcaaagaaaaggagcttctcctgaataagatgcaagagacttatggtgaagatttggaactgagtcatgctgccgagaaatactttgggcagatggttgtgacgaaggacatggtggacgccctgattgagcgcatcgaagtatttgctaaggggcggattcacattatttttcgcttcgaggatgagtatcgcagtttgcttgagaaacgggccgatatggaacaggagggcgcgaat

SEQ ID NO: 1021 - DNA, 1524 bp, unidentified
  source 1..1524: mol_type = unassigned DNA; note = Bacteriophage uvig_318656 from the Index of /pub/databases/metagenomics/genome_sets/gut_phage_database (ebi.ac.uk)
atgcagaagtacgtgatcgctctgtacatccgcctgagtatagaggattataagtacgattctctctcaatagagaatcagagtctggttctgcacgagtacgcggcctctatgccggaagccttgaacgcagaaatcatggaattcatcgataacggctattccggtacaaacttcgaacgcccgcaagtgcagaagttgattgaactcgtgcgagctaaccagattgactgtatcattgtcaaagacttctctcggttcggccggaatagcattgagaccggctattttatcgagcgggtgtttcctctgtttcacactcgcttcatttctatctcagacgatttcgactccagcaagtttaagggtgacacagggggaatggatgtcgccttcaagtacttgatttcagagtattattcccgggatatgagcatcaaaacgaagtccgccaagtatgccaagatgcagcggggcgaataccaatctaaaatatgcccatacggatacagaaagagcgccgacgggaggatggaacctgaccccgaggcagccgcggttgttcaacttattttccaactggcagccgagggaatcaatgccacagcgatcacacgcgagctgtttaggagaaatatacctacccctgggcagtacaaagcagccaggggaaaccatacccacgacatcagccggtgtcatgggatttggagcacttctaccattctgcggattttggaagatgagagatacacaggcgtctacgttattggcaagagggccgtcttggaggtgggaggtaacaggtccagactcaaagatcgcgagtcctggtatatcatacccgatcaccacccagcaatcattgaaaaggctgtgtttgatacggctcaggccagccagcttaggttcagccagccaaataagaaaaagagagactaccccctcaaagggaaggctttttgtggctgctgcgggcacgctctgagtcgaaccatgcagaaaacctcttattactactgcagacatagtgaagccgacgaagaatcaagatgtcataagatgcgcctcaatgccgccgaactcgaacaggctgtattccttaccctgaaaaagcagatggaggcagctgctcccctggctcctgatggcactctgagggtagacgcctccgtgcccgagcggacggagtatgagcaacagatagaggccctgcaggatggtaaacgagctctgtatgaacgctacctcatgggagagattgacctcaacacttataaagcggagaaaactgcatgcgacgaacttttgctgaagaccaaaaatgcatatgctgcagtcttggcgcaggccaagcagaaacgagatgaacaagccagacaggactcaagaatggaggcaagtaaggctatttttgacgcagacacactgacaactgagttggctgagcttcttatcgatcgagtgttggtgtatccagataaaaggatcgagatcgcctacaagatccaggacatctttgac

SEQ ID NO: 1022 - DNA, 1380 bp, unidentified
  source 1..1380: mol_type = unassigned DNA; note = Bacteriophage uvig_227965 from the Index of /pub/databases/metagenomics/genome_sets/gut_phage_database (ebi.ac.uk)
atggctaaacagctgatccgggtggcgttgtatacacgagtgagctccgacgagcaagttgagaaaggagattcaatacgggatcagcaggagcggggtaaaaaatacatcgatagtcacgataacatgatcttgcaggacatctacactgatgacggaatttcaggccaaaaactgaaacgcgacgagttccagagactcattcagaacgctaaggacaacctggtcgatttgattattttcaccaagctggatcgctggttcaggaatctgcgccattacttgaacacccaggccacccttgagaagcataatgttagctggactgccattgatcagccctatttcgacactagcaccccatatggttgcgcattcgtgaatcagtctatgatttgggccgaattggaagccaagaatggcggccaaagagtaagagatgtgtttaagaccaaagtgactcacggcgaagtaataacagggaaagttctgagggggtaccgcattgaagacaaacatctggtcctgtcacaagaagcccccattatctacgactgcatctcatactttctcaagacccagtcccttggccggacgatcaagtatatgcggaccacacacggcattatcatgaccctccagaacttcaaaaatagctacttgcgaaatgagaagctgacagggagatacagagggaacgagggatattgtcctcgacttattagcgacgagatgtttgccgacatacagaggattttggaccacaactccaacgtgagagtcacgcagaagtacccctatatcttttctgggctcctcatatgtgcagaatgcggctataagatgtccggttgccacatcaatgtgatcagtaaaaaagtgtctggaaaggtctataggtacaagtacccggcttatgaatgtaaacagtatagggcatacctgaaatgtagcaatggtggagaaattagagagactacaatcgagcaatatctgcttgacaacatagccaaagaggtggaccagtacattgctaagtatgcgacagttcagaaggacgtgatcgataatcgcgccactaaaaataagctcaggaagaagctggagagactgaaggaactctacctgaatgaaatcatctctatcgaagaatacaagatcgatcgcattgcattggagaaccaaatagagtctattccagatatcgtggagcctaagcagaacataatggagctgaagcggctgcttgcttccaactttgagacgatctacagtacactttccaacgaggagaagcgaaaattctggcgaagcttcatcgcagaaattcgcgtacataaaagtgtcaggcggtctaggaagtatgatatcgactttctc

SEQ ID NO: 1023 - DNA, 1539 bp, unidentified
  source 1..1539: mol_type = unassigned DNA; note = Bacteriophage uvig_182406 from the Index of /pub/databases/metagenomics/genome_sets/gut_phage_database (ebi.ac.uk)
atggctaaaaggcttcacggcgctttgatttgcgcaaggtatagcaccgacaatcagaaccccgacagcatagaggtgcaggtggccaagtgcactgaatggtgccacacccacaacattcccgtgctcggcgtatatgctgacgaggccacatctggcatgaaggacaccagaccaaggtatgcagccatgatgcgagatctcagggacggagtgggggacatggttgtgatctacgatcaatctaggatgtttagaaaaatgacatcctggttttcattccgagatcagctgacacagatgggggtcgacgttgtatctgtgacacaacccatgattggaaaggacctgcgggacccaacaaatttcctcaccgaggggtcaatggctctgttcaatcaaatctgggcgttgcaatctcgacaaaaagtaatggagaagatgcggttcatggctaagaacggacagcacactggtggcaagccggctctggggtacgaagtcgtggacggacagttggcgatatgtgaagccgaggccaaaatcgtgagacggatctttgaagaatacgggagcggcaagtcctaccgggagattgtggctggtctgaatgctgacgggatcaaaacgaaacggggcagcgcctttggtgccaactctctccatgatttgctgaaaaacgaaaaatacatcggaacactcgtctatggccagaggccatatagagaggatggcactcgaaacacacatgccgcagctgcggatagtattaggattgagaacgccatccctgcaatcatagataaggagctgttcgcaaaggttcaggacaagatggccgcaaacaagagacagcagggcgggcggccacctactaaacgggattacccgctcaaagggaaagtggtgtgtgcagagtgcaaaagtgccatgacgatcagtaccagccagaagatctacgattattacaagtgtagcggcaagaaacgccgccacgactgcgatggcgtcaatatttccgtggatgtgctggagcgcacagttgccaacgccgtcagacaggtcctgggatcccctaagaacgttgaacgcctcattactattcttcgagatcagtccggcgaaatacaggcccaggctgtcgatgcccttcgccagcttattgctcgggaaagagagatctctcgcaagctggacaatgcgacggacgcaattcttggaggtcttagttcacccacccttctcgccagagtgaaagacttggagcaggaaaagaccgaaatcgatagacaaatgagggagctgaaggcaaccgtcgacgcttcagccattcccgagacacgcctgcgcgaaatcatcgacgagatatcaggtgacaatcccgccggtaatgcagcactgctggcgattgtatgtagggttgaggtcgccaaggatacgataactatctggaccatgcttgatacccatccagacggaacttttgattggtccgaggaaggcgtgctgatcacccctggaaccactagcggggtgcct

SEQ ID NO: 1024 - DNA, 1521 bp, unidentified
  source 1..1521: mol_type = unassigned DNA; note = Bacteriophage uvig_166254 from the Index of /pub/databases/metagenomics/genome_sets/gut_phage_database (ebi.ac.uk)
atgccgaacatcctcaacaacaatgtggtgtacgatgataacaccaaacagcttctttatcaaagtgaggacgagaatggtaacacccgcgtgtctaccgaaatgcagccacaatctgccttggattctcaagaagcagtagcttgcgagtttgccaagtgcaataacattgacatcataaaagtgtttagcgacaaaggtatctccggcaccactgacaacaggccgaattttcaggagatgattaagtatgtcgagaaccagaacaatgacatacagctcattatcgtgtacaagctggatagactttttcgacaggaacagctttttaatgtttacgagtatcgactcaataagtgtggcgtttttgtgctgtcagccacagaagaaacttataagaacgatattggcagtcgggtattgaaggctgtaactcttatcaacaatgagttcgaagctaaaaaaatccgggagaatgtgaaaaggggacagacctacacagccaaacaaggaaaaaccaacggaggaatcgccccactgggatatgacattaatgccgacggcaagtacgttgttaaccctgaagaggcgaagattgttaagaagatcttcgaaatgaaatccaatggggtaacttatgaacagatggcagacacactgaataagcagaattatcgcacaaaaatcggcaggaaattcacaaagaacagcttccatgagattctcaccaatcccaagtacaaaggcgtttttgtctataataggagcgcgcttgcaactgagtacaataagagtcccaacagacacaagtataagagcgcagacaacatcattacggtcaaagggaaaatagaaagaatcgtcagcgaatcactgtgggattctgtccagcccaaaaaaaatctgtcagggaaaacaaacaaggggaaatacctgttgtccggtctggtgaagtgtcctatttgtcataacagctaccacgtggacaccaaggggaatgtgcagtatctgcggcataataagaataagactgacaagtgcatcaactctataccaatggacaacgtgaaggaaaaggtgatcctgaaggtcatcaacaaaatcttcagcaagtacaacgtcgagtatttcacaaacaacttcgatacaatctcccagacgcagacggcttcaatcgagcaacacattaagaagttgaaattcaagattaatgctctgaaagtgaagtacgataacctgctcaataccctttcagagaccaccgatgagaacattaaaacgtccatcaccgacaaactcactagcataaacaccgagatttctacttacaccaatagtatagaaaagctgaaaaattctatcccccagcctcctactaaagataatattcgcacaagtaaaaaaaagctgaaggcctttttgacaaacccaaataacatccttgattccaaaaagctcatccactccataatcgactccgtgtacattacagagaacgatattaaggtgatattcaaggag

SEQ ID NO: 1025 - DNA, 1551 bp, unidentified
  source 1..1551: mol_type = unassigned DNA; note = Bacteriophage uvig_586179 from the Index of /pub/databases/metagenomics/genome_sets/gut_phage_database (ebi.ac.uk)
atggttgccgcggcttacgcgagatactctacagaacgccagaacgagaccagtatccttgcgcagttgcaagccatcgaggcatattgtgcccaacacgatctgaccctctataagcatcagtacattgaccaggccttctccggcacgaatactgacagacctgccttccagcagttgctgagcgacgctaatagacactgtttcgatgcagtcgtaatctatgatatcagcagagggtcccgagacgtggtcgattggtttgcatttcgccggcagatgcaacagctgggtatcgccgtttatagtgtcaccaatacccttggcgacctggacgaccctaatgcctttctcaccgagatgattactgcaggattgggccagcatatggttttgcaaacccgacagaagtctatcgctgggaaacgcataaaggccgctcagggacttttctgtggaggcgtagctccctatgggtatcggattgaaaacgcgcggtatgtgattgatgagagagaggcccctgccgtgcgactgatcttcgacatgtacgtgaacggacattcttatggagacattatcgcagccctgagcgcatcaggattttgcacaaggagcggtcgcagattctctagcactgcactgcacgatatactctctaaccagaggtactctggacggttcgtgtggtttgagagggtggagcggcacatgcacaagcatgtggggaagccgggggaccctataaccgtcgaggacgctatacccagaattatttcagacgaaatatttgaaagggttcagaagagaatggaaactaaaattattcgcaagagaggcaaacgggaatacatgctgtcagggctcctgaaatgtggcctgtgtggcgcttcattggctggtacaaccgtgacatcaaaaggcatcgaatatccacggtactcctgcatacggaggcacaaggaacataactgcgatcttgttaccctgaaagccgacatcctcgataaagccgtagcacagattatcagggaaaaaatacttaatcgagatctcatcgagcagactgcccaactggtgattgatagatacagtgcttccaaggaggatactagtaagcttcaggccagggtggctgcatccagcgctaagatctaccgactgatcagcatggctgccgatttgccagaaacaccaccagagatgaggcaacagatcatcgacgaaacagcccgcaaaaaagccctggaggctcagctggtggccgcacaaaaatccgagctgcctgtcacaaaggatgatgtgattgcactccttgagagggattgcgaccgattggccgagacccccagtctcctgcgcgaaatggcgctgacgtatatcaagcagatcacagtctacaatgataggctggacatctgctactacctcattcccggcctcaagaacaacaacccatccgacaccgacgggttgttgactggtgctctcccccgctacgagagccggttgctgtataatctcacgattccgcgacccgacctggccgca

SEQ ID NO: 1026 - DNA, 1542 bp, unidentified
  source 1..1542: mol_type = unassigned DNA; note = Bacteriophage uvig_275384 from the Index of /pub/databases/metagenomics/genome_sets/gut_phage_database (ebi.ac.uk)
atgacaaaggctgtgatctatgcccggtactctagccacaaccaaagggaagaatccattgaggggcagatcagagaatgccaggattttgcaactagaaatgatttgacaattgtcggggagtacatcgatagagcaatctctggcaagaccgataatcgcgctgacttccagagaatgatcaaagactccgagcgggggcactttcaggtggtgctggtgtacgctattgacaggttcgccagaaatcggtacgatagcgcgatctacaaagctaagctcaaaaagaatggagtaaaggtgttctatgctaaacagcacatcccagacactcctgagggaattatccttgagtcagtcatggagggctacgcggaatactatagccaaaacctcgcaatccatatcaaaagaggaatgaaagagaacgctttgcagtgcaaagtgacaggcggcaccacccctctgggatatcggatctctgaaaacaagacttatgagatcgaccccgcaggcgcaaagattattagggagattttcgagatgtacgccggcggggccagcgccacacagatcgttacctactgcaacgaacatggataccgcaccgcgcgagggggatccttcaacaagaattctctgcgcacaattcttctgaacgataagtatattggcgtgtaccgctatgaggatgttgagatagaagatggtgtccccgccatcatagataaagagctctttgaaaaagtgcaaacgatgttccatcacaatcatgcagcgcgggcccgcactaaagcaaatgccgactaccttctcactacaaaactgttttgtgggcactgtggcagtaatatggtgggcgaatccggtacaagccagaacggagaaatgcattactattacaagtgctcaaataggaaaaggtcccacagttgtaacaagcacaccgaacgaaaagaatggattgaggagttcgtggtacgccatactgtcaacaccgtgttgacagataataacatagagatgattgccactaaagccgccgagctgatggagaaggaattcgccgaatcatctgttctgaccactctggagcaaaccaagaaggatatagagaagaggataaagaacatgctcgacctgatggaacagggcatcgtgaccgcctcaaccagggagcggctgctcgaactggaaagccagaagtccgatctggagcaacgcatcactcgcgagacgatgaaaaagccgccactttccaaggaacgaatattgcactggctttatagttttaagggtggtgacattaatgacatggagtatcggcagagagttattgacaccctcgtgaattcaatctacatctatgacaacgacgggggaaatagtcgaaaaatagtctttacgtttaacatctctggccagaatacaagcgttgtcaattgcagtgacattgcttgtttcgctcctccatatggggcaaaccccaacacgtttttctttgtaaagaacgtattcggttttgctattgaggtgacagtc

SEQ ID NO: 1027 - DNA, 1545 bp, unidentified
  source 1..1545: mol_type = unassigned DNA; note = Bacteriophage uvig_128002 from the Index of /pub/databases/metagenomics/genome_sets/gut_phage_database (ebi.ac.uk)
atgagttatctgatctacctccgcaagagccgaaaagatttggaaaacccactgatgacaaccgaagagatcttgaacaggcacgagtgcattctgttggatctcgctaaaaaaatgaatctgtctatcggagacatctatcgagagattgttagcggggatagtatagcagctaggcccgttatgcagaagctgttgcgggaagtcgagtcaggaatgtgggagggcgtgctggtagttgaagtggagcggcttgctagaggcgacactgtagaccaaggaatcgttcagcggacgttccagtactccgagacactgattatcactcctcagaagacctacaacccctcttccgagagcgatcagacctttttcgagtttggtctgttcatgtcccgacaggagtacaagactataaagcggagattgaaatctggagtgatgagcgccgtgcgggaagggaaatggccctacaactccgcgccatatgggtatagaagatacaaacttgagaatcaaaaggggtggagccttgaattcgacgaccaggagcggcccattgctgagctgatctaccacctcttctgtgacgaaaagaggggcctgggttacattagtgattatttggaggcgcggaatatcaagagtagaactggcgggcgcttcactgagagcttcctgcgcgaattcttgaggaatccggtgaacgatggtaaggtcttttatggccggcgcaaagtggtgactaaaattgtcaacggatcatcagtgcgcaccaggcctcgagcagacgagtatatcgaggttgccggcttgcacgacccactcatacctcacgacctctttctcaaggcacaagagaggtttagagtgagtaccccgcgcaacccatcaagctataccgtgaaaaacccactgtccggcctgcttgtgtgctccgagtgtggccataaactgcagcgacgccccgcttctacctctaagcgaggagctccttatgatgtgctgatgtgtaagactagaggctgcccaacagtgggcagcgccgtggaagtgattgaaggagaggtcctttacgccctggaggacattgtcagaggttatgaagccgacgtgcctagcgtaccgtctctggtgcctcagaaagaagaattgctgcataacgcaatactccacaggacagacttgaataagcaacaggaaaggatctacacattgttggaacaggggatctacagtacggacgtcttccttgataggtcaaaagcccttgaaaagcagatgcaggaggtcaatcattcaatcgaagtcttgaagaacgaactcgaggaagagaaaattaagtacaataactggaaatcctttgtccctacctgcaagcaactgctcgagatctattggacgctgacacccgatgccaagaattctgcactcaaagaagttatagatcgcattgagtacaagaagctgaccagaaatccaaaggggatgtgtgatgtagccacctttgagctcacactgtaccccaaaatccccatgaagtcc

SEQ ID NO: 1028 - DNA, 1626 bp, unidentified
  source 1..1626: mol_type = unassigned DNA; note = Bacteriophage uvig_8240 from the Index of /pub/databases/metagenomics/genome_sets/gut_phage_database (ebi.ac.uk)
atgcaagtatacaaagcgataaagtacatcagattgtcttacaccgacgacaaaaccactgaaagcgacagtgttgccaatcagcgacgactcattgatgattacatcgctcggcaccccgagattgaggtcgtggcggagaaaatcgatgacggctatagcggggtgctgtttgatcgaccggctttccaggagatgatgaggatgattgaacaaggtgaagccaactgtgtgattgttaaggacctgtctcggctgggtagagaatacatcgagaccggaaggtatatgcggcgcgtgttccctgcctacggcgtgaggtttatcgctattaacgacaacgttgacacagaaaacgatgccgccgacgacctgacggtgtctgtcaagaacataatgaacgaagcatactgcagagatatctccgtgaaaacccgatctgccctggaagtcaagagacggtcaggtgacttcgtcggggcctttacaatctatgggtatatcaaagtcggcgacaagcataagagtcttgaggtagacgaatatgcggcgaatgttgtgcgcgacatcttccggaaacgcctggagggattcagcgcctcccatattgcggatgaactcaattggatgggggtattgtcacctctcgcatataaacgaaataacggaatgccacatgccaagggcggctatactgataggaaggattgcaagtggtctgctacaacaattattcgcatccttcaagatgagacctacacaggaactttggtccaggggaagcaaacaactccccatttcaagcttaaagaacgcgaggacaaaccatcctctgaatggattagggttgagggagcccacgaggctatcatacagaagcacgattttgatctggtgcagaggttgaggagaatagataccagaactagccctaagagtgacaaggtgtacctcttcagcggcattttgatttgtggctgtgggggttgcagaatgactcgaaaaaccaacagatataaggataaagaataccactattactattgccccacgggaaagaaaaatggctgcacctcttcagtgatggtgaaagagtccgatctgatcgagtgtgtccaagactcacttaaaggacacatcgagaatgtggcttcactggacgccctgctctccagcatctcccaggagcggatcaatcgcgaactggcacaggagtacgcagcccagattcgcgtgaatgaaaagagagtcgcacagacagagggctttaaggctaagctttacgagaacctggtgtccgggatactcacgaaggaagagtttctgtcctacaagcggaaatataacgcagacatcgagctcctccagaaagccatcgccgaatggaatgaaaagcttactgatgtcctggagaatcggagtgagcgaaacaggtggattaaccatttcatgcagtttagcaccatggaggacatagaccggagggcagtgatgcagctgattagaagtatcagggtaatgggcaaggacgagcttcacatcgagttcaactaccaggatgagtatcagaaagctgtgagccttgccgagcagatagcagctcacaatgaagaacgcaaagttggt

SEQ ID NO: 1029 - DNA, 1521 bp, unidentified
  source 1..1521: mol_type = unassigned DNA; note = Bacteriophage uvig_86984 from the Index of /pub/databases/metagenomics/genome_sets/gut_phage_database (ebi.ac.uk)
atgaaaaaaatgaagaacaacgaactgctcatgggcgaatatttgctgctgtatctccggaaatcccggcaagataatgaaaatgaaaccgtagaagaggtgttgtctcggcacgagcggcagctgcaagagtacgccgcaaagaccttcggagcagtaattccggaggatagaatctaccgagagattgtaagcggggagaccattgacgacaggcctgagatgaaaaaggtcctcaaaaggattgaggaccctgcctgcaaaggtgtgctggtgattgagccgcagcgccttacaagaggtgatctcctggattgcggcaccatcgtgcacgcctttagatactccaaaacactggtcatgactccaacaaagatctacgatatcgaggacaagtacgataggaagttcttcgagatggagctgaccagaggcaatgactacctggaatatactaaagagattcttaccaggggacgagaagcttccgtccatgaaggaaactacattgcgtcaatagccccttatggatataagaaagtgaaaaacgggaaggagcagatccttgtcatcgaccccgttgaagctgaatacgttcgcatggcttaccactggtacgtgtacgacggcctcggagcggcaaatataggacacaagctgaatgagatgggggcccatccaagaaagagcaagtattttcgcccaacggccattagacagatgcttacaaacgaagtttatatcggcaagattagatggggccacaaaaaggtgatcaaggtgtttgaagacggtaaagtggtcaagaaacgaccccgaaatcccgactacgaactgatacaggggaaacatgaaccaattatctcagaagaactctttaaccttgcccaggaacagaagaacaagagtactcgggagcactacgatagcacgcttaaaaactactatgctggactcataaagtgtaagaagtgtgggtatgctattgggatgcggattcatcgacaaaaaggcgtggtgtatcgcagggataggtactattgtcgaaatgggcggtattgcgaccaaaaaggctcaaacgctgagattgttaatgacgcaatacttaagagtctgaaaggttatctgcaagacttcaagatcaagatcagcggcacaaacaaggagttgtacgagacacagatgaccgtgatcgagaatatggaaaatgagcttggtaagctgtccaagaaggaaatggatctgtacgattaccttgaggacggcttgtatactaaagaagttttcaaagccaggatggatctcttgaaaaaagagcgcgaagagctgatcgagaagatcaagaaagccaaacagaccatgccctctgtcgagaagtaccagcgccagtactacagtctgatgcaggcgatagatgccattgagaatcctaacatctctgctaaggacaagaatcagctcttgaagaacatcatagaggtcatctattataacaaggagcaggcagacatccagactaaa

SEQ ID NO: 1030 - DNA, 1689 bp, unidentified
  source 1..1689: mol_type = unassigned DNA; note = Bacteriophage uvig_425758 from the Index of /pub/databases/metagenomics/genome_sets/gut_phage_database (ebi.ac.uk)
atgcaaaagaacatccagagcgtcatcacagggaatacctttacgacttcaccaatcaaagggacagatacaggcatcacagccctttactgccgcctttcccaagacgacggtaatgtcggagattctgatagcataattaaccagaagaagattcttgctgagtatgcggagcgcaacgggtatacgccataccagttttacatcgatgatggttttagcggcgccaacttcgagcggcctcagttcaagcaaatgattgaggacgctcagaagggcattgtgaaacggatcatttgcaaggacctgtccaggtttgggcgagactacattaaagtaggcctgtatactgagttcatttttccggacaaagacatccattttatcgccgttaatgacgatgttgactccaatgtacagaaggataacgacctggccccgtttaagaacttgttcaatgaatggtacgcgcgggacacttcaaaaaaaatcaaagcagtaaagaaggcaaaagggttggctggtgaacacatgagctgcgtggccccctatggatatagaaaaaatcccgacaaccctaaggagtggctgatcgatgaagaaagcgcagaagtcgtgagagaaattttccgattgtgtgtggacggatatggaccacggcggattgccaacatactgaccgaacgaaagattctgatacctagcgcatacgccctcgaaaaaggatacgccgtgaggaataacatccctaagaatccctgtcagtggtcatcaactgtggttgtggatattctcgaaagaatggattaccttggacatacagtcaacttcaaaacccaccgcaagtcctacaagcagaagaagaagatagagaatgataagagtgaatggaaaatctttgaaaatacacacgagccaattattgataaaagtaccttcgacatagtccaaaaaatcagggagaacaggaaaaggcccaccaagattggcgaaatacctatgtttagtggcatcctctattgtgcagactgtggcaaaaaactttcttttcaccgacgcgtgaatgatccagactctaaacacaatttcgtgtgctccaattacagatccaatactcacaactgcagcatgcactatatccgcaacgtcgtagtggagcaattggtgctggagaatcttcgagaggtagtgagctatgttaaagcttacgaggatgagttcgtccagatggtcatggacgctgatatcaaacagaagaacaaggagctggcgaagaaaaagcgcttgctgtccgataaggaaaagagatacgtgcagcttgacgggctcttccagagaatctatgaggataacgtgtcaggcaaactgagcgacgaaaggttcatgaaactgtctcaagggtacgaggctgaacagaaggagctccaggccgagatcgagtcactgcggatggaactctctcaggaggagaagcagtctgttaatgtgaaaagttttctctttaccgtcaagaagtacaccgaaatacccgaactgacccccgagatcgtgcatgagttcatcgaccggattattgtgcatgaagccgataagagttctggcaaaaggattcaggagatagagatcatctacaaccatatcggtgtgttcgacagatccaaggttaacgtctatatgggcaaggctgtt

SEQ ID NO: 1031 - DNA, 1224 bp, unidentified
  source 1..1224: mol_type = unassigned DNA; note = Bacteriophage uvig_158104 from the Index of /pub/databases/metagenomics/genome_sets/gut_phage_database (ebi.ac.uk)
atggccccaaaggcactggaaattggcgccgcttatatccgagtgtcaacagacgatcagacagagctgtcaccagacgctcagctccgggtaatattggacgaggcgaagaaagacggctttgtgatcccacccgagtacatcttcgaggaaaagaagggtattagcggtaggaaagcagataacagaccggagttccagaaaatgattgccatcgccaaaagtcagagtccggcgccttttaagaggctgtacctgtggaaattctcaaggtttgcacgaaaccaggaggagtccaccttttacaaaggaatccttcgcaaaaagtgcggggtggaaattaagagtgtttctgagcctataatggaaggaatgttcggcagacttattgaaactatcatcgagtggttcgatgaatactactcctataatctgagcggcgaggtggttagaggaatgaccgaaaaggccctccgccaagggtaccagagtagcccttccctcgggtacgaagccgtaggcgaggggaaagcgttcgtcataaacgaggagacttacaagatcgtggagtatattttccagtcttattatgatgggaaggatatgactgctattgcccgggcatgtaacgagcaccattggcgaacccggagaggcaatccatttgagaggaggaccatctctcgaatcctgcagaaccagttttacaatggtacagtcctctggaacggctattcttttcaagggacgcacgaggtccggccctccgtcacaaaaattttccccgcggttcaggagcggattcgcgccgaataccgccctttgaatagacgcgaggtatcaagctgcgggcattggttgagcggactgctggtgtgttccgtgtgcggagctagtctgtctctgaatagagtgcggtctaaccacggctccgacttctttcaatgttggaaatatagcaagggcttgcaccccggtagctgcgccatcacagtggctaaggctgagcagctgctcctccattcaattaagactgtcttggagtccgaaagcgttgaatacgaatatcttccccaagaaacaaccgcagcagctacggagcaggaccttataaccgacgccctcgacaaggtgacccttaaggaactgcgcatcaaagaagcttatgaggccggaatcgatactcttgaagaatacaaagagaataagcttaggctggcagcc

SEQ ID NO: 1032 - DNA, 1665 bp, unidentified
  source 1..1665: mol_type = unassigned DNA; note = Bacteriophage uvig_567103 from the Index of /pub/databases/metagenomics/genome_sets/gut_phage_database (ebi.ac.uk)
atgactaaacaacccgacaagatcacagcgctgtactgtcgcctctcccgggacgatgaacaggacggccttagcggatctattaaaaaccaacagacgattctggagaagtatgctcaagagaatggattccggaacacacgcgtgttcatcgatgatgggtggagcggaacaaactttgccagaccagcttttaccgagattatggagcttgcggaaaaaggcctgatcggaacgctgattgtgaaggaccacagcagactgggtcgaaaccggctcattgtggggcagctcctcgaggaaggctttgactccctcggtgtcaggtatattgctatcatggacaatattgacactgctaagggcatatctgacctggtgccgatgcaggaccttttcaatgagtggcacgcaaagaacacatctcaaaaagtgaggaacgtgttcaaaagtaagggtatgtcaggggcccctctcaccactaatcctccctttggctaccagaaagatcctgaaagcaaaaacgggtggctcgtcgatgaggaggctgctaagaccgtgagacagatttttgcatggtgcgtcgacggattggggccaacccagatagccaagcggttgaaggccggcaagatcccaacccctactgagcattggtccaacatcgggaggaattgttccaaactgcccgcagtgccatataattggtgtagcgccaccgtggcagacattctgggtaagcaggagtactgcggcgatacagtgaactttcgatcaaccactaagagtttcaaaaacaagaaaaagatcgaacggccctcagaggaatggcagatctttaaggatacacacccggcgataatcgatagagaaaccttcgcgctggtccaggagcttagaaagcacagaaggagacccactaaaagtggcatcgtttcccctttctccgggctgctctactgtgccgattgcggggaaaagctgtactattccgttacaggctcttataaacgagagcaggcatactttttctgctcaagttatcgaaagaattctgaagtgtgcagcgcacactatatcagggaaaaagtggtcgagcagatcgttttggagtctatgcaacggatcctgctgaatgtacaggtatttgagaaagagtttgcaaggaagcagatggattgttacacagaggacaagaagaagctcctggccgccaaaaggcgcgagctcggaaaagtgaaaaaacggatagcagagattgacaccctcatccagaagatctatgaagataatgctagcggtaaacttagcgacgagaggtatgccacactgtctttgagttacgaagaagagcaaaaaaccttgaaggctgccgtacccgaaatgcaagcctacctggaagccgaaaccgacaagacggaatcattgcagcgcttcatccagaaggtcaagcagataactgaactgaaggccctgactccagaattgattcatgagttcgtagacagaatagttgtgtacgctcctcgctatcttgatggaaaacgcgtccagcttctggatatctactactccggagttggcattctgcatgagttgaccccagaggagatggaggaggccttccagcatcacctcacggaacgcaacaaggaaaaaacagct

SEQ ID NO: 1033 - DNA, 1158 bp, unidentified
  source 1..1158: mol_type = unassigned DNA; note = Bacteriophage uvig_58544 from the Index of /pub/databases/metagenomics/genome_sets/gut_phage_database (ebi.ac.uk)
atgatccagcgcagggataagaaaagaactgccagcgcaaagaggatacaggccgcttttctcgaggagaaccacatcgacattgaggagatccctccgaaggaggagtatgtgagagatactgtcaataagcagctgcgagtatgcgcttactgtcgagtaagcaccgacgaggagtcccagcagtcatcctatgaactgcaagtccagcactacacagaatatatcaataagcatgataattggaccctggttggtgtttatgcggatgaagggatctctggaacttccgtgaaccaccgggtacagtttcttcagatgattcaggacgctgaagatggaaagatcgatatgattgtcaccaagagtatttcccgatttgctcggaacactttggactgtatctcatacgtacgcaggctgaaagcacttaaaccacccgtgggggttttctttgaaatgaacggctacaacacattggatacaattagcgaaactttcctgacccttctgtctaccgtggcccaaggcgaatccgaggctaagagcgaggccttgaagtggagttatagacaaagattcaagaagggaatacccgtgaacaatatgtgggctatcatggggtatgacacggacgagaacggcaaaatttttatcatcgagaaggaagccgagatcgtgcgcttcatgttcacagcctacctggaaggcaaaagcaccgtcgaaattgcagaagccctcacaatggccgagatacccactcccaaaggaaatgtgagatggcagcctggaacggtggcagggatgctccataatgaaaaatattgcggggagatgcggatgcagaaaaccgtgacagtcgacctgttctctcataagagtgttaaaaatgagggcatcgtgtcacaataccgcatgaaaaactaccacccagcaatagtgtctcggaaagtttacgaagatgtccaagagaggttcctcgacggcggtaatcgggcccgccacacgaaggagccaaaggtgaaagtgaagttcaaacctattaaaagtggtctgttgaccggctttgtgccaataccttcagcggtcgagaagatcgacattgaacagctcaaggagatttctaagaagcagaaaagcaggaggacaaagaaatgc

SEQ ID NO: 1034 - DNA, 1674 bp, unidentified
  source 1..1674: mol_type = unassigned DNA; note = Bacteriophage uvig_42250 from the Index of /pub/databases/metagenomics/genome_sets/gut_phage_database (ebi.ac.uk)
atggacatacacgagacacggcaaaagttgaaactgaagaacatctttgacattaatctgagagttaccttttacgctagagtgtcatccgaaaaagacgagcagcttaattcacttgataaccagatcagctactataagaacctcatcaaaaagaataagaattggcagtacgtggatggctacatcgatgagggaattagcgggatctccgtcaagaaaagggaaaactttcataacatgataaaagatgcgaaggcgggtaagtttgacttgatactcactaaggaaattactaggttcgctcggaacaccctcgactccattaagtatacccgcgatctcctgtcttatggagtgggcgtttttttccaaaacgataacatcaacacactggacgaggacagtgagcttcgccttaccattatgtctggcattgctcaggacgagctgaggaagctttcctctcgaatcaagtttgggcatcaacaggccatcaagaataatgtggtcctcggcaattctaggatcttcgggtatgtaaaagatggaaaacggcttgtcatcgacgaaacagaggctgaaatggtgaaagaactgtttactttgtatgccaccgataactactctatgaagcaaatcgagaacatattttgggaaaaggggtatagaaatctcaacgggaacaagattgtccactcaaccatgtctaatatgatcagcaatccgaagtacaagggctactactgcggcaacaaggttaaaatcgtggatatgttcacgaaaaagcagaaattccttcctcctgaagagtgggtgatgttcaaggacgaaaccggagaaatcgtgccagctatagttgatgaggacctgtgggaacgagcaaataaggtcctccagaaaaggagcaatgacgtaaagaatcggaaaggcatctgcaatcacgataacttgctgaccggtaaactgttctgtacacattgtggaaaaccatattatcgcagagattccaaggaccgaaacggcaacaagaattcaatttgggtgtgtagtgggaaagtaaaaaatggcaaggattcctgtcccagcttttctatctacgaaagtgagattaagcccatcctgtttcaggtgttcaaagacactagcgcagatgttgatagcctcattgagcagtatattgaaatgtataagagtctcgacgaagataattgcatctcaaaaagtatcaagagcattagaaataaggtcgacctggccaaccgcaaaaaatctaaacttctggagtacaatatcagcggtaagctttctgataacgacttcatcaacatgaacactcaaattagcaaggacataacaaagttcgaagaggagattgccgccttggaggagcagaaaaactccaaggacaaactgaaggaacacattgagaagatgaaaaaattgctgaagcaggccgaggcagaggcacaggaaaagataatcgacaaagagttcataaagaagtacatcgacaagatctacgtgtcccccgagaatggacatctgaaactgtccattaaaattttcacaggtgaggtgacggaaaaatacctggaggatttcaaaagtcggacagggcacaccttcaaaacgaactgccgcacttttgccaagaattttcaggtctcaaac

SEQ ID NO: 1035 - DNA, 1686 bp, unidentified
  source 1..1686: mol_type = unassigned DNA; note = Bacteriophage uvig_198610 from the Index of /pub/databases/metagenomics/genome_sets/gut_phage_database (ebi.ac.uk)
atggccagggccaagaaccggggatatcagcagtcattcagcccgagctatacgattaggaggtggaggcttgggatctacatcagactctccaaggaggacctcaaaaaagggaaggatgatagtaactctgtcaaaaatcagcgggacctgctgaatgatttttaccggcgaaatatagatgaatttgagtctatcaccgaatatgtggatgatgggcatacaggcacggatgcaaacagggaggatttccaacgactgttggcagatgtgatgtcaggcaaaattaattgcgtcatagtgaaagatctgagccggtttgcccgcaactatagcgatgctggttcacttattgacaacctgttcgtccaaatgggggtgcgattcatctcactcgctgaaaacgtggacagttataagaatccagactcagtgtccaacatcattgtgcccatcactaatgtgatgaatgacaattactgctaccagactagcaaaaagattcgccaggtctttgactacaagcgacggaacgggcagtatatcggtgcctttgcaccttacggatacgtcaaacacccaaaggacaaacacagacttatcgtggacccggatgcagccgagaacgttaagctgattttcaccatgttgattcagggctcctctaagagagccatagctctgtatcttaatgagcatggcgtccccagcccttccgcctataaggtgcagaaaggccttcccgtttctaccagaggctacgatgaccctatgtggggcgctagaatgatacatagcattttgacaaatccaacctacaccggtgacctggcccaaggaagatctagagtgaaaagttacaaggtgcatcagattgaagctgttccccgcgaggagtgggtcgaggtcgccgggacccacgaagcgatcatcgactatgaaacattcgacaaggtacaggctctcctccaacgggacacccggaccagtccaaagggacgcgaggttcatctcttctccggatttctgaagtgtgccgactgcggccgggcaataactcgctgtgtgggcaaaaacaacaatgtatactatagctgcagtacgtacaagaacaggagccgcactgcttgtactatgcactcaatcaagcacgaaaggttggaggccgcagtactgttcgccgtacagcatcaggtgcacttggcagtctcctattcagagatcgtgacacagattaatagtgcgcctattaaaaagtcccaaagttacagactggatgacctcatagccgctaaagaacgcgaactgaccaagattaccaggtacaaacagtccttgtatcaggactggaaggatggtgaaatcactcagcaggagtatagagacatgaaagctgattacgagcgacagactagcgacatctccgctgttctgacaaggttgaatgccgagagggcggagctggccaatggagtggacaacgagcaccccgcactggtcgcgtttatgaaataccaaaacatcgaagctctcaaccgcgagatccttgtggagctggtagactacatcaaggtgtacgagaacgggaatatctctgttaagttcaagtatgccgatgaattccggcgaatggcagaatatattgagcttaactcccactctagaacaacagtttgtgaattttct

SEQ ID NO: 1036 - DNA, 1605 bp, unidentified
  source 1..1605: mol_type = unassigned DNA; note = Bacteriophage uvig_507007 from the Index of /pub/databases/metagenomics/genome_sets/gut_phage_database (ebi.ac.uk)
atgagcaaggagtataacataggcatctacattcgcctctccatggcagatgaggacactggttacgggtctaaggccgagtccgattctattggaaaccagaggatgcttatcaatcggttcttggataaccacccggaactgtcccattgccaaagaagcgaatttgcggacgatggatacaccgggacgaatttccataggccccagttcacccaaatgatggaaaaagttaagagaggcgaaatagatctgatatgtgtgaaggatttctctaggttttccagagactacatcgagacaggaaattacctggaatgtacttttcctttcatgggggtccgctttatcagtataaacgatggttatgacagtaacgactacaagggcaccacaggcggcctggaggttgtgatgaggtccattatctatgctgcctactctaaagacctctctgttaaaactacgtccgccaagattcaaatgatgaaacaggggaaatatgtcgggggatatgctccatatggctacgtgctgcacccatcaattagaaataagctcgctgtggatcccgaagccgccgacgtaatccgccgaatttttcgcgaagccctggagggctctaacaccagccaaatcgcccggtccttgaacgacgacggcatacctaccccagggcagtacttcaagagtaagcaccccgataagaaaaagttcagcaacatgagcgagaagatctcatgggagacagtcatggtgtacaatatccttaagaatttggtctataccggtacactggtgagcaggaagatgaagtcttgcggtgtgggcagcaaaaaacgagtggtgaatgagccaattatcgtagaggggactcatgaggccattatttccaaagaagatttcgagctggcacagaaggtaattcgaggaggaggcagaaacccgactagaaaacagcacgactatcccctgaaaggactggttcggtgtggtaattgtaaacgcgcaatgactcgccgcaaaaacaaggcgggaattcgatattttcagtgcattcactccgtaaacaatggcaataccgattgtcctgtgggcaggtcatttcctgaaatggacatcgaaaaggttgtctttcacgcactcacccagtttctggctctcgcgcaaaaagaagctgtccagaacagagaagtgggggatcttcggaagagcgcgatcaaggaatgcgccgataaaatccggacgttgcagaaacagaatgaacagcataaagctagtaagcttcggttgtacgaaaagtacgccgccggaagtatcaccaaggaggcctacattcagcaaaaagctgccgctggcgtgaaaattgcagagaatgacggggccatccagcggtcacatgagaggatgaaggagctggacagcgagaccgcttgctcagacgagaaacttgatgcagtgtgtgagcagtatgcagattgcaaggcactcacatatgagctgacacacgccttcatcagtgcagtctacatctacgacctcgacaacatcgagatagtgtggaaattcaaggacttccttactacatcagagggtgaagctaag

SEQ ID NO: 1037 - DNA, 1593 bp, unidentified
  source 1..1593: mol_type = unassigned DNA; note = Bacteriophage uvig_232060 from the Index of /pub/databases/metagenomics/genome_sets/gut_phage_database (ebi.ac.uk)
atgaacgacaaaatcgctatctatctgcggctgtcccttgccgatggagacctcaagaaggggagcaaggatgagagtaactcaatagagaatcaacggatgttgctccacgactacattgggaagcaggaggatcttttcggtgagatcgttgagtacgtggatgacgggtacacaggcacaaacttcaacaggcctgcctttcagaaaatgattgtagacctgaaacagggcaatatcaaagtcatcatggtgaaagatctgtccaggctcggacgagactacattggcgttggagactatattgaacagatctttcctctcatgggtgttcggttcatcgccgtgaacaacagttttgacagcatgaaactgaataatggtactcctgggatagaagttgctgtcagcaatctggtgaataacatgtattcaagggacattgcaaagaagattcgcgcagccttggaaacgaattggaagaatggcaaagctacctgcacgaatgtgccattcgggtatgtgtggaacaagaagggcgggagacggtgggagatcgatccagaggcagcagtgtgcgtgaaaaaggtatttgaattggcactctcaggatgcaacaccacccaaattgcatacgggatgaatgaattgaacctgcccaccccgggtttgtacgccaagcgaaagaatctgctgatgggcagcaaccccattatagcccccgactctgaaatgctctggaacgctgcaatcgtgtggcgcattcttcggaggtacgagtatacaggcgccttggttatgggacgccggaaaaaaatagacgtgaatactacatccgtaagaaccctgcccgaggacaagtggattatcgcagaaaacgctcatgcggctattgtgaccagggatgagtactaccaggcgcagaaagctatccggaacgtcacaccaatccagtacaaagtgggagatgattttgcgttgaaaggcaagatctgttgtggaaattgtaatagacagctgagacacgaacgccagtatggagaaatggttttctactgtggatataagagaagcgccggcaagttctctaagtgttatggcgggtactaccgcgagtactctgtgaacgctaaggtcgctcgagccatcaagactgttttctatgccctcgatgtcgtcaatcagggcatgcaagaaaagcagagtgtgactgtaagatgtatggatattgaggaccttgagaaacaggctgaggcgataagagtggagcagatcaaactttatgagtcctatgcagatggggtgctgcggcgggatgcttatattgagaagaagaaagccctcagtgagaagttggccgccttgcaagactctatccgaacggaaaaggaagaacaagaatgcgccgacgagcttgatgaagaaatacgcgccctgactaagcaggcctcagagaaaacctacattggtggcctgacaaaagaatgcgtggacgcattcgtctccatggtctacctgtatgacgaccagaccatgaagatcgagtttaactgcgaggatgtcatcaggagggccctggagaaatacggcact

SEQ ID NO: 1038 - DNA, 1467 bp, unidentified
  source 1..1467: mol_type = unassigned DNA; note = Bacteriophage uvig_598290 from the Index of /pub/databases/metagenomics/genome_sets/gut_phage_database (ebi.ac.uk)
atggacgacctgctgaagattggcgcctcatatatcagggtgagcgatgagaggcaagatgagtactcccctgattctcagcttaaaaagatcagagaatacgcttccaaagaggggtacatcatccctgacgaatacgtcttctatgacgacggtatctcagggcgatctgtcaaaaggcggggtgatttcaagagaatgatcgccacagccaaagagaaggatcatccatttgataccatctacgtttggaaattttcacgctttgcaaggaatcaggaagaagctatggtctacaagaacctcttgagaaagtctaatgttagcgtcgtaagcgtctcagagcctatccctgagggtcactttggtacactgatagagaggattatcgagtggatggacgaattctacagtgtaaacctcggcgcagaggtatcccgcgggatggaagaaaaattcactagaggcgaacccacgtgcagcccaccattcgcttattacatgaaagacaaaaagtggctcgtggacgaagagaacgcagctattgtgagagaagtgtttcagagatttgctgacggagagggcacacgggccattgccgtggatcttggcaacagaggcattaaaaccaaacacggaagcgtccctgataaccggtggatcgactacatgctgaacaatccagcatatatcgggaaactgcggcgatccccgaatgggagcagggcaatctccaaacggtcttatcgcaatgacgagattatgatcattgatggatgccaccaagccataatttccaaagagttgtgggacagcgtgcaggagagaatcaagatgattaagagtatctatcctaagtacgcgaagcgcgagcaaccaattgattatatgctgaaaggcatagtgaagtgctctagttgcgggggcacactcatcatgagcagcgtgacctctggcaagagtaatactccgaccttgcagtgttgtaattacagtaggggatcctgtactgtttcccattcaatcaccgtccccaagatggaaaaggcgttgatggatggacttgatcgagttatccggaccaagcagttcaatatagtgcccaggacccccaaggaccccgacgccgctccagtggactacgaccggcttattgcaattgaagagcgcaagctggagcgggcaaagcaggcttttctcgctgaggtggatacaatagagcagtatgcgcagaacaaggaagagatcaccgcccgaatagagcgccttactgccaaacgagatgaagaggctcccagaacagagattgatctggacgcctatgttaggcgcgtaacggaaattgttaacttcgtgaaccgaaacgacgtgtcagaaggagccaaaaacgaggccctgcgcactattattgaatctgtgatatgtgagaagaatcgggataatctggccatctatttctacgaattc

SEQ ID NO: 1039 - DNA, 1869 bp, unidentified
  source 1..1869: mol_type = unassigned DNA; note = Bacteriophage uvig_73872 from the Index of /pub/databases/metagenomics/genome_sets/gut_phage_database (ebi.ac.uk)
atgtccaaacagccagaaatggtgatcgcacgcaatccccgagccaccaggaataacgatacaactctgaacttggacaaccagatgtatcagcagcccgtaacatcttttcaacgggtgagtaacgatgcacctctctctgaagaaaccaaaacagctatacaaaatacagttctgcagttttatgttcactctcagcctcaggaggaggccgagggcataacggcctgttatgagcggctgtcacaggaggacaaacttgacggagagtccaactccattagcaatcagaaaaggatcctggagaagtactgtcgagaacatgggtacactgctataaggcactacgatgaggacgatgggtactcaggaacaaactttaatagacctggattccaacgcatgctggccgacattaaagccggaaaaattaaacgagttgtggtgaaggacatgagcagattcgggcgaaattatctccaggtcggtatgtacaccgaaatgttgtttcccgaatatggggtgcactttatcgctgtgaatgacggtgtagactccgtccgcggagatagtgaattcacggctattaggaacgttttcaacgagatgtacgcaaaggacaccagcaaaaaaatccgggccacctggcagtctaagggcaggagcggggaacacctcactaccattccaccatatggatataagaaggatccagagaataagaagcggtggatcgtggatgaggaggcagccgccgtcgtgcagaagatctttgctctctgcatggacggtatggggcccacccagatcgccaagtggctccaggagaacaaggtgctgagcccagtggcttactgctatgaaaatgacctgcccaccacctcaaaacgccctactgatccctataagtgggccacaaagactgtcgtacatattctggaacgactcgattacctgggccacaccgtgaatttcaagacgtcaaagcagtccttcaagagtaagaaagtgctctggaacgacccggcagactgggtcatttttgagaatacccaagagcctatcattgaagagagcgtatttttgatcgtgcaaaaaattcgacagggccgcaggcgacctacgaaaatgggcgacatgggtatgttttctggcttgttgttctgcgccgattgtgggggcaaaatgtacctttgtagagcgaaccatttcaagcccgagcaggagtactacctgtgctccacatatagaaaagacagaaccctgtgcagcactcactccatccggcgggttgttcttgaggagattgtgctgcggaacctgcgcgaagcaatccaatatgttacacagtacgaggatgattttgttcaaagagccgctgatcaatcacttagggaaagagacaaggaacttgcacagaaaaaagatactcttgctcagtctcagaagcgcattgccgaactggacgtgatcatcaaaagactctatgaagacaacatcagtggaaagctgagcgatgagcgcttcatcaaactttctagggactacgagctggagcaaacaaatctcactaacctggtggagcatctgcggcaggaggtgaaagagcaggagaagcagaaggtcaacgtcagacagttcattgctgccgtcaggaaatacacagacatgcaacagttggacgcatacatactcagggaattcgtcgataagatctacatcagtgaggtctataccccagatgagaatgagccgcgcataaaggtgagagaaattgaaatagtgtacaatttcatcggcgcgtttgatttcgaagaagcgcgggaacagtcccaggctgcgcaaaaggaaaagaagactggcgtagcc

SEQ ID NO: 1040 - DNA, 1323 bp, unidentified
  source 1..1323: mol_type = unassigned DNA; note = Bacteriophage uvig_41106 from the Index of /pub/databases/metagenomics/genome_sets/gut_phage_database (ebi.ac.uk)
atggaaatgaagatcaccaagatcagcaccctgcctcaacttgatcgaaagaaacgggttgccgcctacgcccgggtctccaccggaaaggatgcgatgctccatagtctctcagctcaggtgtcttattacaacaacttgattcagaataataacgagtgggagttcgctggtatctatgccgatgaagcaatgtctggcacaaaagacaacagagaagaattcaaccgcatggtggacgattgcaaggcgggaaagatagaccttataatcacgaaagctatttcccggttcgcaagaaacacagctactctgctgtcaacaatacgggagctgtcctcagtgggcgtcgatgttttctttgaggagcagaatctgcacagcatttctggcgatggcgagatgattcttacgctgctggcaagttgtgcccaggaggaagctcgcagcgcctctgagaatgtcaagtggcgagtgaaaaaagatttcaaacaggggatcctcaacgggggtaatgattgctacggatataagctcatcgacaagaagtttgtcctcgtgcctgaggaggctgaaatagtaaaaatgatttttgcttggtacatctgtggcgaaggcgttgtggctatctccaagaagctcgatgatatgggcatcaaaccagttcgcgccaagtattggctcccgaataccattatgaggatgctgaaagataggtgctatgtcggagacctgatcttgcaaaaaacatatgtgaccgactacgtgtccaagaaaaagaagagaaaccacggggagttcgacaagtactttgtggagaatgaccacgaacccatcattgacatcgaaacctttaagaaggccaatgccctcatggttgaaagggcaaagagattcaaggcacaggatagaactgcgctgcgctaccccttgtcaggaaaaattgtgtgcggggaatgtggttctaggtttgggcataaagtgtatatgcatagttcccccggatggatttgtagcgcattcgaccggaaagggaaaaaggcctgccaatctaggaaagtcccagagtacgccatggacgaggcagtggacgccgtcatcgggggttacgacaatattaaggtacttgactttatcgaggtattcaacaacaatcgactgctgtttcacttgaaaaacaaggaaattaaagagttcatatgggaggaacgcagcaggagccagagctggactgacgagatgagagaggaggccaaaaaacgaactattatcaataacaagaacaagaagcggggcgctaatggcaagtggcagaaaagtgaa

SEQ ID NO: 1041 - DNA, 1653 bp, unidentified
  source 1..1653: mol_type = unassigned DNA; note = Bacteriophage uvig_53580 from the Index of /pub/databases/metagenomics/genome_sets/gut_phage_database (ebi.ac.uk)
atgaaagtgattggctatacccgagtgtctactaacaaccaggacctcaaacgccagaaggacctgatcaaggattactgcaagcagaagggttacatgctgtcccagattctggaagacaacggcatctcaggggcagtggacgaccgcgaaggatataaagctctcctttccgtcaccaaggacgatgctgatctcgttatcgtctctgaactcagccgcatctccagaagcgaagacgtacaaaacaccctttataacatccattctctgttggcaaagggcatcaagcttatcatgctcgacgaaccagagcacatctacgagggtaaactggatttgagtcagtttctgctccttgctatcaaggcttacggcgcagcagaagagcgactgaagacacgcacgcgaatgaatacaggcaaagagaccagaatgatcactaatccaatggctgatctcgatgctcataagccctatggcttcgtttccgccccgaatccaaagcacggtctttcaggagagcccaaaaaggtctgggccattgacgaggagaagatggcacaggtgaaagaaatctttgagttggtggcctccgggatgagcctgttcaagacagccgaatacatgaacattaggtaccacgataggggattcttgatgaaatctattttcgaaataatacacagaaccgagtataaaggcataagaaaaagggctggcaaaatctaccagctccctgtgtgtccaattcccgtagagctttgggaagccgccaacaaggggctcaaagatcggacagctatcaaagacaaccataggttgtattttaaccctcttaaggggattgggaagtgcgtgtgcggtagaaacttgggagtcaatcaggagagtaaaaaactgtcataccagtgtgcggacaagatgatcaatcggggagacaaacgcaagtgtcacgtcccgaccactaattataatcttgtgaatctggtggtttggaatatttgcagacagatggtgctggacaaggactacgaggccaagagtaatgaagccatacttaaactggaagcggataatcagaggctggaagagtccaaggtcgagtaccacaactcaataagtgaactggacgaagagattaacacaaccgctgagaagtttgccagctccacggatctgaatcccgcgattttgaacgcactcaacgttcgcgtgaataagctggatgcccagaaaaaagaactggagaatagggtggtagatatcgatcgggagattgcccttaataaccggcggattcaagaggaacgaaagatccaaactcaaaaggagctgtccgacgtcagcctggagagcaagagtaagttcttccatcagatactgaacagcgtttacacgtactctgccagagcaaagagcggcgtgattgtggtaaactttaaaaatggactgcaggtcatcgccctctggaaaaaccatttcaaaacttctgtgtggtacttgcctgtggggtttcaattcgacatcgagaagcggatgatctatgttaaaaccatgcccaaaactgaggggcttgacttcaccatttcagagcctgagacaaagttctatgaatatagggatctgtttaaacactttgatcttacaaag

SEQ ID NO: 1042 - DNA, 1782 bp, unidentified
  source 1..1782: mol_type = unassigned DNA; note = Bacteriophage uvig_504803 from the Index of /pub/databases/metagenomics/genome_sets/gut_phage_database (ebi.ac.uk)
atggagatctcaggtactaataagctgattcttcccaaggatatcattctggccgacagagagcgcgaacgcatcatagtctactacggcagagttagcactgagcacgaggcacaactcagcgccctggagaatcagttgcagtggtatgatgaccagagcaagtatcacccaaactggaaggtcctgcggaaatacatcgatgagggcattacaggtacgcaggcaaaaaagcgacctgcctttcttaaaatgttggaagacgctaaaaatggccagttcgatctgatcgttacccgcgaagtctgcagatttgctaggaatactgtggacactctcgtgacaaccagagagttgaagaaaataggcgtagaggtctacttcgtcgaagacaacatttggaccatggatggtgatggagaattgagactgaccattatggccaccctggcacaggaggaatccaggaagacatccgagcgagtgcgggctggtcagaagattagccgagataatggcgtgctctatggtaacgggaacatcctcggatacgacagggtgggggacacatatgtaatcaatgaagaacaagccgaaaccgttcgactcatctacaatctgtactcccaaggcctgggctttaaaaaaattattaacgaactcgtttcacagcatcggaaagactcttatggcttggtgcgctgggaatgtacaaagatatccaggatcctgcacaatgctacttataagggctacatgggctacctgaaaagcttccgcaacaactaccttgagcaaaagtcaatcataaaccgggacgagtctacacacctctatattaaggggaaatttgaaccgatcgtgtctgaggaactttgggaaaaatgtcggcagatacgagaaagcaaagccatgaaaatcaagagttacggcgggaaggaaagggtggtagggtttaagccatctaatgacatctgggtgaaaaaaatgaaatgtaggtgcggatcatctttccgacgctgcaagtggcataaaaataagagtggagagcttatctacgggtaccagtgctataaccagcttaacaacggatctaaaaaaatcagggagagtgcgggtatttctactgaaggatattgtgacatgggaaccattggggattggaagatcgatatgatggctcagaagatcttccaaggcctttgcggggagcagcgggagtgcatcaatcgctcatatagtatctacgagaacaacttcagagccaaggggaacaatagtaataatcagaaagaggtgctgctgagcaagatcgagaaatccaaagttaagctgaataatctgacgaatatgcggatggaaggagaaatttccaaagaggagtaccaggaatgtaggcagaaggttaccgatgagatagcgacgtttcaaaagaagcttaaagccctcgtggaagaaaagaaggagcctgatcccgctgtgatcaagatgtccctcgacgagttcgccgcgatactgattgagaagatcgacttcaacgcacccattatagaccgcgggatcattgagcagttcgtcgagaagatcgtgcctagaaacacccttgagtttgactggtacctgaacttgattccacatatttttgaggataacagctccactggatataacgaggtatggaccttcgtgattaactttgacgaagcagagaagtatagaaaactgaggggcggattcctccggaagaatcagtggagagatttgacagtgcacgtctttgtc

SEQ ID NO: 1043 - DNA, 1647 bp, unidentified
  source 1..1647: mol_type = unassigned DNA; note = Bacteriophage uvig_198801 from the Index of /pub/databases/metagenomics/genome_sets/gut_phage_database (ebi.ac.uk)
atggaagaattctacgatgtaatcgactacaacaccatacttgagaagattaacaatgatctgaacaacgagatctacctgttttacctgcggaagtctcgcgaggatatcgagtatgagaaagagaacaaggagtacaagaccctggagcggcaccaaaagaggctgatcactttggcaaccagtatgggaattaaggtcaatgaggactacatcatacccgaagtggttagtggcgactcaattgccgaacggaattcaattaaagtagtgctgaaactcatcgagcatccaaaggttaagggggtttgggtaattgatgtccaaaggcttacccggggagacctcggagaccaggacaagatcataaaaacttttaagtataccaacaccctgatcatgacaccagaaaaagaatacaatctgcaattcccggcagacgaagaatacctcatagataaacttgcttattctcgaaaagagtatctcggcatcaaaaaaagactgacagagggccggaaggattctgtgatggaagggaaggttccctactcccgcgctgcgtttggttatgaacggtataaactgaaaggccagaagggctattctttgaggattgtccctgagcaggccgaaatcgtgaaggacattttcaagatgtgtttggaggggaaaggcacttttgcaattgctactgaacttaataagctcggtatcccatcccccaatggatgcaagtggaggaagaatggcatcagagaaatgctgcacaataagacatatatcgggaaagtgaagtggcaggaacgccaacagataaagatcattgaggacagccagattaagaccaagaccaagcgaaacaaggagaacgagtacctgatttgtgatgggttgcatgaggccatcatttccgaagaagactttgagaaagtgcaggaactgctgaagcaaagcagcacaaagtatgtgccactggatctctccatgaagaatcctctcagtggaatacttagatgcagtgtctgcggcaaagtcatggcccgccgcgaagggggacagaatgtctactatagccccagagggtcaggtttgaatcctaagtattacaaagctaaagacttggtgtggtgttccacaaataaggaatgcggtacggtgtcaaataatttggaagacgttgaagacatgatcatcgagagcctcaaagaaatcgtgaaacagagaaagcagatactgaacaactacacgaaaaacgaaaacacagtattggacaatataaacaaccagctggagataatcgataaccagattattaaagaagagaaaaagctgaataagctgagagacttcctcgaagatggcatctacgacaaaaaggtgtatattgagcgaagctctatcatccttagcaaccttgagaaactcaagaataagaaacttgagatcaacgagaacaacgagcaccttaagatggagaaacttagggaggccattcctaaggtggagaaaggcattaaagagtactacaaactggatgtggtcgataggaatatcttcctcaacgagttcattgagaaggtgctttacactaaaactaagattcgatccgagtctgatctgaaactggatatctatccgaagttt

SEQ ID NO: 1044 - DNA, 1830 bp, unidentified
  source 1..1830: mol_type = unassigned DNA; note = Bacteriophage ivig_3837 from the Index of /pub/databases/metagenomics/genome_sets/gut_phage_database (ebi.ac.uk)
atgaagagacctgataacaacaagatcactgccttgtacgagcgactgtccagggatgacgaactcaacggggattctaacagcatcgttaatcagaagaagatgctggagaagtacgcaaaggaacagggattcactaacctggcccattataccgacgatggctactcaggaacaaattttgaccggcctgactggaagcgccttaccgcagacatcgaggagggcaacataggttgcgtgattgttaaggacatgagcaggatcgggcgcaactacctggaagtcggcttttacactgaagtattgtttagggagaaaggagtaaggtttatcgctatttccaatggtgtggacagcactcactcagaaagcaatgaattcgctccatttctgaacattatgaacgagtggtatgtccgggatacaagtaggaaaattaaaagtgtgctgagaaacaaggggatggagggcaaacatcttacctcaaatgccatctatggatacaagaaggatcccgaagacaataatcactggctggtggatgaggaagccgctgcagttgtcaggcgaattttccagcttattattgaaggcaacgggcccatgcaggtagccagaattttgaccaacgagaaagtggagcggccaagttactacctcgccaagcagggattgggcacgtgccgaggcaagtgtgacatgacacgcccttactcttggaccgcaacaacaattaccgatttggtcagcaagcccgagtacatgggccataccgtcaactttagaacgtttaaagagtcttataaagacaagcactctcaatatgccaacccagaagattggctcatattcagggatacacaggaggcaatcgtggatgaggatacatggtacatggtccagaagatacgcgagaccaagcatagacccatcgctcaagggaaagctaatcctctgaccggcctcatgttttgcgcagactgtggggctaaaatgttcaatcaccgaactaaaggatatgaaaagaaagataaagatggtaatccgaccggcaagtacacaaacgctcagaataactacacttgcagcacatactcaaaggccaaaggtcatttcgaaaataagtgttcccagcaccacgtgcggaccgacgtggtgagggatcttatccttacgacattgcaatatacagcctcctatgtaaaagaacacgaggacgagttcctcgagaaagtgagaaaatccaacgttctgaagcaggaactcgacacgaaggccctgacaaaaaaaattgcaaagagtgagaaacgcgtggccgagctggaccacctgattaaacggatctatgaagacaatgtctcaggaaaactctctgacaagcgctttgagctgctttccacggattatgagaaggaacagtctgagttggaggagttccttacctctgctagagaacagcttgccactgccaaggaggaagccagcaatgttaataagttcatcgcactcgtgcacaagtacaccgacttctccgagctgacaacccctatgatacatgaattcatcgatcgaatagaagttcatgaagcagacaaaagtactggtgagcgaacccaagagatcgacatctatctgaaatacgtggggaagctggatgtgcccatgccagagttgactccggaggaactggcggaagaggagagaaagcggaggaagcgggcttggaatcgcacctataacagacggaaagcggagaaagaacgcgcggaaaaggaaaaagccgcgctcgaggccgctactgacactgacaagagcaaaaagggggct

SEQ ID NO: 1045 - DNA, 1563 bp, unidentified
  source 1..1563: mol_type = unassigned DNA; note = Bacteriophage uvig_58201 from the Index of /pub/databases/metagenomics/genome_sets/gut_phage_database (ebi.ac.uk)
atgcctcgccaaacaaaaaaactgcaaaccaaggcaaccaaaggcgtgatttgggctcgggtgagctctcgagagcaggaggacgggtattccctggatgcgcagattgagaactcaaagaagtatgccgagagaattggcattgagatcatcaaaacttttgaagtgacagagtcttcaacacatggcgataggaaacagtttcacgatatgatcaactgggttaagagacagaagcagtccatcgctatcatatgtgataaaatcgaccggctccagcgccgggtcagcgaggtgcccatccttgaggagttgaggaaggaagggaaaattgagcttcactttagccgcgagaacagggtaattaaaaaagacactaatggaagcgatttggcatgttacagaatgatagtcgttatggccgaaaattataccgattgtatcgccgacaatgtgaagagatccttcaatcagatgcggaaggaggggaagtgggcacacaaggctcccgtcgggtacaagaacgttaaggacagtaaaggcaattctgatatcatcgtggatccagacagaggcttcctcattacggctctttttaaagagtatgcgtctgggatctacaccttggaacagattacaaagaaggctcgggaaatcggctttaccatgcccaagtgcaagaagctctacaagcaaaccatccgaaatatacttactaatcgcttctatgcgggcgagatgtatggaaagggtgattactacgcacatcaatacaagactctcattgactggaaaaccttcaaccggtgccaggaaatcttggaggggaggataaaccataaagagcagaagcacgaacatttgttcaaggggattatgaagtgccagaagtgcggagcaatgatttctccatacataagtatacaccctgccaaaaaaaagggtggagagaaaatcgcctacaagtatctcttttgtccgaagtgcaaaggcacccatgttaacgaagccaagggagtcgaaaagattatccaagccctgaacgtgcttaaaactctgcctcgaggagtattggaaaaaatggtggcctgccttgacgaccttatctacgaggaccacaagatcgagattgaaaggaaaaaggcactggagcgcaaactggctagctttaatgataaggaagccagatggcacgagctctatgctgaagcatcaattactagagatttccatagcaaaaaactcacagagctgtccaaagagaagcgagccatcgaggaagaactgcttaattaccagcacattgccaagcaggacttcgtgacactgaaatatttggccagtctcttcctgcacgctgatcaaatttggaacttccccaagatcgaacagaaacagaaaatcctgaagctgctgtgttcagagatactgctggacggtaagaacatcgtcatctccattcgcaaaccaataagcgctctggccgaaatcggctcttgtcagatttggcagggtaggcaagacagtaaccctaggcattccgtgcttgagacggaaaatcag

SEQ ID NO: 1046 - DNA, 1881 bp, unidentified
  source 1..1881: mol_type = unassigned DNA; note = Bacteriophage uvig_312745 from the Index of /pub/databases/metagenomics/genome_sets/gut_phage_database (ebi.ac.uk)
atgacggaaaagcaagggttcatgactgcactctacgaacgactctcacgggacgatgagttgaacggggagtccaatagtatctccaaccagaaaaagctgctggagcagtacgccaaagaacatggctttaccaatttggtgcatttcacagatgacggcatcagcggaacccggttcgataggcctggcttcctggcaatgatgaaggaggtcgaatccgggaaagtggggacaattttgattaaggacatgtcccgcatgggtcgggactatcttaaagttggccaatatatggaattgctgcgacagaaaaacgtgcgcctcatcgccgttaatgaaaatgtggattcttttagagaagatgacgactttacccccttccggaacatcatgaacgagtggtacgcaagggacaccagcaagaaaatcaaaagcactttcaaggcgaagggtaaaagtggtaagcacgtcgcttcaactactccatacggctacttgaaggacaaggacgaccccaacgtgtggattgtggatgaggaggcagcagtcgtcgtcaggcggatctttcacatgaccatggacggctatggaccctaccagatagcaaaggctctcaaagaagacaaagtggaaatacccgcagttcacatggcgaagaaagacgctggcttgtggaaagggagggtagaggaaatcaaggacccctacggctggggatctagcactgtggctggaattctcaagaagagagagtacctggggcatacagtgaattttaagaccagaaagcactttaaagataaaaagtctcactacgtgagtgaggacaattggacggtgtttgagaacacgcaggaggctattatcgatcaggagactttcgacaacgtacagcgcattcgcagcaacgtgaggagataccccgatggatggggtgaggcccaccctctgacaggccttatgtattgcgccgactgcggatccaagatgtacgtgcatagggtcaataatgggaagcgcgtcccacaatacacttgctccgcctattctaaggttcctgttggcaccctgtgtcagacacagcacagaattaatgcagatgtggtcatggagctgattaaggagctgttgaaggctgtggccgagtattcccagctgaatagagaagaattcttggaaacagttaagaaagcccaaaccagccagcaaagtagcgagatcacacggctgaagtctaggctcgccgaggccaaaaaacgagtgcaagagcttgagaaacttatatgtcgcatctatgaagataatattctgggaaagctgcctgatgagcggtatgccatactggacggtcagtactctaaagaacaaaaggatctttcagcagaaatcgctgatatggaggctgaactgtcagggtatgaggagggtcgacgctctgctgagaaattcattgccttggtggacaagtaccagaacttcgaggagttgaccacctacatgctcaacgagtttgtggagaagattgtagtacacgaaagagataggaagggaagtgtggagaccactcaggaggtagagatctattttaacttcatcgggcgatatcttcctccacattttggcgaagtcaaaatgacaccagaggagatcgaagagatggaaaaaagagaagctcgcaaagataggctccatcagaactatctgagacggaaggccaatggcaagcagcaggaatattacgaacggacaaaagcgaagaaaaaggccgagctggatgcgaaaaaagaagaaattagacaggaagacatagccaagggagtcttcatcccgctcagcctgttgcctccagctgagccgaagaaaggcgttgcctcagcc

SEQ ID NO: 1047 - DNA, 1686 bp, unidentified
  source 1..1686: mol_type = unassigned DNA; note = Bacteriophage uvig_287346 from the Index of /pub/databases/metagenomics/genome_sets/gut_phage_database (ebi.ac.uk)
atggctggtcaggagaaccaacagtacacggtactgtacggtcggctgagtcaggaggatgaacgcgccggagaatcaaattccatacagcaccagagaaccttgcttgaaaagtacgcgaaggaggagggcttcgaaaatactatctttctcgccgacgacggctattctgggaccaactttgagcgcccttcatggaagaaaatcgtcgagatgatcgaggctggacaggtggccaacctcatcgtgaaggacgcatctcggctgggccgggaatatctccaagtcgggtattacatggagatctacttcccacaaaagaacgtcaggttcatcgccgtcaatgacggagtcgattctaccgtggaaagcagcaacgatttcaacccgatcagaaactgggccaacgagctccacgccaaagacacctcccgcaaggttagggccgtgatgaagatgaaagccgagcaaggcgagcggcttggcggtaggcccccttacgggtacaggaaatccgacggcgatgctaataccttggtgcctgacgaggataccgctcctgtagtcaaaaggatttttagtttgtgcgccgccggaaatggaccaaagcggatagccacaatactgacaaaagaacaggtggtgaatccatccaatgcctattataggaagactggtaagagtcaccgcggattggatactacaaggccctgcctgtggtcttccaattcagttacgtctatcctcaataacgaagtgtaccttggtcattcagtcggattgcgaacgacaaccattagctataagaataagcagagggtggagagacccgaatccgaaagattcgttgtaaaaaacacccacgaggctcttgtgactcaggagcagtgggacattgtccaggaggtgagacagcacaagaagcgggtcccaaagcacatggatgaacccaatattttcagcggcttggtgttttgtgctgactgtggcaaacccctggtgctgcatcgcgcgagtactatgaagcgcgcggagtataactttaagtgctatacctacggcaaaaagggcaaaacagtctgtactccccatcatattagggagttcgaactgaaggcggttgtgctcgaagatcttcgccgagttacacatttcgctcgaatgaaggaaaaacagtttgcagcatatatctccagcaaaaatactctggagctgcgacgagagatgaatactatccagaaggatctggacacaatgcgccggagaagagaagagctgtccaaactcttcaaacgactgtatgaggacaacgtgctggggcgggttaccgacgaacagtacagaatgcttgctggggattacaccatcgagcagaaagccttggaggagcaaattccgaaaaaggaggctagactcgaaaagctgaaggctgccagcgccaacgtgaacacgtttgtggagaaggcaaaacagtatacagccattgatgaacttacccctgagcttcttcggctgttcatccaaaggatagaggtaggggaacggacagagaaatactctagaagtagccaccaaagcatccgcattgtataccgagatattgggacagttgactcagcaatggaacagggcgaagcacagccccacattgcacctccactgtctgaggtgtttgaactcccagca

SEQ ID NO: 1048 - DNA, 1509 bp, unidentified
  source 1..1509: mol_type = unassigned DNA; note = Bacteriophage uvig_569915 from the Index of /pub/databases/metagenomics/genome_sets/gut_phage_database (ebi.ac.uk)
atgtacaacgactcaaaaggcatctatctcatgtacctccgcaagagtcgcgctgacgaatacaaccaggatgtggagaatattctgaagaggcatgaaaaggagctgcaaagtctggcaaagcgcgaattcggtgaactcattcctgaaaaatacatcttccgcgaagttgtatcaggcgggacaatcaaagaccggcccctgatgaaagagatacttaagatgatggaatccgggattatagccggtgtgctggtcgtagatccgcagcgcctgtctaggggcgatctgctggaccagggacacataatcaatgcgttcaagtacaccaatactctgatcatcaccccttataagacctatgacttgaacgacacaactggaaccgacgtcaaacttttgaaaatggaactcaatcacggagctgattatctggattattataagatgattcaagccagaggaaaacttgcctctgttcgggcaggaaattttatccaacccatacccccttttggatacagaaaagtgcgatacggcaaggtgactacacttgagccaattgaggacgaggccaagatcgtaagaatcattttccagaagtacgccgaggggaagactatctgcggcgttaccaacgagctgaacgcagaggggtacattccaccctctaaacaaatatggaccaaagggtccgtgaaacgcattctcagcaatccagtgtacgatggtaaaattagatggggcttcacgcctaatgagacagtgatggaggacgggaagctgaaaaagtgtaggcctgaaagacacgattatctgttgtttgatgggaaacacgacgccattgttaaacatggcctgtttatgtccgttcaggagcggctgtccaagaacaagagtttcactaacgaccggagcctgaaaaacccattgtacggcatcatgtattgcaaacgatgcggaaggaagattagcaggcagaatgtaacagaatctcggggcggtcataggtatgcttgtccgaacaagctctgcgacgtgcagtcttccagatacgatcttgtgatcaatgctgtgatcgacgcagtccagcacgccatcgacgacttcgatataacgatctacgactgtaatacgagcgattccagcgagaaaatccgagatctcaggcaggaattgacaaagctgaataataaggaggaaactcttttcgagctcctggaaacaaaggtgtatagtaccagcgtctttacccagagacacgcggaactcgaaaagaagcgacaggagatcattggtgagattaacaccttgtctttggtcgtccctcccgagagctgcaacgataaaaagatgaggttcaaggatgctctgttggccttgaaagacgaatcaatgccacccaaagagaagaaccggttgctcaagaactgtattgagagaatcgattatgatatcgagggcgtccggtaccattcaaaggtgaaactggacgtgtactttaagttt

SEQ ID NO: 1049 - DNA, 1905 bp, unidentified
  source 1..1905: mol_type = unassigned DNA; note = Bacteriophage uvig_380944 from the Index of /pub/databases/metagenomics/genome_sets/gut_phage_database (ebi.ac.uk)
atgttggacaccgaaagcaagcgccgcaaagagcagcagaaacaaaaggtcaagaaaaggtacaacgtgaccatagacccggagaactacctcttcatccctgctaagaaacagacggattattatgataacgatgtgaatcaaagagttgcaatctacgtaagggtttcaactgatgatgtgcggcaaacaacgagctatgaactccagaagaagtattatgaggagttcgtaactagacacccaaactggactctggttaagatctacgctgacgaaggaatcagcggcacttccctgaagaaacgagacgaattcaacaggatgattgccgactgcagggccggaaaaattgacatgataatcaccaaaagtgtcagtcgctttgcgagaaatgtggaggatttcatcggtactgtcagaaatctggccgaactgaaaccacgcgtgggggtgttttttgaatctgaagcgatcttcagcctgaacgacgattcccagatggcccttacattccaggcaaccatggcggaggaagagtctcacacacgatctcggtcaatggagacttccttgcggatgcggttggaccatgggatccccttgacccccaagctctttggttacacccatgatgaggagggcgagctgcaagtcaatcccgaagaagcgccaaccgttaaactgatgttctacatgtacctttacgggtattcaactcaacagatcgcagacaccctgattgcacaggagcgcctttcttacttcggaaaactgtgttggacggctagcggggttgcttccgtgctgaggaacgaaaggcactgtggagacgtcctgacccggaagacctatacagagaattatagaacacaccgcaccctcaaaaactgcggcgagaagccccagtcatggtacttcaatcaccatactgcaattgtctctcgggatgacttcaacgccgtgcagaggatgcttgacaacgctaagtacggcaacaagagtatcctgcctgaactgagagtgatagacagcggggtgctgaaaggcttcgtgactattaatcctcgatgggccggcttcaaagaggctgactacatgaacgccgctcagagcgtatacattgaggatgataacgtccctagcgaaagtcaggagcccgaagaaatgaccatccaggtagaggccggagattttgacctccgagggttcgaaataactagaacagaatttttcggcggatacacatatccgacagtgacatttcaggacagaaagatcaagtttagcacggagtgcatcaagaaattcggcacgaagaatttcgtggagcttttgattaatccagtcgagatgaaattcgcagttaggcctacagacgcctcaaatcgcaacggggtgctgatttctaaaacctgcgggggtcgccccaagccacgagatatcccctctgccgccttttccgacaccgtgtttagcctgtttggatggaatactgaatgtaagtatagaatgacaggctttctctttgagggtgaaggggagcttgcatacatatttgatgccaaggactccgaggcattcttcaaaagttacgtgcttcctaccaaggagtcaggcgaaggtggcgcctcctccgtccagcccctcaccccaattggcaagcatattcgggccattccggctcagtggaccaggacatttgggaaggaattctatcttcatgaacagccattttccagtctggcttctatgactaagagtgattgggagctgcggatcaagggccaattgtttgagacaggcaagaaactcaacgtgacaggattcgatgagctcaaacagtatattacccacgagctgggtggagtgatgcctcaagaggtttcaaatggaaatcttgag

SEQ ID NO: 1050 - DNA, 1596 bp, unidentified
  source 1..1596: mol_type = unassigned DNA; note = Bacteriophage uvig_585281 from the Index of /pub/databases/metagenomics/genome_sets/gut_phage_database (ebi.ac.uk)
atgcctgagaaatatgccatctacctgcgcaaaagcagggcagatatggaagccgaagcaaggggcgagggtgagaccctggcccgacacctggccatgctgcaaaacctggcacggcggaacggccatgacattggtcaggtatacagggagatcgtctcaggagaaagtatcgacaataggccccagatgcaacaactcctgcatgacgtggctgcgggtatgtgggcgggcatctactgcacagaagttgaacgattggctcggggaaacactactgaccaaggaagagttgccgaggccttccagttttccggcaccaagatcatcacgctggccaaaacatacgacccaaataacgagttcgacaccgagtatttcgagtttggactctttatggccagacgcgaatataagtccatcaatcgacgaatccaggccggccggaagcagtcagtgatggagggcaggtacatctactctcgaccagcttacggatatagaaaggtaaaaattcacggggataagggatatacactggccattgacgagcaggaggctatagtggtcaggcggatctttgagcaatacgctactacagatgacggattggttgtgatagcaagacagcttcgggaggaggggacccctaccgggcaatatgggagcgtgtggggcgagtcccgggttcaccgcatgattacaaacgaggtctacctgggaatgatacgcgatggccacgacaaacagatcaaagtcatgcagaacggtgtgatcctcaagaaaagagcaataacgcgggattacactttggtgcagggcttgcacccagccataattagccgagagttgtatgacgcttgtcagcgaaaactccattcccctaggccaagagggactgctgcgtctccgggcttcaaccacgcgcagggtatcccaaagaacgatggccagtatcgcgctaattcactcgcggggctcctcgtgtgcgccgaatgtggccacatcatgcggagaaaggcatcatgcgggaggcagagggataggctgttctgtcatacccccgggtgtcctactgtcgcaacttactttgaggacgtagaacaaagcatcctttccacgctcaggcagtggatggaagccgcagaaacagatggtcaacctgaccccaatcccgccattgcctctgctctggctagaatagaagcacttaagaaggaaaaggctgcaaccgccgcccagctcgacaagctttatgaccttctggagcgcggcctgtacagtgaagagctgttcaccgctagaagaattgcattgaaacagcgcatggccgccctggatggcgaaattgccgaggctaatcggcaggcgaaaacacagtatgtgcccattgcccaattgtacgatcagatcaaaagtctgcttgatgtgtacgatcatagcagcgctgggcagaagaatcgaatgctgaaatcctgcatctctaagattgtctatcacaagagtcagagagggaacattattaacggacgcaccgtggtggatggaaatcagtttgaattggaggtttacccgcgcttggcatctcaggacgaa

SEQ ID NO: 1051 - DNA, 1656 bp, unidentified
  source 1..1656: mol_type = unassigned DNA; note = Bacteriophage uvig_85227 from the Index of /pub/databases/metagenomics/genome_sets/gut_phage_database (ebi.ac.uk)
atgaaagtgtggctttactataggttgtccagggatgaggacgaagaactcaatagcctcaacaatcagaggaaaattatctacaacttcgcggtttctaatggtcatgaggtcgtgggagagtcctttgatgataatgtttctggaatgcatttcaacagggaaggcatcgataaaatctacgaagtcgtggaggccgggaagattgaggccatcatagtgaaagacctttctcgcctgggcagacatcgcacgcagaccgcgctgttcatcgactacctgcgcgaacacgacgtgcgcgtgctttctgccacagagaacattgacaccttcaacgaaaatgacgacctcataatcggattcaagggactggtgaacgatttttacgctcgggacgggtcccggcgcgttcgaactggttatagacagaagcagaaagaaggcctcgtaaccatacccccatttggctatttcaaagacaagaacactaaaaaggtcgtcatcgtagaggaagcggccgaaacagttcgcatgatttttacagcctatgtgggcggatcagggatgaaggccattgctcggatcctgaatgaacagagaagaaagacccccgctctggtccaggctgaattgcttaataagcggcttccaaacacccaggacggtattcttaaaaaatacctttgggatgcgacaatggtagctagaatcctgagggacgaaagctatatcggcacactcatttgtcacaagagtgagcggaataagatcaataagacctttagattcacatcccctgacgagcagtttcgacacgagaattacctgcctgtgattgtaactagggagatttgggagcaagcacaagctctcctggcagaacgcaaggagaaaaacgtgcgggccggaactaaccgggggatcctcagatacggcgggctccttaggtgcaaagactgtggccgcaccttcatcggcaagaggataaagctcaaaagcggcgagcgggttgcctacgtgtgcgacacctatcacaggtatgggaaggagcattgctcaagccatatggttgatgaggagactcttgaccgactgatcggagcagaaattctgcgcacgaagaagatgtacgaggagaactggagtagaatggagtggctggtggagaagtggactcccaaggcttccaccgcaagcgcaaaaatttcaaaactgcaagagcacatcctgttgcttgaggaagaagtcgaggtgatcctgatggagcgcattagagacaaagcaaatgccgaacgatatgatcgaatgatcgccaagcgcgaagagcaaattgctgaagctaaaaagcagatagaggatctgcagaacatctcagagatgttgaggagtcgacaggcaaagctcaaacgggacattagcttgatagatgatattcttagggaaggcaaaatgagtgaagcccacctgagaatgttggtggaaaagatattggtccacgaggaggatgggagacttgatcttgagatccgactgaaggcccctttccgggaccacctggatgtgtttgaaaacggggctcagacagattgttttccgacggccgacttcgattacgatcggctgggtgcagccatctatggtgactattacgccgga

SEQ ID NO: 1052 - DNA, 1866 bp, unidentified
  source 1..1866: mol_type = unassigned DNA; note = Bacteriophage ivig_3177 from the Index of /pub/databases/metagenomics/genome_sets/gut_phage_database (ebi.ac.uk)
atgattgataaaacaaagaggctcgagaaagaacaggcaaaagccaaaaccaaaaagcgcatctacgtggaagttgaccctgaaaactacgactattttcctgagacccgccaggctgattattacgataatgatgtgccccagagggtcgcgatctatgttcgcgtttccacagatgatgtgagacagactaccagcttcgagctccagaagaagtattacgaagatttcgtcataaagcacccccactggaccctggttaaaatctacgccgacgagggcatctccgggacaagcctgaacaagcgcgaacagtttctgcagatgatttccgatgccaagcgcgggaagattgacatgataatcacaaagagtgtctctagatttgctcggaacatatacgattttatcggcatagtacgcgacctggctgaacgaaatccacccgtgggcgtgtttttcgaatctgaggggatattctctctcaatgacgattcccagcttgcgcttagcttccaagcaacaatggcggaagaagaaagtcatacccggtccaggagtatggagactagcctccggatgaggcttgacaacggaattcccctcactcccaagctgttgggctacatgcacgacgccgacggcactctgatcccaaacccagatgaagctcctaccgtcaaacttgctttctacatgtacctgtatggatactcctcacaacagatcgctgacgccttcaatgcactcgggagaaagagctacctgggaaacattaactggacatcaaatggcatcgtccagattttgagaaatgagcgacattgcggggatgttctgacaagaaaaacttttactccaaatttccgcacgcataaagcgaagaaaaatagaggccagcgacctcaaagccgatacagaaaccaccaccctggcattgtctcaagggatgattatatcgcagtgcaacggatgctggacaacgctaagtatggtaataagagtatccttccagagattcgcgtggtggaggacggagtgctcaaaggtttcgtgacaatcaatccccgctgggccgggttcaaggaaggtgactattatcttgccagcaaaagcgtgtatagttcccccgaagaggagccccatccggaggaggagatacagttcgaggttgaggccggtgatttcgatctgcgggggtttgaaatcgctaggggtgagttttttgatgcccctcggcagccacacgcaatcatctatcataagtttatcaagtttagcacggcctgcgtcaggaagttcggaacgcagaactacatcgaaatacttattaaccctatctctcggaagttggcaattaggcctaccaccaaggagaaccggaattctgtgatggcctctaaaccggaaaagggcattctgtatccaagacttatcccaactgccgccttttcagagacgatgttcaatttgctcgggtggaacattgagtacaagtatcgaattctgggtactctgtacgagcaggacggagtggtagcctacatctttgacaccgtggactcagaggcatacttcaagccgaacgtactgtccaaagagaatggcgaagaagactgtaccaacgtacagcctcttatgccaagcggcaaaagaattcgagcaattcccgagtcttggacatcttctttcggaaaacaattttatgctcaagagaaatcagtcaccgaattgcaacggcagtccgaggaggactggatgttgaggctggaaggccagctgttcgagacaggaaataagctgcacgtgactgggtttgaagagcttaaaagtttcatcacccaggagctccagggagtggacatt

SEQ ID NO: 1053 - DNA, 2217 bp, unidentified
  source 1..2217: mol_type = unassigned DNA; note = Bacteriophage uvig_83127 from the Index of /pub/databases/metagenomics/genome_sets/gut_phage_database (ebi.ac.uk)
atgatcgaacgcttcgacatagcagggtatgctaggatatctgttgatgaagaactggaccgggacaacgtgagcattgagaatcagaagtccataatcgaggatttcgtcacaactcatttcccaaacagtaccctcactttctttgaggacagggacagaagtggctacacttttgagcagcgggaagggtaccaggagatgcgccggggtcttatgtcacataagtatgacatcttgatagtcaaggatttcagcaggttctcccggaggaatagccggggattggtggagctggaagaccttagagatgctggcgtgcgcatcattagcattggtgacaacatcgattttcccaatgacgatgactggctgaagatccaatttcaatttctgattaatgagatgcccgtgacagacactagtaagaaagtgagaagcgtagttaaaaggcggcaagaagaaggaaggtggctttgtgctgctccctacggatacattttgaataagcaacaagtgtttgaagtcgtgccaaccgaggccgaagtgattcagaccatctttaagctgtatctggacggatggggttataagaagatcgctaattacttgactgataacaacgtccctactccgaggatgagcgagtgtgagcgcagagccgccgcaggcgaacccgtcagacggaaaaccaaagccgcctgggctatcgtgacggtgcagggcatactggacaatgacttctacatcggtactctccggcaggggaagttcacgagggtaaaaattaacgggaccgataggaaacttgacgagtctgagcaccgggtcttcgagcaccaccatcaggagattatcgattatagaacctttgcaaccgtccgatccctgcgagagtcacggtccaccaataactaccgcggcgtgaaagtcaacgacaacgtttacagtggacttttggtgtgcggagactgcggttcccctatgttcgcaatgtcccgatctgatttggcccccgcatatacctgtggaacatatcaccgcagagggctgaaggggtgtacatcacatcatattagggtagagaccctggacgctctcgttaaggattatgttaggaaggtgcgagataattcttcaaccatgttggagcgactgaacgcggacctcgaaaaagaacagactgatattgccgagacaaaaagaacggaagagaacctcgaggctctgttgttggataagcaagaagagctgaaggccaccaagcgccagcgaattcgagacatgatgaagcacccagagcaggaggccctcctcgaggaaacttacgacgaactggaggctgagctcacacagagaatagccggaatccagcaccagattgagtttgctagcgataaaaggaatacgatcatccgcattaatcgggtggccaaaacagccatggacgtgtttcacgacatactcgaaaagccagccctggaccgcaatgacctcaacttgatgatcgaaaaaatccgagtgttcgaggatcacatagaggttcagctgaaggcagatattgattctcttctgaaaactggcgcgctgcctgaagacgctgccaacttcaactgggatacagaaaactctgagtcacagctcgtcggggcagatgattctgtcagaccccgagtagacgtggggatcgacccttatgagaccgaaatcgtgcagggtgcagctcaccggaaggataaggtgtttcgcgtatccgtgatcagttccggcgacccgctggagatctacacggagaaagacggcgaagtcatttttaaaaaatactcccctatgggcgatttgggggagttcgcaggccaaatctgcgaggcgattggaaagaatacaggatatatcgcggcggtgtgcgaccgcgatgcaatcatcgccgttcatggagtccagaagagagagctccttgataaaagatgttctcaggaacttgaacagctgatggagctgcgaagatcatacagataccaggatggcgacctgccagtgcgccccaccgatgccagcgataggtatcgggttggcgccgctgctccaattgttacagaaggcgatctgatggggtgcgtgttgttgttgagcgaagacggggcccctgccttgggtgaagccgaacagcgacttgtacaaacagtggcaggcttcctgggcaggcagatggagagt

SEQ ID NO: 1054 - DNA, 1467 bp, unidentified
  source 1..1467: mol_type = unassigned DNA; note = Bacteriophage uvig_205904 from the Index of /pub/databases/metagenomics/genome_sets/gut_phage_database (ebi.ac.uk)
atgaaagctgtcatcctgacccgagtctcctctaaggaacaagaagacagactgagcctggatgcacagaatacaagactgactgagtacgccaaaaggaagaatctcgaagtgataaactcattccaaatagtggagagctccactaagggcgacaggaagaagtttcgggaagtgctggagttttgcaaaaaacagaaggaaaccattgctctcctcgccgacgccgtcgatcgcgtacagcggtcttttaaggaatcagtgattctggacgatcttgttcggcaggaaaagatcgagctccatttcctgcgcgagaacatgatcattggcaaaaacgcttcatctatcaatgtgctccagtgggactttgcagttatgggtgcaaagagttacgtgcttcagcagagtgaaaacataaagaggtccaacaagtataagaaggacgccggagagatcacctaccaggctccgttgggataccagaattatcacaatgagcttgggaaggcaaccgtgcgaccacatcccatatttgctcctgttgtaaccagaatgttcgagatctactctttggggaagacatccatgaaagaactgcaagagtacgcagctgaacatgggctcttgggacgcaacgggaagccactctatttgcccacaattcagaaaatcctgaagaatccgttttactacggcatgatgcagagatgtgatgggcttaaaccccacatctatcctcctctgatatctcaagaactctgggaacgatgtcaggccgtgagaactagaataagcgcgcagaaccgaccttataaacggcccaagcgggaatttttgtatcatggaatcattcactgcgcgaataccggcaaaatctgcagctgtgagatcaagaaggagcaattcacctatattgtctgttatgataaaaacggtaagcgcaaatacattagggagcaggacgtcacggatcaaatcgcgtacatattgcatagcatcaaaattccagagaaaatgctgatcgacttccacaagcacctcaagacggccaaagatgccgagatcaagttcagggaagccgagctcacccagttgaagactgacctgacaaaaacactgactaggattgatcggcttttcaatctctaccttgacggcaatatcgataaagagacattccaggaaaaaaataatcagctgattgccgagaaagagaagatcaaaaacaagatcgctgctcactccgccgcagacgacacttttaacgaggtgatttgcgagctgattgatatcatgaataacagttgggatattttccttaagagtccaaacctcgccctgaaacgcaacttgctcaaactgattttccgcacgctggagctcaaagaaggcaagctgggttatacactggcctttccctttaataagctgtccagcttcgacgataccagcaactggtggtca

SEQ ID NO: 1055 - DNA, 1629 bp, unidentified
  source 1..1629: mol_type = unassigned DNA; note = Bacteriophage uvig_239031 from the Index of /pub/databases/metagenomics/genome_sets/gut_phage_database (ebi.ac.uk)
atggagttgttctactgctatgcctatgggcgcctgtccaaggaggatggagataaaattgagagcgactccattaagaatcagagagacttgatacattcttacattggccagcacccagaacttaaacttgtgatggaaggatacgacgacggctacacggggactaattttgaaagaccctattttaaagaaatgcttgaggccgtcaaggagcagaaggtcaattgtgtgatcgtcaaagatctcagccgctttggtcgagaatatattgaagccggccggtacatcgagaagttgttccccgcactgggggtgaggttcatcgccataaacgatgggtacgacacagcatacctggatgcgtccagctccctcatactgccgtttaagaacctcattaatgactcttattgcagggacacatccataaaggtcaggtcccacttcgatgtgaaacgaagaaacggcgagttcattgggagttttgctgcctacgggtattcaaaagatcctaaggataagaacagactggtagttgaccctgaagccgccgacgtcgtcagggaaatctttgcaagaagaattagtggaatgtcttgtcaggccatcgctgacgagcttaatactctgggcgtgcccagcccaatggaatacaagcggagcagggggatgaaatataagtcaggatatcgggtgcacaataagaccagatggagtgctacggccgtgaggagaatcctgcagaacgaggtgtaccttggagtgatggagcagggcaaacgcaccacgccaaactataaagttaaaactgtggtgtacaggccgcctgaggagtggatgagagtagaagacactcacgaagcgatcatttctcgagaagactttgacctggccgctaggctcatgcgcactgacactcggacagcgccaggtaagaaagccgtacaccccttcgccggactgctctgttgcggggactgtaaaggcggcatggttcgaaagaccacctactatgatggaaaaacttatcactactacggctgcataacacacaggtcagatacagccgcctgcagcccccatacaatctctgaggcgaagctcgagcaggctgtgctggagggtgttaaccttcatatccgaaccgtcattgagctgaatggtgcactggaagctatcgcccggcgacctctccagaaagttgctgccgagaagttggacaagcggcttgaggcactgcgccaagaattggtgacaaagcaagatatccgcgattcactttatcgccggtatgcaagcggcgaggtctcaagggctgattttcatgaattcaagcggatcttcacccgagattgtgaggaggtagaacgcgcaattgaagctcaacagcaagagctggacagaatgctcgagagttgcacccccgattccccttggatccagcattttaaacagtttggacaactggaaaccttgaatagagaggtgctcgtgcgactggtggagcggattctggtctacgaaggtggcagaatcgaaattgtgttccgctaccaggagcagttcgctaacgctatgatcttcgcctctgaggaaaccgcgcggcagccacttagggaggcagtt

SEQ ID NO: 1056 - DNA, 1305 bp, unidentified
  source 1..1305: mol_type = unassigned DNA; note = Bacteriophage uvig_160559 from the Index of /pub/databases/metagenomics/genome_sets/gut_phage_database (ebi.ac.uk)
atgataagcgactgccgaaagggcaagatcgaccgaatctacacaaagagtattagtcgcttcgcaaggaatacaaaggattgtctcaaaaacattcgggagctgaaatccctcgggatcacagtcttcttcgagaaagagaatatcgatacggccaaactgaccgacgagatgatgattaccataatgggcggcttggctcaagaagaatctactagcataagccagaaccttcgctggagctgtcggaagcggatggcgaatggcacctatgaactctcatgtcccccgtacggatataagaaggttaatggtaaactggtgatctgccccgaacaggccaaggtcgtgaaagagatctacgactcttacctgagcggaatcgggatgatctcaattatgaaaaacctgaacgagaggaatatcccatgctgcaaaaacagtgagaggtggcatatgatcggagtctcttatatcctgacaaatgagaagtacaccgggaacactctgctccagaagacctacagcacaaacacgcttcccgtccgcagattcaaaaataatggcaacgcggaccagtactatgtgcgcaacacacatcccgcaatcattcagcaggagacttttgataaggtccagagactcatctccgaaaagaaccagaaacaacctagaggcactcctcataactctgtgcttcacaaacacatcttctgtgggtcctgtgggagcattttgatcaggaagtcctgtcgaaagaaatattattggtcatgcaggaagcacgacctggcagctgttgattgccctacaaaacagatttcagaggataaaattcactcagcattcatccggctgtacaacaagcttgtgtataattttaaaccagtattgactccattgcaacaagctctccaggacctgaagtacaagaacacgaaaagtggaactaccataattgaaaaatacaaggagattgccaagttgaaggagcaaacccacgtgctcgctagattgaaaaccaaaggttttttggacgaagccaagtacctggagcagacaactgagttgaactctaagattgccaaacttcagaccaagatcaagaagctcaatgtgtccgatgaagaggacgagacccttgaacagttggatatgctcattggatattttgaaaaaagacagaagctgatggttgagtttgaggaactggccttcgaatccattgtggataagatagtggtaaaaaatcagaatgagctggagtttcatctgataggcggtctggaactggccgaagaaatc

SEQ ID NO: 1057 - DNA, 1869 bp, unidentified
  source 1..1869: mol_type = unassigned DNA; note = Bacteriophage uvig_135439 from the Index of /pub/databases/metagenomics/genome_sets/gut_phage_database (ebi.ac.uk)
atgaaagaaaccgaaaagctggggaatgcacagagccaaaaggagaaaattagagagcggtataaaggaattgacaccgatcagctggatgtgatacctgcactgccacaggattccttctacgaggacaaaagagaaaagagagttgcagtctatgcgcgcgtgtctaccgacgatcccaggcaaacaagcagctatgagttgcagaagaatcactaccaggatgtggtcacacgccacccaggctggcgcctgatagagatctacgctgatgaaggaatctctgggacgtcactgcaacaccgggatgctttcatccgaatgatcaatgactgtcattcaggaaagatagacctcatcgtgacaaagagtgtcagccgctttgcacgaaacgtgcttgattgtattgggtacgtcaggcagctcgccgcccttaatccccctatcgggattttcttcgaaactgagaacatctacactcttaacagcaattctgaaatgtcactgtccttcatctccacattggcccaggaggagagtcacaccaagagtgaaatcatgaacgcatctattgagatgaggttccggcgggctatcttcttgactccccctctgctgggctttgacctcgatgaagacggtaacctggtaattaatgaggaagaagctaaaacagttcggctgattttttttatgtacttgtacggatatacctgccaggagatcgcagaaacccttacatcactcggcaggaaaactaagctcaacaacactgtttggtcagccgggtccgttctgcaacagcttcaaaatgagagacactgcggcgatgtgctggctaggaaaacgtggactcctagctatctcgaccataaaagtaagaagaataagcaggaccggaatcagtatagacagaagaaccatcatgaggcaatcatatctagagatgatttcatcgcagtccagaggctcatttccaacgcaaagtatggtaaccgcggattcctgccggacttgcacgtgtttaccagcggtgccctgaggggctttgtctccgtgaatccgcgctgggctgggtttaaggccgccgactataaacgagctagcgagtctgtatatactccggcgatcgtgttgcctacaaaacagacatatgaggtgaattcaggtgactttgatctccgaggttttgaggttgctagggcgcagtttttctcttccgccaaccgggtttacgtgacgttcagcaataatggcattcgcttcagtacggagtgtgtgcgaaagctcgactcacactttgtggaaatgatgatacacccagggaatggaataattgcctttaaacccgccgccaaagacaacagaaactctatggaatggagccgccagattaatggagctaaagtgcccaagccagtgtccggagcagctttccttcccaatttgtacaatctttttggctgggactcctcctgcaagtacagaatcatgggctttaagaagcataacaatgataacacccttgtactgttcagcttggccgatgccgagattctgatccctaactccaccatcgaaggggatgacgaggagccaatttcacttttcgaggaggacgtaaaaccactgggtactaagaccaccacatttggctaccccgaggaatgggtgtacagtttcggcaataacttctaccgccaggctcaggccaacgagctggcggccttcaacgaaagtgactggtctgtcgaggaagaaaaaaccagctataaccctgacccacccctgcaagtcacagcccaggaagagatcgaggaaaacattaagagtatgatcgatggcatgcggcaagaagccaataacgag

SEQ ID NO: 1058 - DNA, 1680 bp, unidentified
  source 1..1680: mol_type = unassigned DNA; note = Bacteriophage ivig_116 from the Index of /pub/databases/metagenomics/genome_sets/gut_phage_database (ebi.ac.uk)
atggcaagacgctctcgcgctattgtcgaaactgcccgccctaagtacagggtttggcgcatagccatctacatccgcctgtccaaagaggatatgaggtgcctggatgaatctgagagcgtaaccaatcaaaggcagatcattgaagatcacattgcgggctttaacgatggcgatgagtatatcatagtcgacgagtacgtggacgacggaataagcgggactactgacgatgagcgcgaagactttcaaaggatgctgtccgatatcaagagagggcgagtcaactgcgtgattgtgaaagatttggcccggtcttttagaaattactccgaccagggatactatctggacgactggttccctaggtacaacgtccgattcatttcactgtaccaccagccgcttgactcatacaaggagccccaaaatatgcgcagtattgcagttcccatccagggagttctgaacgagaaccactgtgccgagacatctgacaaagttagagaggtatttgacatgaaacggcgaaacggcgaacatatcgggtcctttgccgcatacggctacgtgaaggatccaaacgacaaaaatgctctcgtgattgacgaagaggccgccgccgtggtgagagacatctacaacatgttcctggatgggatgagcaaaaacgccatcgtcagatatctcaatgagcatggcatcctttcccccgctgcatacaaacgggaacgactgggacttaagtatcagaatccttctgtcgacccggcaaaaccccctctttggtgcgccatgagcgttactactattctcaaaaaccggatgtactgtggtgatatggttcagggacgataccggatgaagagttataaggtgcatgtacaagaagttgtcccagaggatgagtggtatatagtggaaaatacacatgaagctatcatcgatagagagaccttcgagaaggtacagcgactgctgatccgagacacccgcactggaccacagcagaaaaagctctacctttttagcggctttctgaagtgtgctgactgcggcaaagcgatgacccgatcaaaggtgggcaatgtggtgtactattattgtaggacctacaaggaccagtcaaaaaccgcctgcacgaaacacaccatcaagcacgatcggttggaagcagcagtactctacgccattcagcagcaagtgtatctcgcagtggactatacaaagacgatagagcggattaatagagctccacttgtgaaaagtcagagtaagaagctgatggatgccattgaacaaaaggaacgcgaactgagcaagataacacggtataagcaagcgatctatcaggactggaaggatggggagatctctcattccgattatcggcacatgaaagaagattacgagaggcaggcggaggccttggaagaggtgattggtaaacttagagctgagcaggctgagttggagaacgggattgatacagagaaccccttcttggccgctttcaggcagtatcagaatatcgacaagctgaccagagacatactcatcgagcttgtcgaccatatcaagatccacgaaggtggttatattagcatcgtcttcaggttcgctgatgagctccggaggattcaggaattcattgaagtgaatacacacaacgaggccgtg

SEQ ID NO: 1059 - DNA, 1719 bp, unidentified
  source 1..1719: mol_type = unassigned DNA; note = Bacteriophage uvig_354027 from the Index of /pub/databases/metagenomics/genome_sets/gut_phage_database (ebi.ac.uk)
atgcccacaatgaatacaaaaactttttgcgtcatctacgcccgacaaagtttcggcctcgaacaggattcaaccagcatttccgtacagcaagaggcttgccgcaagtgggctgttgcacatggaatgcagatcgtgggcgaatactctgacgcaaactgttccagcgagttgtacccgctgtgcgacgaagggattgaagccagccggatcgatcgaggctttcaacgatggctgaaagagcaaaggactcagggaagaaaacagtacaaacaggggctgggtgaggcctttagaaggattgcgcagggcggtgtcactcatctgttggtttacaccaggaataggctcggaagaaccgctgacgggagctacctcgagaagttccttactaattatcttctggagcacaaggtttctctggtcaccgtgcaggacggtaccgtgatggacttcagtgacgattttatgagcttggtaatgagtattaaggacacactgtcatatcgagaactgcgcgaaaaagctaaggctagcctggcctctatcgacaagcgcatcaatagttttacaaagtggagtaatgccaatggcgtcataatgaaagatgggcaggtgacattctatcctgagtatgctgaagtcatcaggtacatctacaacgcactggtggagggcgcgacctacggaactatacttcacaaactgaacaccgattataggcatcttgtacggggcaaacagtggtatatcactaacgtaagatccatactgagaaaccctgtctactgtggctatatgcgcaatagagagggtgttctgggcaaggccgtcaacatcccagagcctgtggtgagttacagcatttggcaaagggctcaggaggtgatggagtacaaacgggtgaacggacagaagtataatgggaaaaaccatcactttttgcccctctccgggtacttgatgtgtccctgtgggcggagaatgaccctgttcgtggaccgcgggaaaatcgcatatcactgtcttaacgggggtgagcacaaaacagcgatctatgttaacgaggatgcactgctcaccattcagaacgtgctgatgatcggccttactacttctcataagcgcttgcagagcttgaagaccgcctccaatatggttgatgacctcagggccgaaattctgcgcctgaaggcctctcaggcagccaagatgcgactggtggagacggaagaagatgttgctgtgtataagccagtcatagactcaatcaaggcgaccatcagaggaaagcaggaagagctcacaagactggagggcgaactttctgccgactcctccgaagcacaaagacgccttgaggacgatttccattctattatggagggagaattgctcccagaggacacgtatatgcggcttatgcaagattgcatttcaacgatcacagtgcacgccgaccacatagatattgtgaccaagaccggcgtgacaattcccgtccctcggctggagggacggcatcactcaaagcgacttatgcggtgctccctcatctgcgatactgctgacggtacactcgaagggctggtacattaccagctccacttgtatgataaagaagtggcaattgtcggaggcgagagcatctaccaggacgatacgatgtccgtgtcagtgcactggccagagcagtaccttatgaggcggataccggcc

SEQ ID NO: 1060 - DNA, 1677 bp, unidentified
  source 1..1677: mol_type = unassigned DNA; note = Bacteriophage uvig_305800 from the Index of /pub/databases/metagenomics/genome_sets/gut_phage_database (ebi.ac.uk)
atggcttctaataagaaatatgcagtgttgtacggtcgactctcccaggaagatacgcagaagacaaacaagaccgacgattcaaattcaatccaaaatcagaagctcctgcttgaaaagtatgccgccgagaaggggttcacaaacaccctgttcctgtacgacgatggctattccggcacgaatttcaaccgccccgggtggcagcaggttatggagttgatggaaaatggtcaggtggagactcttattgtcaaagatatgagtcggctgggcagggagtacttgcaggtaggacaatataccgagctgatttttccatcctacggcgtgcggtttatcgccgtgaacgatggagtcgattcattgtatgaatccacaaacgacttcactccattccggaatctcatgaacgaattctatgccaaagactgtagtaagaaaggccggagcgtggtgaggcttaaggcggaaacgggggcccgagtgagcagtcgacccagatacggctatatgaaagacccagccgatccgaaacggcatatggttcctgatcctgaaacagcaccagtggtgcgctatatctttgatctgtgcgtgtccggcaagggacctgcacagattgctaagcagctcaaaaaagacaagatccctacccctggatatagttactatcagaagcacggagtagagctcaccggggtggacattactcagccatacaattggtcaactaataccgtagccggcatattggaggacgagacttacctcgggcacactataaacctgaaatcaacaacgttgtcctttaagaataagaaacggattgagagacccgaatctgagcagctgaggttcgagaacacacacgaagctctgattacacagcagacctgggagatagtgcaggatatccgaaaacacaaaaggcgccgagccaacatggccgagcagaacatcttcagcgggctggtttactgtctggattgcggcggtactatggtcctccatcgcgctcataccatggacgcagtcaagaacaattttatgtgctctacatacaagaagaagggcaaagacgtctgttctggtcactacatcagggaacaggaactgagcgcgattctgcttgatgacattcgcagggtaacccactttgctagacaaaatgagcttagattcgcagagcatatcaggaagaagcaggggaaggaagcgcagcaggagatagctatgttgcaaaaaaagattgatacaatgcaaaaaaggcaggtggagctgactaaactgtttaagagactgtacgaggacagcgtgttgggacggatccccgaggagcagtacaggattctgtctcaagagtacaccgctgagcagaaggaaatccaagaacagctgcccgccatggaagcaagattgcaggacctgaaggactctagcagtaacatcgcccgattcattgaaaacgccaaaagatacagcgaaatccccgaattgacagctgagatcctcagaacctttatcaaacgcgttgaggttggagaacgggcggagaaatattctagaaccgcaccgcaagaggtgcgcatctattaccgcgatattggtcttgtcgacgagctccctcaatccatggccgacagcgttgcagaggccatacagaatgaagtcgct

SEQ ID NO: 1061 - DNA, 1827 bp, unidentified
  source 1..1827: mol_type = unassigned DNA; note = Bacteriophage uvig_45 from the Index of /pub/databases/metagenomics/genome_sets/gut_phage_database (ebi.ac.uk)
atgatcagggccgtgatctattgccgctgctccaccgaggaagagagccagaaaaatgctctggagaagcaagttgcggaagccgaatcaagtgtcagacagtacggctgggtgctcgtggaccgctatgtggagagcagatccggcactacagccaaagggcgaaatgaatataagcggcttttcaacgatcttttgaccgataagttcgacgtaatagtgataaagagtcaggatcggctgatgaggaacacaaaggactggtacctgtttgtagatcgcctgtgtacagagcagaaaaagttgtatatgtacatcgagaacaagttctactccacggacgacgctctgattaccggtattaaagctatccttgccgaagagtacagccgggaactgagcaagaagattaataatgcgcatcgaaaccggcaaagagatggcggtaacgtcatgctccccggaaatgcctacggattcaaacgcatgccagacaaaagtgttgcactggtggaaaaggaagccgagatcaaaagggagatgtataggctttgcgcagcagggtatggtactagaaccatcagcacgatcatgcgcaatagaggaattgtcaatagggatgggaagccttttacatctagttacatactgagaatgttgagaaaccctattaataagggcacggctgtgatgggcaagtatcattttgacttcgattcaaagcgcacaatcaagaacccgaaggagaagatctacattcacgaagataaagtcccccgcaccgtgtctgacgagttgtggaacgccgccaacgagcagatcgataaacggtcagtgaaaaccaaagacggtgaggatgatatcggtaaaaaccctgggaagtaccagctctctggcaaaatagtgtgcggaatgtgtggacaaccctattggaggaaagttcataggaaacacagcaaccacgagctgatctacacttgggcatgttcctcctatcttgagctggggcggtctgataacctgcgagcaagacccaatctccgcaaggtgtttctggagaacgaaaaaggctgcgacaacattaatatcgcagagaacgagttctacgctgtccttgaggagatttgctccaaccagtaccagaagaataagaagaagattattgaaaagataatgaagctgctttcaaagagtctgaataatcaggatgggactaaggagatcgaaaaactcgagagggagcaggaagatattgaacgcaaaatgaaattcctcgtggataaactgattgatggggtacttacagaccagatgtacaagactaaacaggaggagttggagaaaaagcgggaccagaacaaaaagaagattcttgagttgaccgaacgcacctcaaatacacagaatatcaaagaccggctccaagagattgagacccgactgaacgacgacgacttgtttaaaaaagccaccattgacgacatgctcgaggaggtggacaagatagtggtttacccaagatacatggaaatctatttttctctgtccagcgttactgggtgcatggatctgaagatcttcgacggcgacaaaaagtgttttagagttgattatggtaaccgactcgattacaagggacgccaatgtgacgctcgagaagtcgtcgtggacctgatcagggaaaatccaaggatcactggcaagatgatagctaaagaaatcggatgcagcctttctggcgcgaattataagcttaaggtactcaaaaaagaaggacggatccggttcaacggagccggcggcaaggggtgttgggaaattctggaa

SEQ ID NO: 1062 - DNA, 1614 bp, unidentified
  source 1..1614: mol_type = unassigned DNA; note = Bacteriophage uvig_151078 from the Index of /pub/databases/metagenomics/genome_sets/gut_phage_database (ebi.ac.uk)
atgttggcctccaacgtgaaagtaatacagcccagaaagctgttcaacattgaggagagcgcacgccagttgctgagagttgccgggtatgcaagagtgtctaccgggcgaccagagcagaaaacatctttcgagagtcagcaaaagcattacaaggaacttgttgccaagcattcagattggatagatgtaggtctctatgccgatgagggcattacagccacctctatgcggaagcggaaacagtttctcaaaatgattcaggacgcgaaggaaggaaaaatcgatcgaattatcgtgaagagtgtgagcaggtttgccagaaacaccgtggactgtctcgcaaccgtcgaggaacttaccgcccttggggttgacgtctttttcgagctgcaaaatctttcatcactgcaggactctaagactactaggatgcagctgacaatgtatgcaagcatggcccaggaagaaagtgaaaccctttccgaatccgtggcatacggaattcgggaaggcataaagaatgggagatacagagctcccaaagcttatggctataggttggatgaaaataagaggctggtgatcgaccctgaacaagccgaggtgatcatgtttatctacaatactttcttgcaaggatacactgtcggccaaatctgcgcgatgctgaatgctcgagagatccctgcacctcgcgggggtgtctggtatgacagcaccgtcgatggaatcctgaagaacgaaaagtatattggagatcttcggctcgaaaaaactgtgtccacagatttgaagacgagaaggcgggtgccgaatatcaacggccagcagttttacgtaaccaacaaccatgagggaatcctcgctgaaaggatgttcaaacgcgtgcaagcggaaatagagtaccgccaaaacctccgcggttacagcggtagcggcaaaagtgcctatacaacaaagtacccattttccaacaagctgttctgcggccgatgtgggtcaaagtaccggaggcacagctacgaccttaaacgaaaagatgagaacggcaatcctaaaattgagaaggtgtacacgtgggtctgcatcaatcacaagctcaacaagaagaccgcttgtccacagactcaggttaaggaaagtagcctcgagaaagccttcatcgccgctcttaatactatcattgaggatcaggacggctttgtgaagacagtgattgctaatatttcagaggttcttaacacaaggctgtccgaggctgcactggagggcaaccgagggcgctatgaagccaaacagaaagagctgcagaatgtgctggcgaattctctcaaaagccccactgctgaaaacgcaagactgtatgagagactggttcaggagttggagtccctgaaactgaaaatagagacggaagaaggagagcgctctaaaacccttatgagtaagacacgggccgtcgagctcgagcagttcatcaattcatctaagctgttccacgaatttgacgagatggtgtttcggaagctggtcgagcgcgttattgtcaacgaagactccgtaacgttcaagtttaccgacttccttgagagggaggtgcccttgatcgaa

SEQ ID NO: 1063 - DNA, 1902 bp, unidentified
  source 1..1902: mol_type = unassigned DNA; note = Bacteriophage uvig_369437 from the Index of /pub/databases/metagenomics/genome_sets/gut_phage_database (ebi.ac.uk)
atgaatcaaaacgaggccaaactgtccaaggaagagcaaaaagcgaaaattcgggagcggtatagaggacatgttagcagcgatactgtggtgatccccggcaagccccaggctgatatctacgatgacagcgaaatgaaaagagtggccgtgtacgcgcgggtgtcaacagacaacgtccagcaaacgtcctcatatgagctccagaagaactactacgaggatcaggtgcagagacacccaaattgggtcttggttgggatctaccctgacgagggcataagcgggacttcactgaaacatagagaccactttaaccagatgattgcagattgccgcgctggcaaaatagacctcatcattaccaaaagtgtgtctaggtttgcccgaaacatcgttgattgcatttcacttgtccgggagttggcatctttgaatcctccagtaggggtatttttcgagtccgagaacattttcacactgaaggataataccgagatgtccctgtccttcgtggcaactatggcccaggaggaaagtcacataaaaagtactataatgaacgcctctatcgagatgcggtttggcagggagatctatctcactcccgtcctgctggggtatgatcacgatgaggatggcaatctcgtcatcaacgaagaagaagcaaatacagtccgacttattttctttatgtatctgtacggatacacctgccaggaaattgcagacactttgatgcagctggggcgcaagacgaagaaaggaaacgttgcatggtccgcaagtacagtgctgcagcagttgaggaatgagcggcattgtggagctttgctggcccgaaagaccttcacaccccactacctcgatcataagagtaaaaaaaacatgggcgagcgaacacagtattacaagaagcatcaccacgaaggtatcatctcttacgacgattttatcgccgtgcagcaccttattgataacgctaggtacggaaataagggtatactgcccgagttgcaagtcattccagaaggcgccctgaagggatttgttctgatcaacccgagatgggcaggtttccaggctgcagactatgaggtggctagcgaaagtgtgtacgaagacgaagtgtttgtgcctcaaagcctgcgagatgtcgaagctcagtccggcgacttcgacctgagagggtacgaaattgccagagtgcaattcttcgacacacagaaccgcatttcagtgagcctcagcaatgattacttgctgtttagcaccgcctgtatccggaaatttgacaacgcccagtacgtggagatgctcatccacccgcatgagcacctcctcgcggtacgcaaatgcgagaaggatgcaagaaatgctatcaagtgggcgaagcttgacgacaatggtaactatggcccccggcatatcagcggggccgcttttatctccacgattttcgagctgttcgattggaggctggattgtaagtatagagttaggggcgtccggcgccaaaaggataatgaagccgtacttgttttcgacatgagggagaccgaaatgttcgttccaaatgccgctcctgacccggacgacgggtctgctgctccagccgaggacggtctcaggcctctggtgccatctaagaactctatagtggccttcccctccgcgtgggctgacaattttggctcaaacttctatcgccacgcgcaagcccgcgagttggccgccattgaccagaatggagagtggcagatcggggaggaagcacagccttattctacccagcctgaacttaacgtcaccactccagaagaggctgcctttcacattgaaaggattatccgcgacatgcatcgaggcggagaaatgaatggaaccatacagcccgtagag

SEQ ID NO: 1064 - DNA, 1107 bp, unidentified
  source 1..1107: mol_type = unassigned DNA; note = Bacteriophage uvig_319734 from the Index of /pub/databases/metagenomics/genome_sets/gut_phage_database (ebi.ac.uk)
atggatgggaagatcgacatgatcatcactaagagcatccctaggtttgctaggaacacgttggataccctgcgctatgtccgactgcttagagagaagaatgtcgccatctattttgaagtggagaaaatcaacactctggtcgatggagaatttctgatgacgattttgtcaagtgtggcccagcaggaagttgagaacaccagcgcttacgtgaaaaaaggactcaaaatgaaaatgaaacgcggcgaactggtgggcttctccagatgtttcggatatgatagggataaagagactggtgaactcaaaatcgttgaatctgaggcagagacagtgcgacacatttttgataggtatcttcagggcgcaggcgggactgtaattgctagagagcttaatgaggaagggattctcacatacaaccattgccagtggacttgctcaattatcttgaatatcatcaagaacgagaagtacatgggcgacatgctgcagggcaaaacctataccgttgacccaataagcaaaagacggttgcctaacaacggggaagaggataagttctatgtcgaggggcaccatgaaccaatcgtatctcgcaaagtcttcgataaggcccaagagcttcggatatctcgaaatgtgaaacgggcaaagacctctacagaatcaaatagggtacgaattagaaggcaatacgccttttcttgcatgttgcagtgctacttctgtggcagtaatctgagcaagcgcacctggcactccagtagcaagtactccaaggtgatctggcagtgtgtgaaaagtgcgaagaaaggaaagcggttctgcccggagtcaaaagcgattcccgaagccgtgatcgagaaggcttttgtggagagctacaagatcctctgtgagaacaatcaagacatactggaggacctcttggacaaaattgaggttatattgaaggacgagaagattgagaaggaagtgaagcagattgaaggacgcattaagagaacaaaaacaaagcggaacaagctggccgacggttatctcgacggtataatcccccaggaacggctgcgcaattacttcctgcaatccctgtccttc

SEQ ID NO: 1065 - DNA, 1527 bp, unidentified
  source 1..1527: mol_type = unassigned DNA; note = Bacteriophage uvig_183862 from the Index of /pub/databases/metagenomics/genome_sets/gut_phage_database (ebi.ac.uk)
atgccaaaggtgacggtgatacccccttcaattaaccgggccacgcgccaggacataagcgccccaacccgcagaaaagtcgctgcttatgccagagtgagcaccgatttcgaagagcagctgacctcatacgaggcgcagatctcttactatactaactacattcaaaggaatccggattgggagttcgtgaagatctacaccgacgagggtatcagcgctacttcaaccaagcaccgggagggtttcaattccatgattgccgatgctcttgatggcaaaatcgacctgataattaccaagagtgtgagcaggtttgcgcgaaatacagtcgattctctcactaccatcaggaagctgaaggagcatcacgttgagtgtttcttcgagaaagaaaacatatggactttcgatagcaaaggcgaactgctgattaccattatgtcttctctggcacaggaggagtctcgcagcatctcagagaacgtcacctggggacagcgcaaacgatttgcagatggcaaagtgtctctgccgtatgctcattttcttggatatcgcaagggggaaaacgggttgccagaaatcgtgccagaggaggcggagacagtgcgatatatctatcagaggtttatcgatggtctcaccccttataagattgcgaatgaactcacggcacagggggttcctacaccctgcggcaaggaaaaatggagtgctagcaccgtcaagagtatcctcacaaatgaaaaatataagggggatgccctgcttcagaagaagttcactgtggattttctgacaaagaaacagcagattaacgagggacaagtgcctcaatactacgtagagaatagccatcccgcaatcataacacctgaagaattcgacttcgttcagagcgaatttcaaaagcggtgtatgaaaccctattcctccacttcaatctacgctactaagatcatttgtggcgattgcggttcttacttcggagctaaggtgtggcattccaattcaaagtacagaagagttatctaccagtgcaatagtaagtttaagggctctcacttctgtactacaccacacctctacgaacccgagatccaagaaaagtttttgcaggccttcgcccagtacttttcccaaaaagacgtcgtaattaagaattgccagttcgcacttaactgcttgaaaaaacaggagtccaaaaaaaaggaactgcaagacgagctggtggccgtaaacgaaaagttgaaagagtacattcagcacggcggggaggacttcgacgccctgaacgccaagtatgaggaactctccgcccagctggacgcagaggaggccgcagagagtgacaggaaaagacggatagccaagatgcagaaaatcctccagacccttaaaaagacagactccgtacttgaaacgtttgatgaatccgtttggaacgctgtcttggagaacctcacagtgttccacgacggaagtctcgtctttctgtttcgggacgggacagaaattaaagtg

SEQ ID NO: 1066 - DNA, 1371 bp, unidentified
  source 1..1371: mol_type = unassigned DNA; note = Bacteriophage uvig_250794 from the Index of /pub/databases/metagenomics/genome_sets/gut_phage_database (ebi.ac.uk)
atggcgaagaaggtgacagtgattcctgcaaaacaggtaagagctaactccaccaaggcgattagtgccgttagaaagactcgggttgcagcttactgtagggtgtcaactgatgccgaggagcaactgaactctttcgataatcaggtggaatattatacacgctacatcaacgagaatccagcttacgaaatggtcgggatctatgctgatgaagggataagtggtaccaacacaaagaagcgaaaagagttccaaagaatgatagccgactgcgaggcacggaagatcgacttggtgattgtgaagagtattagccgcttcgcaaggaatacacaagactgcttgacttactcccggaaactcaagaacctcggcatagggattttttttgagaaggagcacatcaatacgcttgatgctacaggtgaacttctgttcaccatcctgtcttcactggcccaggatgaaagcagaaacatttccgaaaattgtaagtggggaatcaggtctaagtttcaagagggtaaaccccacataaacacctataagtttatggggtttgacaagaacgaggagggaagactcgtaatcaatgaggaagaggccaaagtggtcaggcgaatctttcaggagtttctcgaaggctacaatccggccgatattgcacgacggttgaatgaggacggagtccccggagtttcaggaaaacctaagtggatcactccaaccatcctcggcatgctgcagcaggagaaatatatgggggacagcattctgcagaagtgggtcacaaccgatttccttatgcattcactgagacgaaacaccggccaggtggcccagtactacgtggagaattcccatccagcgatcatagacaaagatatttggaatgccgtgcaggaagagctggaacgccgggaaatctattgccagaactatcacttgagcatgtacgcctaccgcgctgacaaaaatcccctcaatgggaaaatagtttgtggacattgtggccacaccttcgcccggaagtcctggacaaacaggggcatcgcatactggacttgcaagagtgatacctgcaagggcaacatcaaagaggaggttatccacaaagccttcatcaccgcttggaaccacactgtcaaaaataaggaccgcttcatggaacgctggcaacaggccctggacggtgaagatagcctggctagactgagggcaaagcagatgattgacttgactaacgaaggcaccatcaacacgctggtccctgagctgatgcttatggtacttgggaaaattacagtccatgaccttgagcattttactgtgtctttcctcgatggcacggaaaaagaaattctcgtg

SEQ ID NO: 1067 - DNA, 1581 bp, unidentified
  source 1..1581: mol_type = unassigned DNA; note = Bacteriophage uvig_195543 from the Index of /pub/databases/metagenomics/genome_sets/gut_phage_database (ebi.ac.uk)
atgtccagggtcacagtgatcccagccaaactggacagggctacgtttatgccacttgacaaacctatcaaaagacgagtggccggatatgcacgggtttcaaccgattccgaggaacaacagacgtcctatgaggcacaggtgagctactacacagaatacatacagaagagggacgactgggaattcgctggtgtgtacaccgatcagggcatcagcgctacaaacacaaaacacagagacggcttcaataggatgatagcggatgccctcgacggcaagatagaccttattgtgaccaaaagtgtttccaggttcgcacggaatactgtcgattcactcactacagtacgcaagttgaaagagaagggcgtggaagtgtactttgaaaaggagaacatctacacattggatagcaaaggcgaactctttatcaccataatgtctagcctggcgcaggaagagagccggtctatcagtgagaacgttacttgggggcagagaaaaagaatggccgacgggaaagtaacaatgccttacggccggtttttgggctatcgcaagggcgaagatggtctgcccgagatcgtccccgaagaggccgaagtggtcaagctgatctacaaatcttttatggagggactgagctattacaagattgctaagatgctcatggagcgagagattccagcacccgccggtggtgagaaatggcaccggcgcactgtggagtccattctcactaatgagaaatataaggggtccgcccttctccaaaagaaattcaccatggactttctgaccaagaagcaaaaagtgaacgagggggaagtcccccagtatttcgtggaacatagccacgacgccattattgatcctgaggagtttgaattggtacaggctgagatcgagcgcaggaaagggctgggcaaggagtattccggatcttccatattctcagccaaacttgtgtgcagttgctgcggcgggttctttgggagcaaagtgtggcatagtacctctaagtacagaaggatcatttggcagtgtaatcacaagttctcaaagagtagcggcaataagaagtgtaaaactccgcatctctacgaagacgagattaaaaagcgctttatcgaggtctgtaatagaatagcctccgataaggaggacttcctgatctcttgccaacagattgtcgagattctgtcaaacaccgcagcactggatcggaagatcgaagctcagtatatctacctgaacggcctggcggtgagtatgcaggaattcattaaggaaaatgctatgcagcctcaaggagaagatttttatgatactaagcttgccgaatatgagaagcagcgggcagagggagagacccgactgaagggacttcaatcacagaaagctacaaagctctctcgaaaagagttgcttgatgggttggttaacgtattggaggaaaatggaatcctgattgacaagttcgacgaacgcttgtggagactcatggtggagaaagtcgttgtgggaattgagggtgaactgacgttcaccctgcgcaacgggatggaaatcgaggtt

SEQ ID NO: 1068 - DNA, 1605 bp, unidentified
  source 1..1605: mol_type = unassigned DNA; note = Bacteriophage uvig_557325 from the Index of /pub/databases/metagenomics/genome_sets/gut_phage_database (ebi.ac.uk)
atggaagttcagaggataccaaaacggactgtcagcgtcatcgaacctcaaacttcaatcctggtggacaaggagaagtatcaccagaagagggtggcggcttactgtcgcgtcagcaccgattccgaagaacagctgacctcttaccagaatcagatgagggtatatactgagatgattgctgcaaataaggagtgggagttcgccggtttgtacgcagacgagggaatctccggcacccgggccgacaagagacctgagttccaaagaatgatacgggactgtcagaacgggaaaatagactacattattacaaagagtgtctcacgatttgcgagaaacactgtggagtgcctggagtatgtgcggtcccttaaagctcaaggaattggtatattcttcgaggagcaaaatattgatacgctgaagaacgaaagcgaactgtatctggtgatctatgccgggtttgctcagtcagagtccgagagcattagtaagcacattacttggacctaccgaaaaaagttcgaggaagggaaggtaagcttccagtacaagaatttcttgggctatcgaaaaggcgccgataatcagcccgaaattgtcccagaggaggcggccatcgtcgaacggatctacgaaatgtttttggccggacagccggttaaaatgatcgcccagacattgcaagctgagaagatcgagatccctggcaagaatctcagcttttccaagaacatgatcatgaacattctgaggaacgagaagtactgcggtgattgcatactccagaaaacggtgacagttgactgtataagcaaaacccgcaaggccaaccagggggaggctcccatgtacatcgttgagaataaccatcccgctattatctctcgcgaagtgtttaatcgcgtgcaggaagaacttattagacggcaggcacttagagcaaagagtgataaaacatctattacagcaaccgggaagtacagtaagtatgctctgaccgaggtgctccaatgtgccgaatgcggctctagatataggagggtgacttggactgcccacggtcggaaaaaaatcgtgtggcgctgcatctccaggctggattacggaacaaaacactgcaaagactccattaccgttgaggaggctgcactccatggggctgtagtaagagctctcagaaggtttcgcgccgaggatgagagtacatacctcacactgatgaaagccaccataggagaagcaattggaattaatggcggctctgaagagattgacctgctgacccggcgcatcgacacccttaataagcgaatgttggatctggtgaacgagactgtggccgccggaaaagacgttgagtcttcagaagacgaattcaaaggcataagcgatcagattgaacaactcaacagaagaattgcagcaatccaagaaagcatccacaaggacggctcccggcaggcgcgcctcgaagagatccagtcaatcatcgccgagcgaaacgccaatgaaacgcagtatgatgattctatcgtgaggcagatgatcgagtgtataaaggtgcataacgacgggaaacttacaatcatctttagggtc

SEQ ID NO: 1069 - DNA, 1650 bp, unidentified
  source 1..1650: mol_type = unassigned DNA; note = Bacteriophage uvig_13945 from the Index of /pub/databases/metagenomics/genome_sets/gut_phage_database (ebi.ac.uk)
atgacccagagtagaccagaacccaaggtgattgtgatacccgccaaagaggaaagccctcaggatcaggaaaaaaagaaaaatctccgggtggcggcctactgccgcgtgtcaaccaagaaagacgagcagcttaatagctacgagaaccagaaagcttactacacagagaagattatggccaaccccgactggactatggccgatatctttgccgacgagggaatcactggcactagcgcatgcaaaagaaaagacttcctccgcatgatcagacagtgccgccagggcaaaatcgacatgatccttgcaaaaagtgtaagtaggttcgctcgcaataccgtagacacattgaactacacccgggagctgcggggcatggggatcccagtgatcttcgaagagcagaacatcaactcaatctacccggaatccgagtttctgataactatccacggtgcatttgcgcagtctgaaagtgaggggatcagctcacgagtgaagtgggggaaacaccaggcaatgagaactggtaaggctaacattcaatataagacactgctcgggtatgaaaaaaaccctgacggggaaatggtagtgaatgctgagcaggccgagaccgtgaggaggatctttgagatgtacctgtctgggcagacactgaggagcattaaggaggcgcttgagagtgggggctttaagaactccgctggcaccatggagtggacgacctctaaccttagaacaattctctccgacgagaagtactgcggcgatgtcctgttgcagaagactttcatccaggattgtatcagcaagaaggtgattaagaatacgggacagctgcctatgtatctgattcagaatcatcatgaagctatcatacccagagaccgctttgatgccgtgcaggtggagttggctagacggaaaacattgacctcatctacaaaacgatccgcaccaacaggcatgagcaggtacagcggaaagtacgccctgagtggcctgttgttctgtggcgagtgtgggacggcctataggcgcgtggtttggacccagcatggtgaaaaacgcgcagtctggagatgctcttctcggctggattatggcaagaagtattgcaaggagtccccaacccttgacgaatcccctctgcaacaagcagttctcgcagccatcaatgctagcatgtcaggatgtaaagtcctcgccgatcaactggtggatgccatggagcaggaattggccccgatacccggagagtctatgtcccttggagatatcgaccgcgccgttgctgaactcggcaagcaatttgataccctcctcgccgaagcagccaacggagacgccgacgaatatgctgagcgattccgcaccatttccaccacgatggaggagctgaagcggcggaaggcggcgattctcggaataaggcaggagcaagaacaaatttcaaggagaatacacgctgcagcctccgccatgaccgcagctactgtgggcatcactgaatgggacgattgtgtcgtttatcaactgctcgagaaggtcacagtcctgacaggtaatcggattaaagttactttcaggaatggtgtcgaaattgaacagacagtagatcagcctaaacgacgaaagttcatt

SEQ ID NO: 1070 - DNA, 1569 bp, unidentified
  source 1..1569: mol_type = unassigned DNA; note = Bacteriophage uvig_114897 from the Index of /pub/databases/metagenomics/genome_sets/gut_phage_database (ebi.ac.uk)
atgaatgaaaatgtgactctgatacccgctcgcaaacggcccgggaatcggatttctaaggctgtcgaaaagccaaaacttaaagtggcagcctactgtcgggtgtccacagattcagatgaacaagccggaagctatgaagtgcaggtccagcactacaccgactatataggacgaaataaggagtgggagttcgcgggcatctacgccgatgatggaatttctggcaccaacaccaagaaaagagaggggtttaacggcatgatcgaggattgcatggccgggaaaatcgatatggtgatcactaagagtatttcccgattcgcccggaacacaatcgattgccttaagtatgtaagacagcttaaggaaaagaacatagccatcattttcgagaaggaaaacatcaacaccctggaagcgagcggcgaactccttctgacgatcatggcatccctggcgcagcaggaatctgccagcttgtctcagaatgtgaaactgggccttcagtttcggtaccaggacgggaaagtccagatcaaccacaatcacttcctgggatacactaaggatgaaaatggaaacctgatcatcgaagaggaagaggctaaagtggtgcggcgcattttcagggaatacctcgaaggtgcatccttccgagacatcgccaagggcttggagagggataaaattaagacaggtgggaagagatataagtggcatctgagcactattcagggaattttgcaaaatgagaagtatatgggtgatgctctgttgcaaaagacgatcacaacagacttcatcgagaagactaggattaaaaacgacggcagcgtgcctcaatactatgttaaagattctcaagaagccatcatcccgcgcgacatctttactcaagtgcaggaggagatggtccgcagagccaacctgttttcaggtgttgagaataagaaaaagagggtttatagttcaaagtacgcactcagctccatctgtacctgctctaagtgtggcgacatctaccgacgcattgcctggaacaatagagggaagcattcaattgtttggcggtgttgtacacgcgtggaaaatggccctagtgcttgcgacgcaccaactgttcaggaaacagagctccagcaggccaccgtacaggcaatcaaccagctggtcaagagttcatccaccaccctcgatgtgctcatgaaaaacattgaaatagctctggcagacgataatgctggagagctcgagaaaattaacgccttgctctccgagaagcagaaacaactggttaagctcgcacatgcgaaaaaagactacagtagcttggctgatgagatagacctgcttagagataaaaaacaggagttgctggtggctaaggccgaaaatgagggcttcaagaagaggataaaagagctggaggagtttttgaaagaggctgaccaggagttgacggagtatgacgaaagcatggtcaggagatatattgacaagatagtagtctacgaggacaagtttaccgtatgctttaaagccggggtggacctggacattgagagg

SEQ ID NO: 1071 - DNA, 1626 bp, unidentified
  source 1..1626: mol_type = unassigned DNA; note = Bacteriophage uvig_505551 from the Index of /pub/databases/metagenomics/genome_sets/gut_phage_database (ebi.ac.uk)
atggctaagccggtgagagtaattcccgcaaagccgaaggccgagctggaacgcgaacttaagaaaggacggctgcgcgtggctgcctactgccgcgtgtcaacagacgacgaggagcaactgacctcataccaaaaccagatagaatactatacagagaagataaacgcgaaccctgattgggagatggtaggtgtgtacgccgatgaaggaatcagtgggacgagcactaagcatagggatgagttcaacaagctgatggccctttgtcgaaggggcagagtcgatcttatcttgactaagagtgtgtctagattcgcacggaacacagtggactgtttgaagtatgtgaggctgctcaaagagaagggcataggcatcctgtttgaaaaagagaacatcaatacacttgagctgtcaggagaactgatgttgactttttacggggactttgcccaggcagagtctgagagcatcagcactaacgtggctattggccagcggatggccatgaaggccggcaaagtggtgttccagtacaagtggctctacggatataagcggggtgagaacaatatgcctgaaattgttcccgaagaagcagtcatcgtgcgccggatctatgataatatgttgtctgggtatagcgcgaaacgcattgctgactcactgaataacgaccatgtaccacccccgaatttctctgagaagtggtcctccatcattatccagcgaatactgaagaacgagatctatgctggagatagcctccggcagaagacttatgttgcagactgcatctccaaaactgtcaaaaagaacacgggtgaactgccacagtactacatcatggacaatcactccgcaattgtgcctcgcgatatctacaatagggttcaagaggagtttgctagacgaaacagcaggatttcacctagtaccaaaagtcctaccgtcaataaggggcggttctcctctaagtacgccctcaccgaactcctgaggtgtggcgcctgcggagcagcctatcgaagagtgacctggcccgccaaagaaaaagggggcgagaagagaattgtgtggaggtgcatctctaggctcgagcacggcaaaaaaatttgtaaaacagctccaaccattcccgaacctgcactccatgccgcccttatggaagcgatccagctcctgaagctcgacacatttgaggctgagactgatgttagagaaattctccccgaggtcattcaatatccctacggcgagacagtccaggacatcgagatactgatagaacgcagacaggacgaactcattcaatacctggcccagaatccaaccgcaaatgagccagagtccaccgggcacgccgattttaccatgctgttgaattccattgaggtgctccggaatagaagagaagctttgctgaggcgggctcaggccgatgagaccgttgagcagcgaatgacaggtatcatcgagcgcctccacaacgaaaaaccagatattactggatatgacgacatccttgtgaggaaactggtcgagtgcataacggttgtcagcgacaaaatcaaggtcgtattcaaaaacgggaccgaaatttgggcgcgctgggattgtgaa

SEQ ID NO: 1072 - DNA, 1719 bp, unidentified
  source 1..1719: mol_type = unassigned DNA; note = Bacteriophage uvig_331196 from the Index of /pub/databases/metagenomics/genome_sets/gut_phage_database (ebi.ac.uk)
atggcgcgcaaaaagagacagtacctccagcccgagcaggcccaggagccagtgtcagccatgttgcctagcgtgtgggagacagccatctatgcacggctgtctgtcgagaattccaagaagaacgatgacggcgactccattgaagggcagatcgagatctgcagggattacgtgagtgagcacccttacctgcatttggccgacacatacgttgacaacgggtggaccggcactaataccgataggccggaattccagcgcctgttgtctgacattagagaggggaaaatcaaagcactggtaatcaaggacttttctcgattttccagagactacatcgaggctggcaatctccttgagaatattttccccgctatgggtgttcgcttcatcagcgtggtagatagatacgatagctttgaaacagacggatcagcctcctcactcctgataccccttaagaatctcattaacagtttctactcaagggaccaatctaagaaagtctctttggcagtccacgctaagcagctggcgggggaacatatcccttctatgataccatacggatatagaaagagtacaactcaggaatataggtttgagcctgaccccgagacggcccccatagtgcgccgaatctacgcacagttcctttccggaattggtgcccggcccatcatgcggcaactgaatgaagaaggtattccttcaccaggccgcctccgatatcttcgcggccagacaaaacgagcatgctatagtgattgcctttggacccaacaggtgatcaaacaaattctgatgaacccgacgtatatgggggacctcgtgtttggacgaatgccgactgctctgtaccttggacaacctgattaccactatgaaccagacgagagcaagtggcggatcctgcccgacatgcatgaggccttggtctccaggggcgatttttaccaggtgcgcgagatcctggaagctgggaggcgggaaaacgaggcaaagctggaagcgagcagaaactaccgcgaaaaacaccctcaaatcttcaaaagtggaattgtccggtgtggccattgtggatcaaatttgggctatagcagacacggagagaagaaagaaggccggtataactgcagaaacaagcagtacggccggtgtgacgttgctgtgggaatatccgaaaagaagctcgccccaatagtctggaacgccattcaaatccagttcgccctttttgccgatttcgaagaagttgctgggcgactgaaagattccgggatacagaccaaaaggcagaccgagctgcagcaagagatgcttgaagtaagcgagcagctgtccggctatcaaaacaagagggagcagctgtataatgattatgttgacggcatattgagcgccggggactacatcgaactgaaaacacgctttgatactgcttatcaggagcagagtagcagactcaatcagctctctgtggagctcgtgagactgaacaggatgctttctaacgagaataagtggctggtcaatattcggaatatcagaaaggcccgaaaactgaccccagaaattgcgcaggcaatgattgatcatattaacgtgtacaagactggttacgctcagcacaggctggaaatcattttcaggttccaggaagagcgagatgcacttgagaccgcttatcacgagcttgagggcggtgaggcccgg

SEQ ID NO: 1073 - DNA, 1638 bp, unidentified
  source 1..1638: mol_type = unassigned DNA; note = Bacteriophage uvig_80069 from the Index of /pub/databases/metagenomics/genome_sets/gut_phage_database (ebi.ac.uk)
atgtccagggcttctcctaaggtcattactatcccagcaaatcccaacctggtgaaagacaaggagatcaaacgccagctgcaggtggccgcatattgtagggtgagcactgacgaggacgagcagctgacgtcttacgaggcccagaagacgcattacacagataagataatgaccaatccagactggacaatggcgggaatctttgctgatgaggggatcacagggaccagcgctgagaagcgccccgaattccttaagatgattcgaaagtgcagacagaaaaagattgatgtggtactggtcaaaagtatcagccggtttgcgaggaataccgttgattgtttgaagtacattcgcgctctgaaggagcttggaattgctgtcatattcgagaaggagaacatcaacaccctggaggcggactccgagatgctcatcaccatgatgggcgcattcgcgcaagctgaaagcgaaagtatttccgccaatgtgaggtggggaaaaagacaggccatgcgagagggccgggccatcatccagtataagtacctctacgcatacgagaaaggggacgatggtttgccaagaattatacctgaacaagctgaaatctaccgctggatctgcaactcctttctgtctggacagtctctgcgcatgatccgggatacattggaaagagagggtcacccggccccaaacggcggaagcaattggagtattgccactatacgaaatatgctgaaatctgaaaaatattgtggagatgtactgatgcagaagtcatatattcaggactgtattagcggtaaagttgtgaggaacaccgggcagctccctatgtatctgatacaagatcatcacgatgccatcattagccgggagaccttcaacgcagttcaggccgagttttcaagacgcaacgccggccgggcccccagtaagaagcttgcacctacaggcagatcttgttattcagcaaagtatgccctcactgaaagactcgtgtgcggggattgtggcaccctgtaccgcagatgcgtgtggtccaaaaaaggagtgaagcgggctgtgtggcgctgctcttcccggatcgactatgggactaagtattgcaaaagtagccccacaatatacgagaaaccgcttcagcgagccattttggcagccatcaattctgtgatgagtcagaaggttgtcttgattgaccagatcgcggatgccatgaggatggaactgctgcctctgcccggggaagccctgtcaatgactgagattgaaaaaaggctctctgaactcgagcaggagtttcaagctgtcttccaacttagccggaccgaggacggcggctacatgaagtacgcctccacgttcaagaggatcaatgacgagctggcagagttgaaggagaaaaagaagtacttgttgaaacaacagcaagacgactcagcaagcaacaagcggatcaaagatgctatggatatacttaacgctggttcagctgaagttacagaatgggacgaatccctcatcaggcagctggtcgacatggtcaaagtgatctccgaagaccgaattatcgtacgactcaaaggcggtctggaaattaagaaagcccttgacggcgaaagagat

SEQ ID NO: 1074 - DNA, 1572 bp, unidentified
  source 1..1572: mol_type = unassigned DNA; note = Bacteriophage uvig_9192 from the Index of /pub/databases/metagenomics/genome_sets/gut_phage_database (ebi.ac.uk)
atgccaaaagttactaagattcctcctcggctgaaccctgcaacctttgcccccttggagtctgtcgaaaagagaaaggtggctggatacgcaagggtgtctactgacagtgaggaacaaaagacctcctatactgcacaggtcgattactacactaagttcatcaaggagcgaatcgattgggaatttgtgggggtgtataccgacgaagggatatcagctaccaacacacggcacagggagggttttaacagaatgatcgctgatgccctgaacggcaaaattgacctggtcgtgacaaaaagtgtgagccggttcgcccgcaacaccgtcgactcattgaccactatcaggaagttgaaggaaaagggcgtcgaggtgttcttccagaaagagaatatctataccctcgattctaaaggcgaacttttgttgaccatcatgtcatccctcagccaagaagaatcccggtcaatctctgagaacgttacatggggacagagaaagaggatggctgatggcaaggtctctcttccgtattctcatttcctgggctatcggaaagggaaagacggaatacccgaaattgtgcctgaggaggcggagattgtacgctatatctacagatcctttatggagggcaaaacgcccaatcacattgccgaatgtttgacattcaaacacgtcccaacaccagccggaaaagaaatctggagcccctctacaatcgaatccattttgacaaacgagaagtaccgcgggtccgccctcttgcaaaagagcttcaccgtggacttcctttccaagaagaagaaaatcaatgaaggagagctgatgcagtactacatccctgagagccacgaagccattatcccacccgacgagtttgagctggtacaggcagaatatacgcggagaaaaagaatcgggcgagcctataacagcaagagtatattcagtgctaaacttgtttgcgaatgctgtgggggctacttcggatccaagatctggcatagcacttcaaagtataggaggactgtttggcagtgcaatgggaagttcaagaacggtaaaaaatgtatgaccccgcatctctacgagagccacatcaaggagaaatttctcacggccatgaatcaggtgctggcaaataagactgagatcatagagaattgtctgctgtttaaagagacgttcagcaataccgcgatgattgaggagaagattgaaaacatccagaaacagatggagcaactgactaagcagattcgcatgctgattcagaagcagtctattacaccaattaagagtgaggattattaccgccagtacgacggcctcgtaatatcatttggtaaactgaagtttaagcaggataccttgatccaaaaacaagacgaaatggagaataagctcaagtttatcatggattacatagagttcctgaaatcccaggaaaaccttataattgagttcagtgaaacactgtggtttcgagctgtggaccaggttacagtgtgcaccgatggtaaaatgatttttgcgttcaaagacggcagcaagattaaagtg

SEQ ID NO: 1075 - DNA, 1617 bp, unidentified
  source 1..1617: mol_type = unassigned DNA; note = Bacteriophage uvig_507971 from the Index of /pub/databases/metagenomics/genome_sets/gut_phage_database (ebi.ac.uk)
atggaaacaattatcaacaatcagcccaaggtcgtgcgcgtggtgcgcaaggtcagcagtacgcagatcaccgcccagactatcagggagcagctgactgacacccggctgccggtggccgcgtacgccagagtctcaacaacaaatgaggagcaggaagattccctcgagcgacaaagggcacactacactgagtacataggaaacagaccagaatggagatttgtaggagtttatgacgatccaggcgtcactggtacccgggtggaccagagaaaaggcttccaacgattgctcaatgattgcagagcaggaaaaattaagaaaatcctttgcaagagtatttcaaggttcgcgcggaacactgtcgacgccctgaaatatatcagggagctcaaggagctggggataggcatctacttcgaaactcagaacatcgatactatgaccgccggcggggacatcctcattaccattttggccgccatagctgagcaggagtctcggaatatgagcgaaaacattaagtgggcttttcagaagaagttcaaggaaggggagctgatgctggtctgcagccagttcctgggttatgaccgcgataaagataaaaatatcgtaatcaacgaggagcaggctaagatagttcgccggatctatcgcgaattcctgagtgggtattcttgcgcaactatcgctaaaaatttgaccgaagatggcatccaaaccgtgacaggcaagaagcagtggagagcgtctggcattcggaatattttgactaatgaaaagtactttggcggggcctaccttgggaagacatgtaaaaaggacgtgctgagcaaagagcgggtggcatctgatgaggtttactatgtcgaaaactctcatcctgctattatccccaaagacacctgggatctggtgcagcttgagcttgagcggaggaaagactatcggagttgcacagaaacaggtaatgggagatattccagcaagtatcccttttccaaaaagttgatatgtggggagtgtggcatggtgtttaggcgccatgcccagtataagaagggcgaatacgtgcgaacgtgggtgtgtattacccacaagatcaagggaaatgagtactgctcacagcattacatccttgaggatgacattgagagatgttttcagcgagtgattaacgaatttgtgggtgacatgagccaaatcaaagagattctcaaagagaacgttacatcaaccctttccgaaaaagacgataacagaggagagcagatattgctgaggatgcaagccctccaggctgaaatgatcaacattaacaggaaaaagagggccggagagatcgcatacgagctgtacatcgctaaggcccaagaaattgcagacgaggtagaaaaactggaacgagaacaaaaggagattcagtccaccgaaaatgaccgcctggcagaaacgaaacgcctgaaggatatactcgaggtcatcaatgagatgcaccctacggacgagttcgatggtgaaatgtaccgccggctgatcgacaacgttattgttaaaggaaatcagctcacattcaacttcaaggtgggcatagtaaaaacagctaccatc

SEQ ID NO: 1076 - DNA, 1620 bp, unidentified
  source 1..1620: mol_type = unassigned DNA; note = Bacteriophage uvig_80003 from the Index of /pub/databases/metagenomics/genome_sets/gut_phage_database (ebi.ac.uk)
atggagaacagcgcctccgttaaaccaaagattcggctgatcccagccaagcagcgccaagagttggtagggagggctactcccaatggggaactcgcaaaacttcgcatagccccctacgctcgcgtatccactgatcatgaggagcaggaatcttcctacgaggcccaggttaagcattttaagcaattgatcgaatcacacactgattgggaactggtggatatctacgctgatccgggactgtcaggaaaaaacataaaacggcccaatttccagagactgatgaacgactgtgagtgtggtaaagtggatatgatcataactaaaagtgtgtcaaggttcgcccggaacactctggactgcgtgaagaccgtaaggaaactcaaagaaatgggtattaaggtgtactttgagaaagaaaatttggacacaatgcaagagtctagcgaatttgtccttaccataatggccagcctggcggaggaggagagccgatccatctcaaataacattagatggagtgtcaagaaacggtttgaaaatggagaagtcatccttaacaccgcacatttccttgggtataccaaagacgagaatggcaccctgaaaattgttcctgagcaggctattaccgtccgcagaatctacggcgaatttctggacggctattcccttaaagagatcgccgatggtttgatgcgggatggtatcctcagcccttccggcaagagtagatggcaccccacaacgatcaaaagtatcctgcaaaatgagaaatatatgggtgacagccaccttcagaagacgtaccttcctgattttctctctccacggcgcattaaaaacgaaggacaggctgactcttactacgtcgaggacagtcacgcagccatcatcagcaaagaaatgtttgacctggtccagcaggagttcaagggccgaaatgagctgagaagctctaatcgaacaggccacggaaagtattcagggaagtacgcattttcaggcatgattgtgtgcggggaatgcggcgagacttatcggaggcatcagcaatataacgcttataagaagtactacatttgggtgtgcaagcgacatgaaaacaaggggaaggattattgttccgcgaaacctatttctgagagtgccttggaaagagcattcatcagggccctgaatggactgattgagaacagggagaaaattctggacaagctccaaaaggcggtggtcggccagatatccgactcttgtgaagatgacatcgctcagatcgataaggagattcagggcctccagaatggaattgttgacctgttgatggataaaaacaagggacgcctgaccgacaaacagtacgagagagagacgcagcttcttaagttccagatcgacgagctcaacctcaagaaagaggaaatactgaacgagcagggcaagattcaactggcagaatatagggccgaagtggttacagatctcctcaagacagagaaaatccttgacgagttcgacaagacaatcttcaagagcctggtgcacaagataaaggtgattggggataaagaaatcgaaatcgaattcgaatgcgggattaaggtgaccgagaagttg

SEQ ID NO: 1077 - DNA, 1395 bp, unidentified
  source 1..1395: mol_type = unassigned DNA; note = Bacteriophage uvig_176185 from the Index of /pub/databases/metagenomics/genome_sets/gut_phage_database (ebi.ac.uk)
atgaagagagccaaagcgtatatgcgaatgagcaccgacaaacaggagcactcaatagaatcccaatggaggcttatcaaagagtttgcggaccgaaacggctatacaattgtgggaaagtacgaggatgagggtatatccgggcgggccgcggaaaagcggcctgctttcatgcagatgatagatgattcagactctggagatttcgacacagtactgatctacgacagcagtagatttgcaagaaatctgaaagacgccattgtctataagtccatcttgaaacaaaacggggtcgacctgatctctattactgaacctatccttgatgatgacaatgccctcattactgacgcactcctgggggccatgaacgagatgtatagtcggaaactctccaagaacgttcggcggggccaagagcagaagattctgcgaggcgaggtgttcaccaagcctccctttggatacatcaggcctgctcccggcgctacgttcgagattgtgcccgatgaagccaagatcgtagaatacatctttgaccagtacagggacggtaagaccgctttccggctcgctgtggaactgagcggagccggggtcatgacccgccggggtaacccatttgattctaggcaggtggaatacatcctcaccaatgtcatctacaagggctacatgagagtcaagagtaacggcacagagtattgcatcaaagctgaccatccagccattattcccgaggacgtgtttgacaggacacaggagctctatgctgatcgcaaatccaagcttggcaaaaaacagatgccacgcgagatgcataggcattggctgtctggtaaaatcagatgcggggtgtgtggcggagcatattcctataatcgatcttacggaggacgcaaagataatttcaggtgcactaatagaatgaaggggaaatgcatgcagtcaccctgtatcagagttccaatcttggaaaaccttttcctgcaagcactccacgacacaattaagaatcctgaactgttcgatgcctttctgatcccaagcgaatgtcctgttacccgcgattacgatgccgacatacgacgcctgactcttagcctgaagcgcgccaaagatgcatatctttcagggatcgattccctggaggagtacaagactaacaagaaacactttgaaagcgagattgcaaagacgaaggaggagaaagagaagtcttcattgccacccaaacccgacttcgaccggctcagggaaagacttcttagtgcttatcacttgttgaccagcgatgccgacctggaggcgaagcaggcatgcatggaaaatctggtgagcaagataataattaacggcccggataagagtattacaccgtgtttctactac

SEQ ID NO: 1078 - DNA, 1602 bp, unidentified
  source 1..1602: mol_type = unassigned DNA; note = Bacteriophage uvig_280693 from the Index of /pub/databases/metagenomics/genome_sets/gut_phage_database (ebi.ac.uk)
atggcaaccgccgtgcgcacaataccagctactctcaataagtttaatagtaagcctgtttccgctatacagaagagacgagtggcagggtacgccagggttagtaccgacttcgccgaacaagccacctcctatgaggctcagatgcagtattacaaagcctatattcagtccaaaccggactggatctttgtagatatgtacagcgacgaagggatctcagccactactactaagcatcgggatggcttcaagcgcatgattgatgatgctatgaacggcaaaattgaccttatcataacaaaaagtgtatcacgattcgcgagaaacacggtcgattctctgtctaacgtcagaatgctcaaggaaaagggagtggaggtgtactttgagaaggaaaatatttggacactggatgctaaaggcgaacttctcattaccatcatgtcctcacttgctcaggaagagtcacgcagcatcagtgagaacaccacttggggtgcccgaaagcggttcgcggacggaaaggctagcgtggcttacacacacttcttgggctatgacaaggactttaaaattaatgagaaggaagcggaggttgtacgctatatctacaaacgcttcatcagcgggattagctgttatgccattggcaatgagcttgagtctaaagggatcctctctccatacgggctgccaaagtggtggaccagcacaatcatctccatcctgaagaacgaaaagtacaaaggcgacgccctgcttcaaaagagctatagcgtggattttttgcaaaaggtccggaaggctaataacggagaagtgcctcagtactatgtcgagaaccatcatgaagcaataattagcccagaaatttttgagctggcccaattggaattgaaaagacgatccaggaagaaaaggtactgtgtgaaaactgtgttcaccggtaagatactgtgcggcatttgtgggaatgaatacggatctcgggtgcaccattcaaatgatgagtgtcggagggaggtctttacatgcggtaagccctgggttaggggagtgcacaagtgccccacaaaaaatttgactgtcaaaatggcaaagcagctcttcaccgacgcactcaacaagctggtggatgtcaagaaagaggtaatcgataatctgaggcttctccttaacgagacgtttgacacgaccaagttgaaggaagagcacgagaaactggaatctgaactcaacgccctggcattcaagtacaacacacttatgaatgagaacgctaggcacatcattcctgaccagcataattttatctctaatcaggagaaccttgccgagcagtataactccaagcaggcgcggtatctcgagctggaaaagcagatagccgataaagaggaaagaggtctggtgctgaaaaatttcatcaaagaattgtccggcgcagagcctggcattgagttcagagaagacctgtggtgcgccctgctggatcacatcgttgtgctggataaactgaaagcaaaggtcgtttttaaagacggaaccgaggagctcctggacatccccaacgaccgcaaacccagagtgaaaagtgag

SEQ ID NO: 1079 - DNA, 1731 bp, unidentified
  source 1..1731: mol_type = unassigned DNA; note = Bacteriophage uvig_81612 from the Index of /pub/databases/metagenomics/genome_sets/gut_phage_database (ebi.ac.uk)
atgagggtagccgtatacgccagagtgagcacggaacatgaagcgcagatcaatgcactcgagaaccaacttgaatggtataagatagagtgctcccgacactccgactgggagattgttgaggtctatgtggaccagggcattaccggcacccaggctcagaaacgcccggaattccttcggatgatggaggacgctcagaaagggaaattcgatcttattatcacaagggaggtatcccggtttgcccgcaatacggtcgatactctgagctacacgcgagagctcaaagctaggggagtggatgttttttttatcaacgatggtatcaacacagctacaaacgatggcgagctccgcctgactatcatgtcatctatggcccaggacgaaagcagaaagattagcgaacgcgtgaaagcagggcaaaaaatctctcgagagaaacatgtgctgtatggatcagggaatattcttgggtatcggagagaaaacggcacttatgtgcccgatcccgatcaggctgagacagttaggcttattttccaaatgtatagcactggtgagaacggccttgtcaagatcgtgaatgagctgtatcgcctcggtcgacttgacgctggcgggcacgtgtcatgggacgcttccaaagtctctagagtgctgcacaatgctacatacaaagggtgcatatgttacaataagagtcatagcgacggatatttgacacagaagagagttaagaacctggatgaaagttcctacatctacgtcaagggcgatttcgagcctttggtgagcgaggagatgtgggataggtgtcaacagatcctggcatccaagagtgcacgggtgatcgacgaaaacggaaagaagcataagtacatgaggaacaccccaaagagtgtgtggaccgcaaaacttcgctgctcttgtggtgccgggttcatccagttcaagtggcgcgtcaacagggacggcgcagtcgtgcacgggtttcagtgttacagacgaacccggagaccaagcatatcatacctgcaggaacacggcctggacctgggtataagttgtcagattagggccatttgcgagtggaaacttgatttgatggccgcgaaggttttcgagcacttgactttcgataagggcaagaccgtcaaggaggtctacaagattctcaaccgatgcatggcggaggagaagaccgttaggatttccaggaaggccatgttggagaattctatcgctagacaaagagaaaggctcgacaagtacatagacctttgtgccgacgggattattacaaagcaggaactggctgagcgacgcaagggactggatgcccagatcgccgaactgcagtcacagtatgaaaatgtggagcaagaggatgagcgatccggaaccctggacatgaatttgatagcgcaaaaactggatgaatggcagaaagcaagtagaaacgatgtagaccgggaactgatcaatagctgcgtggcacagatcacccctctcactaatgaagagtaccggtgggtgctggactttcagctcactgaagtacagtcacggaactccgccacttgcacactcgacggctttatggagatggccagatttcggatctcttttgaagaggcaaaagctttcaaagcctctcgcaaccaaggcatccggaaaaatgaatggcatgacctgaccgttgccgtgggaattcgaaccaaagcc

SEQ ID NO: 1080 - DNA, 1449 bp, unidentified
  source 1..1449: mol_type = unassigned DNA; note = Bacteriophage uvig_296980 from the Index of /pub/databases/metagenomics/genome_sets/gut_phage_database (ebi.ac.uk)
atgaccaatctcgatatcggagctgcctatattagggtgagcacagacgagcagactgagttgtcccctgacgcccagctcagggtaatactggagcaggcgaaaaaagacggggtgaccattcccccagaattcattttcatcgagaagaaggggatctctgggcgccgggccgagaatagacctgagtttcagcgaatgatcgccatcgctaagaaccagaatgagtcaccgtttaaaagactgtacttgtggaaattctctcggtttgctaggaatcaggaggagagcactttctacaaaggtatccttcggaagaagtgccacgtggagatcattagcgtctctgagcctatcatggagggaatgtttggtcgcctcatcgagactatcattgaatggttcgatgagtactatagcattaacttgtccggagaggtcctgagaggtatgaaagaaaaggcccttaggaacggctaccagctgagaccttgtctggggtatgctgcagtgggcgatggcaagccataccagatcaacgaatccgaatacgcggtagtcgagcagatatttcatttctatcactcaggcctcgacatgacgggaaccgctcgcaagctgaacgcccttggctacaggacaaagagtggcaatttgttcgataggagagccgtctaccgcattttgaccaaccgcttttacataggcgaggtgagctggaacggcatcgccttccaaggagagcaccccataagggagtccgtttcaagtatctttgactccgtgcaggaaagattgcaggcggagtatagaccgcggggccgccgagagtcctcagctaatgcgcattggttgtccgggctgctgcggtgtcacatatgtaaggccacactgggctttaataggactaataactcaaagcgacgccctgatttcttccaatgctggaaatatgggaagggaattcaccccgagtcttgcagtatcgcagcccggcgggcagaagctgcagttctcgaatccctgaaacaagtgattagcagcggacaagttgactatgagtacattcgaccccaggaaccaggtgtcaaaaccgaagagacattgatacaggaatctctcgaccggctgcgaatgaaagaacagagggtgcgagaagcatacgaaagtgggattgacacgctcgctgaatacagatctaacaagcttagattgcaggccgagcggcgagaactgaccgaatctatggaacgcctgaaaaaacaagcagagagtcccctgcaaaggccagaccagaaggaagtggtaaaccgcatcaagaacgtttacgatcttctcattgatgagaacactgactatagcacaaaggcaaatgccctgagatcagtggtgaagtacattgaatatgaccgcaaaaatgatcggatggatgtccattattatatcagc

SEQ ID NO: 1081 - DNA, 1128 bp, unidentified
  source 1..1128: mol_type = unassigned DNA; note = Bacteriophage uvig_517692 from the Index of /pub/databases/metagenomics/genome_sets/gut_phage_database (ebi.ac.uk)
atgattgcggattgcgaggagggcaaaatagacaaggttatcacaaagagtatctcacgatttgcccgcaacacccaggactgtctgtactacagcagaaagcttaaggagctgaggatccccataatctttgaaaaggaagggattaacacaatggatgcttctggggagttgctgttcaccattctgtcatccttggcccaagaggagagccggaatatctccgaaaattgcaagtgggccatacggcacaacttccaaaaaggaaagcccaccatcaatactaaaatgttcatgggctacgacaaggacgagaacgggaaactgatcatcaacaaggagcaggccaaaattgtgaagagaatctacaaactttttgaggaggggtacaattgcagtcagatcagcaacatcctcaagcgggaaggagtgaagggtactaaagcagatacatggccaagtgcggctattaaggccatgctccagaacgaaaaatactgtggagatactctgatgcagaagacatataccgtggacttcctcacgaagaaaaaggtaaagaatcacggtgaggtcgaccaatattttatggaagattcccacgaggctatcatccctaaagatgaatggcaggctgttcagatggagttcgagagacgggacgcatataaagaggaggtcggcctgcatgcctttggcaatgattcatctcctttttctgggcgcttgatttgttctcattgtggcaaaccgtatcgaaggtgcggttggtccagaaacggcaagaaattttggatgtgcgcttcaaagaaagcaaaggaggctagcgcctgtcaggccgacaatattttcgaagaaagtattttcgaggcgttccgcgtggcctggaatggcgtaatcgccaacaaggacaagctgacagaaaaatgggacgaacagatcgaatccggaaccccacttgaaaggctgcgagcaaaacaaatgaaaatgatgattgaggacggtcccatacagacggtgattccagagcatgtgattctcgtcctcgaaaggataatagcatatgataaaacccactttgaggttaggttcctcgatggaactatgaagcgcatcgctattagcgaa

SEQ ID NO: 1082 - DNA, 1419 bp, unidentified
  source 1..1419: mol_type = unassigned DNA; note = Bacteriophage uvig_170697 from the Index of /pub/databases/metagenomics/genome_sets/gut_phage_database (ebi.ac.uk)
atgaaaaccgctgctgcctatatcagggtttctacagacgagcaaactgaacattcccctgatagccagttgaaagagattaggaactacgccgatcgccacggactgatacttgatccaagccacatctacatcgacgcaggcgtgagtgggcgcaaagccaagaaacggccccagtttctgaaaatgattgccacggctaagggtgaacctagcccgttttcagtcgtcttggtatggaagttcagccgctttgcacgcaaccaggaggagtcaattgtgtacaagtccctccttaaccgggagtgtggggtcgaagtggtgtcaatcaccgaagagacccaggacaaaatgtttggctccttggtggagagaatgatcgagtggatggacgaattctactccatcaggctcggagaggaggtccgaactaagatgacatatgtggccgaaacagggaaaattcaaacagcccccagcttcggcttctctaagaactcagagggagagtatgtgctgaatccagatgaagccgagtgggttctgtttatggccgagagcctgcttcagaagaagagtctgaggtggattgctaaagagttgaattcccacggggtacgcacacaccgcggtaacaagttcgaacctaggaccgtcagatacatccttaaaaatctgacaaacactggagcttcccattggactcccaacagagaggatcatgaaaatgagtaccatccatactctgactccactatcgtagttgacggagtttgtgaccacatctacacgcgagaatattatgacaaaatcatagctgagcttgataccagggcagaaaaccggaagaagtatgataaacccgacaccgtcaaaaagcattggttgagcggcttcctgaaatgtagcaattgcgggtctacaatggtttatagtctcgccaataagggctttcaatgctacaagtacggcaagagtctctgcgatgtatctcacttcatcagcgcatccaagattgaagagtcagtgatccaggccataaagaatgtgaccgtgaatgataagttcatcaaaagtgtgacgaagcccccaaaaaaagccgatcacaagaaggatattagacggctcgagggtatgcttcagagggcaaagattgcgtatatggaagaaattgacacccttgaagagtacgctgctaacaaggaaagaatcgagaaagagattctgaagttcaaaaaggaggacgaaaaagcgaccgcgtacagaccggctgaagacgtgcgaagacagtttgccgagatcgtggacctgctgtctagtgattcagaagacgcaattaaacgagccgcactcggcgagattgtcgagtccatagtgttttctcggcctaacactgcgataaagatctatttccggctg

SEQ ID NO: 1083 - DNA, 1311 bp, unidentified
  source 1..1311: mol_type = unassigned DNA; note = Bacteriophage uvig_55768 from the Index of /pub/databases/metagenomics/genome_sets/gut_phage_database (ebi.ac.uk)
atgaagaagacaatccgggtgatcgagcctaccatcccactgcttaaaaaaaagaaacgcgtcgctgcctacgcgagggtgagttccggcaaggatgcaatgcttatgagccttagcgcgcaggtgtcctattacagcgagttgatacagcgcaattctgaatgggaatacgcaggtgtttatgccgacgaggcgatgactgggacgaaggaagaccggacaaatttccagaaacttctgaaagcatgtaggaatggagagatcgatatcatcctgacaaaaagtattagcaggtttgctcggaataccgtcaccctgctggaggctgttagagaactcaagaagtatggggtcgatgtgtacttcgagagggaaaatattcactctctgagcggcgacggcgagttgatgctgaccattctggcctcttttgcacaggaggagtctctttccgcctcagaaaatcagaaatggagaatcaagaaaaactttgaagagggcaaaccatggacgtacggcatgttgggataccgatacaatggcgaattctatgaggttataccggaggaagccgaggtggtccgaaagatcttcgcttattacttggaaggtttggggtataacgccatctgtaagcggctcgacgctgaggggattgtgactagaaacaataataagtggagccagaattctgtctcaaagattctgaaaaactacacttacactgggaacctcctcctccaaaaaacattccgggagaaccatattactaagaagacaagggtgaaccggggagaactgcccaagtatcacgccgaggacacacacgaggcaattatcgacatcgacaccttcatggccgtgcaaaatgaaatggccttgcgcctcaaaggctttgaacacaaaagtcaggtacagcgcacctatcccttcacgcataagatggtgtgcgactgttgcgatgcttactatagacgcaaaataaccaagacaagagttgtgtggatttgtgccacctttaaccagaagggtaaggctctctgccagcattcaaagcaactccctgaggagactctgatagcactttgcaacgatgtactgggactggtagagttcaacgagcagatttttatcaacaaggtctcccagatccgcattctggacaacaatagggtgcaatttctgttgtccaacggaaagaccgaagagagaacatggaaagatagaagtcgaagcgaatcctggactgatgagatgaaagaaaccgcccggcaaaggaccttgcagcgatacgcttcaaaagaagttgag

SEQ ID NO: 1084 - DNA, 1635 bp, unidentified
  source 1..1635: mol_type = unassigned DNA; note = Bacteriophage uvig_178167 from the Index of /pub/databases/metagenomics/genome_sets/gut_phage_database (ebi.ac.uk)
atgaagaaactctataaggtgggcatctattgccggttgtccgtcgacgacgcttctaactcagccaaggtgaagaactatattccagcggacgagtccgtcagtattgagaaccagtatgagctccttagtaagttcgtcatgctcaacgggtggaccgaagtcaaaagttatcgcgatgatgggtactcaggtggcaattttcaaaggcctggctttctggaaatgcttgaagacgctagacatggactcattaatttgattcttgtgaaagacctgagccgactcggacgagactttgtcgaagtagggaggtacacggacgtgatcttcccgtctcttgggtgtcgattcgtctccgttctcgattgccttgacactgaaggtgataacactgacatgctgcatttccggtctctgatgaacgattatcatttgaaggacctcagcaacaaggtgaaaagtgtacttcacgccaaaatgagatctggacagtacatcgccgcctatgccccatatggatacagaaaatccgaggaggacaggcataggctggtcattgatgaggaagccgccgctgtcgtgaggcggatgtttgaattgaggcgggcgggcatggcttatggaaaaatcgcggccgtgctgaacagcgaaggcatactcagcccccgatggtactgggccaagctgtacggcaatgggtcttgtaagtatgccaatctgtggatgtacgccaccgtgaagaacattctcaccaacgaggtttacacaggcaatctgatacagaaccagacaggatctcgctcatacaaagatgatacaatgatctacaaacccgagagcgaatggatccgccatgaagcattgcacgaggcgataatttctcctgaggtgtggaatgaggtgcaggcgattaatagagagagaacccggctgtcagctgacaacgcacctcccaaaccctttctgttcacagggaaactggtttgcgccgattgcaaggcaccactccagggcaatcgggagactcaaaggagaaagaatggtacgagtaaaaagtatgtatcatacttttgctcaagatataccgcatccggttacggcgcttgtagccgacacaccatctacgaaatgactctcacagagctggtgctgagcgaaatcagggctcacgcagaagctttggagctggacgaggccgcaatgctcgacaggctgcaagcacagaggactgccgccgacgcagagcggttggagtccgtacggcaggaaattggcaaactgcggaggcgagtgtacgagctggaacagatgaccgccaatctttacgaggataaggtttgtgggagcatcagcgccgcaagtttcgctgtgttgctcgagaaaacagaacaggagcgccgccagagaacggaccgcctcgataccctgctggccgagataagagagtacgagcagtccgctgctgatattcaatcctgggctgcagtcgttagaaagcacctgcacattcgcggattggaccgcgaaactgtggatgaactcatcgatcgcatcgaagtgggtgagaagacagtgatcgacggaaagaatgtgcgagatataaagatctattaccggttcgttgggaacatc

SEQ ID NO: 1085 - DNA, 1665 bp, unidentified
  source 1..1665: mol_type = unassigned DNA; note = Bacteriophage uvig_66023 from the Index of /pub/databases/metagenomics/genome_sets/gut_phage_database (ebi.ac.uk)
atgatgacccttttcgagatccgcaatgcccttgccgacggtactagcatctatgaactgcccctgaaagttacctactatgcgagggtgtcaaccgataagtatgagcagctgaattcattggagaaccaggtgacttactatgagaactacattaaagaaaactgcaagtggacctttgtagaagggtacatcgacgaggggatcagcgggacgtctacaaacaagcgcgattcctttaaacgcatgattagagacgggcaaaatggcaagttcaaccttgttattacaaaagaaatatccaggttcgccagagacactttggactcaatttcttacaccaggaaactcttggaatacggcgtgggggtcttcttccaatatgatcacatcaacacctttaacagtgatagcgaattgcgactgactataatggctagcattgctcaagaggaggtaagaaaactgtccgaacgggtgaagtttggctttcaacgatccatcgagtcagggaaggtgctgggaaacgattttatctggggatacaagaaagataagtgtaaactcgtggtagtggaagaggaagcagagatcatcagaaaaatctttgatatgtatgtgaatgagcacctgggaatgagatccatcggcaataagctcgctggtgaaggcatcctgaataagaatggcaaacccttccagcagggaacgataaagtatattctcacaaatcctaagtacaaaggatactactgtggcaataagactcgggtgatagattatcataccaaacagcgcgtcaatatcaatgaagaggattggaagctgtacgaagacaacatcaacgtcccgccaatcgtgagcgaatatatttggaataaggcccaggaaatcgtcaaaagtagatccgatcgcttttccacacataaagaagtgtaccagaatcgctacccattttctggaaagatcttctgcatgaaccacaacaccacatataggaggaagaaacagatatctagcggtaaaaaaaagaaggtggttattacatggaggtgttctcatttcctgaagtacaataccactgggtgcgatggacctattctctatgacgacgaactcaaagaaatcgttggcaagagcatactgaagtatatcagcaacgtcagcattgtcgacgacctgattaaagagtacaagacgattgaggacaataaggactattctaaagatatagaaaagaagaaagacgagatcgagcgactggaacggagtaagagtaagattcttgatcttatcgtcaaagagctcatcaacgaggacgacttcaaaaagcagtcagacgagatagtgagcaagattcacaaacttgagaacgagatttccgagcttgagacgaagagtaagtctatattgacaaattataagtatctcgaggaagttcggaagaaagcactggaaaaactgaagtacgagaatgcagacattgattcactgatctacgagttcttggagaagatcgaggtgtacaagctgaacgacaacaactatatttccctccgagtaatcttgaacacaggtaaccagtacggtattaccttcaaacacggcgagcacccctttggcaccaattacacttacgataagagtcggtctcggaaacatatt

SEQ ID NO: 1086 - DNA, 1458 bp, unidentified
  source 1..1458: mol_type = unassigned DNA; note = Bacteriophage uvig_380785 from the Index of /pub/databases/metagenomics/genome_sets/gut_phage_database (ebi.ac.uk)
atggcctccgccgtaatctatgccagatactccagcagtgggcagcgggaggagtcaatcgaggaccaggtgcgagtgtgtactgaggaggctcaccgcaacggggacagaatagtcagggtatacgcagatcgcgcaaccagcggcacaaccacaaatcatagagccgcctttgccgaaatggtggcagactccgcaaggggctggttcgagaaggtgtatgtctataagaccgataggtttgcccggaataggtacgattccgctatctacaaaactaaacttaagaggaatggggttcgcgtagtgtccgccactgagcggattgaagacggcccggatgggattctgctggaggcagttctggaaggcatggccgaatattatagcgcaaacttggctgaaaatgtcaaacggggtttgcacggaaacgcactgaagtgtaagcataatggcgtaatggtctatggttttgatcggggagaagatgggtactatcatgtgaatgaagagcaggctagagtagtgaggacaatgttcgaaatgtacgatgctggctctggattcccagagatagaggatgcccttaaaccatggaggacaagctacggtaagccctttaccatgaaaaccattagtaagatgttgcgcaatgaaaagtacgccggtgtctacaagtatggaggccagcgagtggagggtggaatgcccagcatcgttccgcctgaactgttcgagcgggtccagcgaagactcgccctcagaacgcgcaaacgacgaggcacagtggaatatctgctttccgggaaactgtttgacattgacgggaaccgctatcaatcatcttctggccatgggaagagtggcaggaaatacacctactaccggtgcccagccactggacacattgttccacaagagaagctggagcatgctgtggcggaggaggttcaagccttcctctcatctgaccacgtggctggaatcattgctgatttggtgatggaggaacaggaagtggcgctgtctgatgaccttgacgccatggacgcactgagaaagcgccttgccgataacgagcgcgaacaggctcggatggtggatcttgcggcaaaaactggagcaaccgacgctgtggcggcaaaactggacgagctggtggccgaacgacaggctgtggccgacgaactcgctgaactcgagaaaggcacacctgtgttcgaccgggaccacgttgagttttgggtccacgaagtcgtcggtaagaaggaccctttggaggtgatagccctgttcgtgaagcgagttgttctcgatagagaaggcgaaaggtttcacgtcgagttcatcatcgatggaggcgatgatggtggaaacgagacgaaccccagacccgacgctcctgacgggggcagctgcaaaagtcagctcgcggaagaggaggggttcgagccctca

SEQ ID NO: 1087 - DNA, 1425 bp, unidentified
  source 1..1425: mol_type = unassigned DNA; note = Bacteriophage uvig_388771 from the Index of /pub/databases/metagenomics/genome_sets/gut_phage_database (ebi.ac.uk)
atgaaggttggagcagcatacatccgcgtatcctccgatgatcagacagagtatagccctgattcccaggttaaagagatcaaaaactatgccgctcggcatgacatttttctgcccccagagaatatttttatcgacgcaggcataagcggcaggaaggctaataagaggcccgagtttcagcgaatggtgtctgccgctaaaaataagcccaaaccctttgatgtaattttggtatggaagttcagtagattcgccagaaatcaagaggagtcaattctttataagagcttgctgaagcgcgagtgcggaatcgaagtgacctctattactgaggagacaggggataatatgtttggaagcctgatcgaacgaataatcgagtggatggatgagttctacagcataagacttggcgaagaagttcgggccaagatgacgttcgtggccgaacagggcaagatgcagactaccgcttcttttgggtattcaaagaaaccagacgaagaactcaagatcctccctgatgaagctaactgggtgcgattcatggcagagcagttcctgaataagaaaagtttgcggtccattgcgaatcaccttaacgctaacggtattaggacacacagaggtaacaagttcgaagcccggaccgtggaatatatcctgaagaatatgacaaacgctggggcggttcattggaccccaaatcaggccgcacacgactccaggcacccctactctgacaacacaattatagtaaaagacgtgctgcctgccatctatagctttgaacaatacgaggagataatgaaagagtttgacagaaggacgaagagtcgcactaagtatgctaagagtgacacagtcaagaaacattggcttagcggctatctcaaatgttctaactgtggagccactctgatctattctaaagcccataatggctttcagtgctacaagtacggtaagagtctgtgctctgtctcacactacgtgtctgcatcaaagatcgaagtggctgtgattgaagcgctttccgaagtgactgtcacagatactttcatcaaagccataaccaaaccgacggctaaagatagcatcgattacaccaaagacattgagcgcctcgagaacatgctggtgcgcgccaagaaagcctatgttgaagggatagactcaattgaggaatacgccgtgaacaaggagcggatttccaaagagatctcccagctgaaacaaaaagagagcgagaggatcgtcgaatacccaccgaagaccgacgtggtcaacaagttcaagaccattatcgacctcattaaaagtgatgcagataacgacgccaagagagcagcgttcggggagatcgtggagaaagtcatctactccaaacctgaggaatcagtcaagatctttttctacttg

SEQ ID NO: 1088 - DNA, 1488 bp, unidentified
  source 1..1488: mol_type = unassigned DNA; note = Bacteriophage uvig_520747 from the Index of /pub/databases/metagenomics/genome_sets/gut_phage_database (ebi.ac.uk)
atgaacgaaattcgcgcaatccagactgagtacagaggctatttgtttcggagcagacttgaggttagatgggcagtcttcttcgacgcttgcggcgtggattgggagtacgaaccagaggggtatgatctgggaaacggcctttactatctgcccgatttcctgttgcatggagtgaccattaaccacggatactttaaaaagaactgcgatatctacgtcgaagtaaagggacagatgaatgacgctgatgccgagaaaattaatagattctatgccgctggttacccggaaggaaatgattggggagtttctcacacggcagtactggtggtggggaacatccccgatggtgaggatatgtgcgagattctggacaacctgcagaccgaggcgtatcatgatcaccacggatggcctaatctctacaatttcgagacagtggacgaggattacttcggggcttaccccggcgtggacaaacacggtaagtttaacctgtttggtgacgactccacctatctttggtctatgaactcagacgtgaccgaaagggcctatcgcctggcgcggcaggcacgatttcgcgagtttggcttcatcaaaatcgatatgataattacaaagtcaattagtcggttttcccggaacactgtggactgcctgaagtatacaaggcagctgaaggaactgaatattgccgtcttctttgagaaagagaacattaataccctcgacgcgaaaggggaagtcctcatgacaatcatggctgccttggcccagcaagagagcgagagtctgagcgcgaacgtgaggttggggatacagtttcgcaatcagcaggggaaggttcaaatcaaccacaattggtttctcggttacaccaaagatgaggatggcaagctcgtgattgtaccagaagaagccgccgtcgtgagacgcatctatgctgagtacttggagggcgccagcttcctccaaatcaaaagatccctcgaagctgacgggatccagaacggcgctaagcatgacaagtggtacgagtccaatatcaagcagattctgacgaatgaaaagtacatcggcgacgccttgcttcaaaagacttacaccgtctctatcctggacaaaaagagggctactaataagggcaacctgcctaagtactatgtagaaggaagtcatgaagccataatcgcaaaggatattttcctccgagtgcaggcagaaatagcccgccgggcaaacattactccagacggcaaaaaacggatctactcttcaagatatgctcttagctcaatcgttttctgtgggcattgtggagacatctatcgaaggataaagtggaataatcgagggtgcaaaagtaccgtgtggcggtgtgtgtccagggtcctcaaaaaagacagcggcattgattgtcctgccaggacactgcgcgaagaggaccttcacgcagccgttttgacagccataaacgatgca

SEQ ID NO: 1089 - DNA, 1539 bp, unidentified
  source 1..1539: mol_type = unassigned DNA; note = Bacteriophage uvig_380944 from the Index of /pub/databases/metagenomics/genome_sets/gut_phage_database (ebi.ac.uk)
atggctcaagccaaacttatctctcctgtgagtcgccaggcctacgagcggactaaagtggcagcatactgtcgcgtgtcctcaaacagcgcagatcagctgaattcttacgccgctcagatccgggcctacactaagctgatcaaaagtaacgactcttgggaactggtcgaaatctttgctgatgagggcttgtctggaatgaaagccgagaatcgagtggaattccagagaatgattgaaatgtgtgagcacaagcaaatcgacctgatcattacgaagagtgtaagtcggtttgcgagaaatgtcaaagaagctttggagtatgttaggaagttgaaactgttggggataggagtacagttcgagaaggagggaatctacacgctggcactcggggacgaaatgctcctcaataccttctctgccatcgcccaggaggagagcaaagcgatctcacagaaccagcggctctcaatcgtaaagaggatggaaaggggcgaatatgtcgattcaaacgctccatacgggttccgcctgcaggacaaaaaactggaggcctttgatagagaggcggatgttgtgaggtatattttccagcagtaccttagcggctggtccacctcagagattgctagagatctgacggagaaaggtatccaaaccaagcttggcaaggaacagtggcgctcaacaaagatcagttacattctctccaacgagaggtatgtgggagattgcaggtaccagaaaacataccgggacaccacagtgccgttcaagcagtccaagaatcgggggcaagaggacatgttttatgcctctgaaacacatgaccccattatagaccgcgagtccttcgaaaaggtgcaggccctcctgcaagaccgaaaagaaagattttccaaaagtgagcaactgaatatctatcccctgacttctagaatacgatgctctgagtgcggatctgtgtttagaaggaaggttcggaatggggcgataaagtgggtttgtgcacgccacagcgctgatacacacgcctgccctagtggttattattccgaggagcgcatctatgacggctttatcaccatggtcaataagctgagattcggcgaagaaagaattctcgatcaagttattgctaaacttgaaactgccgcagcactttacaagcgaaacaacatttccgccggtaaaatgagccagtccattgcagaactgaacgctaaactcgtgatgttggagcagttgcggagcaagggctatctggccatcgaagtgtaccagagccagactcgagatatacagaaacaaatcagctcactcaagagcgaaaggcgcagcgcttttgaatccacaattcagactatgttggacgaggtcctgaagatgaggagcctcctcaacgaaattgaagagccactggaggagttcaacgacaagcttttccatgagcttgtgaaggggattgagatcaataagcaggatgagatgaccgtcacctttctgggcggactcaagttcaccgagcttata

SEQ ID NO: 1090 - DNA, 1836 bp, unidentified
  source 1..1836: mol_type = unassigned DNA; note = Bacteriophage uvig_148875 from the Index of /pub/databases/metagenomics/genome_sets/gut_phage_database (ebi.ac.uk)
atgctgagggctgtgatctactgcaggtgttcaaccgaggaggagagccagaaggacgcactcgcaaaacagattcaagaagccgaggaatgcgtgcggaagaacaattggcttttgacagactcctatattgagagcagatctggcaccacgacaaaaggccgcacagaatacaatcgacttctgggagacctggagctcaacaagtttgacattgtagttataaagagtcaggacaggctgatgcggaataccaaggattggtacctttttgtggataggctggtgacaaactctaaaaaactctatatctacatcgaacagaagttttacacgaccgacgacgctctgataactggaattaaggctatcttggccgaggaatacagcagagagctgagcaagaaaattaacaacgcccaccgaaataggcagaaatcaggctcttctgtgatattgaactcaaatgtgtatgggtttcagaagctcccagacaaaaccatcgccctcgttgaagaagaagccgaagttaaacgccggatgtatgagctgtgcgcatccggttacgggacacgcactattgaaacaatcctgaagaacgaagggataaaaaaacggaacggtaagccctttatcgccaacgacattcttaggatcattaaaaacccattgaacaagggatgcgttgtgatgggaaaaacccattatgacttcgatagtaaaaagatgatccggatgcccgaggatcaacagtatgtgtatgagaacttggtgccgcacaccgtgtccgacgcgctgtgggagtcagccaatgaggaaattgctaagagacggcgctcctctaagacagataagactagttttggccgcaatactggtaagtacgaactcagcggcaaaatctattgtggactttgtggatctccttactaccgcaagacccgacggagatacagagacgaaaagattatctacgaatggaaatgccgaacctaccttgagactggccggaatgtcgggaggaaagatcggcctcagttgagaaaggttcagctggagactgtcgaaggatgcgataatgtacatcttgatgaggaacaactttacgagctgctcgagcaaaactgtgtaaagagttatcaggtggacaaagaaagaattgtcaagaagatggttagattcctcaaattggtgttgcaggagcgcgaccttcagcctgagatcgagcagaaggaacaaaaaaagcgaaagatcaagcaacaaatgcaactgctggtcgacaaactgctcgatgggatcctgtccgatgaggtctatcaggagaagcagagatcacttgagaaacagcttagcgacatcaccgggcagctcaagaagctggaacagaagagatccaaggagaatgtgctggaagatcggattagccacattgagaagtccatgaagaatggtaatctgattgagaaggctacagtagcagagatgctggatgagatcgaaaaaatcctgatattcccaacttacatggaaatctatttcaacctcagtcgcatgctggggctgcacgagatgcagcttccctatgaaacctctgaacagggagaggtcctgcgaatagagtatggtaacagattcaattacaaagagaagaaagagggcggcagggaggagatcatcgagctccttcgagataatcccaaaattacggcaaaaatgatagcccagaaaatggggatcggtttgagcgcggtgcattaccgcatgaacgtccttaaaagggagggaaggattaggttctgtggcggcgggggcgtgggctattgggaaatactcgaa

SEQ ID NO: 1091 - DNA, 1725 bp, unidentified
  source 1..1725: mol_type = unassigned DNA; note = Bacteriophage uvig_143975 from the Index of /pub/databases/metagenomics/genome_sets/gut_phage_database (ebi.ac.uk)
atgacagtgacccagaactatgataacataattccatctacccccatcttgtcagccgaccccaatgtgaagaaggacgtgatgactgaccagcagaaaatcacaatcctgtattgccggctgtccaatgaggattcccaggatggggagtctaattccatccagaaccagcgagaactgctcactagatacgcccaggaccacggatacacggatctgaaagtgctcgtagatgatggatacacaggtacaaatttccagcgccccggcgtacaggaaggattcgagctggtaaagcaggggctggtggggtgttggctctgtaaagatttgtcaaggttcggtagagattatctgaccgtcggccagtacactgacattatttttccatcctacgacgtgcggtttatcgcggttaacgacggggtagatagccaacgcggagacggcgaggggtttgcagcaattcgaaacttgtttaatgagtggtacccacgggatacctctaaaaaggtgcgcatctctctgcatcagagaggcactagtggcaagcatctgggcaagccaccatatggcgaccgatgtgacccgaatgataaagataagtggatacttgatgaagaagccgcccccgtcgtcaaaaggatcttcgacctctgcatcggtggcaaagggccggagcaaatctccaggattctggagcgagatcaggtgctcacaaccaaagcactgtacgcttcacgaaagggcaaaccacttcccaaaaacccttacggctggaaagatcagagcattgtggggattttggaaaggcaagagtatacgggatgtacctgtaacttcaagacctacagcaagagttacaagcttaagaaacgcatccccaacaatcctgaggatatgtttatcgtgcctgacacacaggaggctattgtgagccaagcccagtgggaccgggttcaagaactgcgcaaaaataagcgaagacctgtcaaagcagaaagacagggcctgtttgcaggactggtttactgcgccgactgtggaagtaaactccacttcgcgacctgcaagggcttcgaagggaaacaggaccactacaggtgctcaaagtataagtctggtagaggtgagtgctctgcacactatatccgcgaagatgtgctcagggagctggtgcttgaacgcattcaggctgttaatgcctatatccgatccgacgtcgaagggtttcaggaagaatggcttcattatcggagagctgatcaagagcgggatatcagagaagaccagaagcggatggagcaggcaaagaaacgcttggccaacctggacgtcgtgatgagcaggttgtacgaagattatgctcttggagagatttccaaggagaaatataagaaaatgacgtcagactacgaagccgagcaggagcggttgaagctggagatcgagacaaccgaagagtgggttgaacagaggcaagctatgggtgacgacttggatgccttcatcgccttgaccaaaaagtatgtcgacgtcactgagctgacccaaactatagtcaacgaatacattaagaagataatcatacacgcgcctgacaagagtagcggcaagaggagacaaaaggttgagattatctttaacttcgtggacgaggtggagatacccgtgctcgctgagcctatgattgccgagagcacactcggacggaagaaaactgct

SEQ ID NO: 1092 - DNA, 1554 bp, unidentified
  source 1..1554: mol_type = unassigned DNA; note = Bacteriophage uvig_59951 from the Index of /pub/databases/metagenomics/genome_sets/gut_phage_database (ebi.ac.uk)
atgagcattatgtcctttaacaatattatcatctatcttcgcaagtcccgcgcagacgatccaaccatgacagtcgaggaagtcttggccaaacatgagagcatcctgcaagattactgtatcgccgaatttgaccagcctatgcccgagtccagaatctatcgagaggtggtgtctggagagaccattcaggataggcccgtcattcagcgagttttgcggctgttggagtccggtaatatagacggcgtcctggtggtggaacctcaaagactctcaaggggtgacttggaggactgcggccatatcatcaactcatttcggtatacaaacactatggtaataactcctacaaaaacctataaccttcaggatgaatatgaccggaagtttttcgagatggagctcaccagaggaaacgactatctggaatataccaaaaaaatcctggccagggggaggctggcagcggtaatgtctgggcagtatatcggctctgtgagaccctacggctacaccaaaatagtgtatggatcaggcaagaatcgcatccggactctcgagaagttcaagaaggaaaatgacattctgattctgatgaaacggctgtacctcgatgaagactatactcctgaagaaattgcacgcgctttcgacaatatggggattgagccacccagaggcaagcactggaccgcctctgccgttcggcgactgctggcttctccaatcaacaatggcaaaattgtatggaacaagcgccagacagtggtcgagtggcgcaacggtaagcaagtgaagagtagggcgaagagtaataaggatgacgtgatcatcgtccagggaaagcacccagcgacatacgatgatgaaacctacacagctattatggctaagctgagcatacacagtgtgaaagttacgaatcagagggggcttagaaatcccttcgctgggattctgttctgccagtgcggaagagccatgtctctgaggagcactcacggcgggcatagtgttattttgatttgtaatgaccactcctactgtcggacacgaagcgtggcctttaatccggtgcttgacaaagtaaaggaggctctctccgaggccattacggacttcacggtgaagatatcaaacaaggaacagaccgattccgagctgtacgctctcaatatctcaactctcgaaaacaagctggagcagttgtacaagaaagatcttgttcaaaaagatgcatacgaagatggtgtttatagtaaagccgaatacatacagagaaatacccaactccaggaacagatcagcgtcatcgcaaatagcctcgaggagatgcgcgcaaaagcaccagaggtgatcaactacaaggattgcatcattcgattccaggactgtctgaacgctttggaggacaataacgtctctatcgaggtgaaaaacgccctgttgaaggcctgcataagcaagatcgtgtaccattccgtgaactcaaaccctgaatacagcggaaggactaaaaacccgtttaatcttgaggtcttctttaaactt

SEQ ID NO: 1093 - DNA, 1950 bp, unidentified
  source 1..1950: mol_type = unassigned DNA; note = Bacteriophage uvig_368726 from the Index of /pub/databases/metagenomics/genome_sets/gut_phage_database (ebi.ac.uk)
atgagcgtgattaacacattgcagaacatattggcctactatatccgcattagcgtcggcgacagaaacaaggcaggtaagacagatgagagcgactctgtcatcaatcagcgggctctgctgaaaagatacgtggaagaacatccagatctgcgggaactgcaatccatagagttcgtggacgatggcgagtcaggaatgacgtatgaaaggagtgcattcgtccggcttatggacgaggtcaagaaaggtaccgttaaaactatcatcgtgaaggactactctaggttcggcagagggtacattgacgctggagattacttggaacagatcttccctttcctgggagtccgattcatctctgttaatgatcattacgatagcaaccggtataagtatggctccgcggggatgatcgacgtaggcttcaagcagattatgcaccagtactactctgtttcactgtcacagaagatactgtgcgcccacaaacagcttgcacagaaagggaagttccacgcctcatacgccttttacggatatattaagagtcctgagaagtaccgactcgaaattgatgaggagtccgcagagaatatcagatatatttttaacgccgcactgcagggcaaacggaacacccagattgctgctgaactgaatgagatgaaagcgccaacaccactctgggtgttgaggaagcaccataaaaacataaagaattggaatgaaaagaactgccgctatatttggtcagcggacactgttaagcgcatactgcaggatgagagatacacagggacttttatctatggtaagaccagagtggacaaaatcggtagtcgaaaaatggtgtcccggcctcgagaagagtggaccgtgatccccgatgtttttcccgtgattatctccaaggagatattcgacaaagtcaaagggaaacgcaaacacatcatcaaggcagagacacagaaatcctgtatgtttcataatgtggtttgtggatattgcgggatgtgtcttgtctacaacgacaccgaaaacccctattacaagtgtatggagtacaagaatggcgtgacagtgtcttgcaaaggaaatagggtttatgagtctgatcttaaagtgctcactctcatggcccttaaagaagaagctcagaatttgctgaagcagttgcacacggccaagcaatgcgcctataaaggcggaaaggctaacaagattaaggagctgcagctcaaactgaacgcgatcccactcaaaaaggagacactgtttaaacaactgttgtcaggagagattacgaaagaaaaaaatggagtattgtacgggaagcttgaacaggaagagaaatctctcaccgaacagatagaggccctgcagagcgtgacagagaccgctgcatttgaaaacgatactgttagctttttgcaaagtctgctgaagaccaagacactcgacatcaagaccgtcaagatgtttgtaaagcagattcgcgtcttcatgaacgaccggattgagatctccatcactcttaaacccttgaacggcaaggaggagatagtaactaaggtctatagtgtgcctgaaattaagggtaagagggtgtggatctattatcgaacttggtacaacgaaggcaaattgcaagaacaaagaaattccctcatcaagtacgccgaaagtaagggttggagcattgtgggggagaacgggggctaccacagcaatagcaaaaagctgttcgaacagatcaaagaggccgccgagaacaaggcttttgacatcctcttgattgaggatatgaactgtattacccgcaattggcaagaatccctggaggccatcaggcatatgaataagaataatgtgaggatcgtagctacctctggcacgccgtattacaccttcctggacgagaacctctacaatgaggtgaaaggcata

SEQ ID NO: 1094 - DNA, 2058 bp, unidentified
  source 1..2058: mol_type = unassigned DNA; note = Bacteriophage uvig_355166 from the Index of /pub/databases/metagenomics/genome_sets/gut_phage_database (ebi.ac.uk)
atgacagagcacattgacatagcaggatattgcagaataagtgtggacgaggaactggaccgcgataacgtgtcaatcgagaaccagaaggcgatcatcacggactttgtcaagcacagattcccagactcaactttgaccttctatgaggaccgggatcggtcaggttacactttcgagcagagagagggatatcaggccatgcggcacggccttatggatcacaagtacgacgtccttatagtgaaggatttttcacgctttagccggaggaattcccgcgggctcgtggagttggaggacctgagagatgccggcgtgcggatcatttctattggcgacggtatcgattttccgaatgacgatgattggctgaagatccagtttcagttccttatcaacgaaatgccagtaaccgacacctctaagaaagtgcgaaatgttatcaagcgcaggcaggccgacgggcaatggatctgcgccgccccatatggatacagaatcaacaagtacaaggagttcgaaattgtacctactgaggccgatatagtgagattgatcttcaacctctacaataatgaaggctggggatacaaacgaatctccaaccatctgaccgaacaaggaattcccacaccccggatgtccgagcagatgagaaaggaagcggagggcgaagcatgtaaaaggatcgcgaaagctacatgggctatagtgactgtgcagggaatactggacaacgacttttacattggcactctgcgacaggggaaatacaccagagtgaaaatcaacggcaaggaagttaaacgcaatgacggggaacatgttgttatcgagaaccatcaccaggctattattgactacagaacctttgccacgacccgggccttgcgagagaaacgaacgaggagccattatcgcggaatcaaaaaatatgataatttctacagcggctacctcgtgtgtggcgattgcggtgcaccaatgttttccatgtctcggaacgaccttaagcccgcttatacatgtggcacctaccacagaagggggctggcaggctgtaccagccaccacattcgagtggacaagcttgacgagctgctgaaaaagtatgtaaggaaagtaaaagagtgttccgcagagatgctggccaagcttaatgaagatctcaggcaggaggaaagcaacgtggtcgagactgagcaatccgcagatcacctggctgaaatcctcgaggatctgcgcgaagaacttaaggccaccaaaaggcaacgaatcagagacattcttaagcaccctgatcaggaaagcctcctcgaggaaacatatgacgagctcgaatctgatctccagaaaaggatggaagggctgacccatcaaatcgacctgctgagtgataagcgcaacacgataattcaggtgaatcgcgccgctaagacagctatggatgtctttgacgacattctgaataaggagaaacttgagcgaaatgatcttgagctcttggttgatgagattcgggtctttgaggaccggttggaactgaagctgcagcctgatgtggatagcatccttcagtgcagtacaatggaacgcactatcaatttcccggacggtactggggatatctcttctatcagcatagttcaatccgccaagcagaggcccgacaaggttttccgagcaaacgtgatttgtaatggtagtccttcacgaattcggatggtcaggagaatctccctgggaatgacaactaggccgcggtcttccattaggaggacaataccagtggcgttcatctacgagattccacccgtgaaagctaactttacctctgtcgtctcagccccaagagaaatgaacatgcatgaggtccccctgaccatcttctgccgacagagcacagcccgggggattgcagctattaaacgccctcctgtggtacggcccgaagtcctgcatttcttcgctttcttgcaaagtgcatattttacagccaggcccgcctatccccctgctgcgtgcgcacctgccagtgagtggagacgcccacct

SEQ ID NO: 1095 - DNA, 1845 bp, unidentified
  source 1..1845: mol_type = unassigned DNA; note = Bacteriophage uvig_345767 from the Index of /pub/databases/metagenomics/genome_sets/gut_phage_database (ebi.ac.uk)
atgcagtcttcagaagaggctataaagttcctggatgaatacctgatctatctcagaaagtccagaaatgatggagaaaaagttcctgtagaggtgatcgttaaacgacatgaggaggcacttcaagagttggccgagcgggaacttgggttcaagatcccggagaagaatatctaccgagaaattgtcagcggaggagaaagtatcgaagatcggccggagttcattaaagtgctgcaaaggctggaagtcggtaacatcaaaggcgtcttcgtgttcgacccccacaggctttcccgatctggcctgtacggtgcgggggacgtgctcgaagccttcgaggtgactcagactttgatttgcacccccatgaaattttacaacctggacgataagatggataagaagtacctcgagatgatcatgatacaggccgcggagtatctcaactatgctaaagatgttatggacgccggacggatgaagtcattcgctgaaggcaaggctattctgtctactcctccctatgggtacggaaaggagaagatatctgatgagaagggttataagctgatacctaacccagtggaggccccaaacgtgaaaaaaatgttcgagctgtgttgcgagggcttggggacgaccgccatcgctaactaccttaacgagaggaatgtgaagccacgcaaaaaggcgtactgggaacccacaacaattcgggacatgctgaaaaatgaaacctatatagggatcctgacatgggggaaaaatccaattaaaaagattctgcagaacggaaaggctcgcaagaagagattctacaatcaggagggcttcaaggtagccaaaggtctgtacgaaccacttgttaccaaagagcaatttgagctcgcacaggagatgatgaagtcaagacggaaccgcgaatactacaataacggaatcaaaaaccctctcgccggcctggttttctgcgggtattgtggtaatgctatgattcggcggccctacaataagagttttcgcaaaaacctcgtaagggtctacgagatcgacaaacaggaacttctggattatctgcgagcatataaacagcagagcaacctgagcctgacagaaatcgccaaaagactgaatgtgaccagggacgtggtggtcggctggtttcccgcaaaacttgaaaaattttatccttctaagacactggccgataagtggttcgacttgaaaaccctcctcgacatcaaagacgacaagtttgacaaagaagtgacgacatacaaggagccagacatacagaaggacagccttatttgcagctccctgaaatgcaattgtgtcagtagctacctcgagatcgttgagaacggccttatcgacaagctgaagaacgaattgtacaaacgaaagcattttttggacaactatgaacaggagttgaagaaagagaaggtatccaatgagaaagagctcaaggaggtggagaagaagattgaagagatccagggctatattaagaatgcagccaaaaagaatgcaatggacatcatcactgatgaacaatttctggatctcaaggaggagtttgaaaccgaactgaatcctctcctcaagaagaaggagaagctggccgatactaaagatgaggaaaggattatacagtacagacggtccattcccgtgctggaaagatgtgtctcagattatcacctcctttccatcgaagagaaaaaccgcctgcttaaaagttttatcgaccgcattgagtataagaaagaagtgggcgggaggtggaataaggaagctattaaccaatttgagttggcagtcgagacctatgatttc

SEQ ID NO: 1096 - DNA, 1527 bp, unidentified
  source 1..1527: mol_type = unassigned DNA; note = Bacteriophage uvig_585265 from the Index of /pub/databases/metagenomics/genome_sets/gut_phage_database (ebi.ac.uk)
atgctcaagtctgacataatgacagatgagaagtggctgatgtatctgcggaagtccagaagcgacaacccagacgagacagttgaggaggtgctccagaagcacgagatgcagctgcaggagttcgcaagaaatgagcttgggaaagaaattccagaagactgcatctaccgagaggtggtcagcggagaatctatagatgaccgggaagaaatcaagaaaattctggttagaattgagtcacccgatattgctggagtcattgccattgaaccgagcaggctgtccaggggcgatttgtcagattgtgcccgaatcatagatgcgtttcggtttacacatagcctggtaaagacaccttatatgacctacaaccttgagaataagatggaaagaaagttcttccaggacgagctccttaggggtaatgattacttggaatacactaaagagatcctgtttagggggagagtcgcagctgccaagcgaggttgctacatcgggtccaggcccccattcggctacgatagagtaaagaaaggtaaagatttcatcctgactcccaacgatgacgccgatattgtgcgctccatatttgaatggtatacgaaagaaaatatgacccctggagccattgggcgccgcctggacgatatggggattaaaccttttatgactgagacttggggccgcgataccataagagccatgttggagaaccaacactatataggcaagatcgtgtttaatgaaaagcgaacaacttgggttctggaaaacggacatagagtcaaaaaacggatccgccaacctgaggacttgatcatttcagagggcaaacaccccgcaatcattgacgccgagactttcgccgcagctcaggctaagatcgccgcgaacccccaccttaagaacgaccatgacctgaagaacatcttcgctggaatcttgcggtgcaaaaaatgtggatatattatgatctacaaccacaagaagggcacccaggcacgactgacctgtaaactgtctccgatttgttacaaggctgccatagccagtgaattgacggaagcggtgattagcgcccttgagcttagtgagctccctaaactgaagacaaagctcaaaaatggcgatggcaatgccgctcagatccagaagcggctcatagataaactgaataagcagctccaggaatatcgggagcaggaggagaatcagtatgacttgctggagcgacgcaaatatacccaagagcttttcgacaaaaggaatgctgcactgcgcaaaaaaatggaagaatgcgaaaagaacatctatctggctaggtctgcaatgccacagaacgtggattaccaagagcgaatcgccaccctcgagaaagcaatcgaaacgcttaagaacgatgacattccaaataaggagaagaacgcgctcttgaggaccatcattgaacggattgactacagttccgtggaccttgggaaaaataagatcgacatccaactcgacatctacttgaagctg

SEQ ID NO: 1097 - DNA, 1605 bp, unidentified
  source 1..1605: mol_type = unassigned DNA; note = Bacteriophage ivig_2445 from the Index of /pub/databases/metagenomics/genome_sets/gut_phage_database (ebi.ac.uk)
atgaacagctacgacatttcatttcgaccagaagaagtaattcagtatctgagaaaatctcggagcgacgaccctaatatgaccatcgaagaggtcctcgagaaacacgagcacatgttgagagacttcgcagttaatcattttggggcgcccgtccctgattgcaatgtctaccgggaagtggcaagctcagagactattgatgggcgccctgagatgctgcggctgcttagagctattgagtctcccgacattagggcagtgcttgtagtggatgtgcagaggttgagtagaggcgacctggaggacgcagggaggcttatgaaattgctgagatacactaatacccaggtgattacgccgatgaagacatacgaccttagagacgagtgggaccgggatatctttgagcgcgagttgaagcgaggaaacgagtatctggaatattttaaaaagatacaggctaggggcaggttgcagagcgtgcaggagggaaactacttgggctctaaacctccctatggatacgatcgcgcggtaattcggatagggaaaaagaattgcccaacgttggctgtcaacaaggagcaggctgatgtcgtcaggctcatctatgaattgtacgtgaacaaagattggggcgctcaacgaatcgccaatcaccttgactccctgggcattcatccactccacaacgcacactggaaccccgccgtgatcaaagatatactgcgcaactaccactatatcggtaaggtggtttggaatcgacggaaaaccatcacagttgtcgacaatcaagaagtttataagacccggccttggaatgagaacatgctgatctttgatggccgacatgaggcgatcatctctgaggagctcttccatgcagccctcgctcgccagggcagaagccatagatgccggccagacacccgcgtgagcaacgtgttcgcttccatactgcattgctcctgtggctatagtatgtcactcagacacgacggacgaggctcactcaggctgtcctgtgacgatcagaggcattgtaaaagtgggtctatcggttacgaagagctcatcgactacatctgtaaagtcctgacagcctacattgacgacttcaagattaaggtgaaacacgataatgccaatgaggtagacattcaccgagccttggtgactgatctggaagccagacttactgccctcgaagccaaggaggtcaaacaatgggaagtttacagtatggagggtatgccacgcgccattttcgataagctgaataagcacgtgaaggaagataaagccgaagtggaaagggcactgaaacaggcccgcaaggatagccccgatcccgttgattacagagaacggatagccaagtttggtgacgcactgaacgctctgcaaaaccccgccgcctccgcagaaattaagaaccagtatctgaaggctataatcaacgacatgatctacacaaggcctggagctgtgcgcctcaccgcggataactgctccgattatgggatcaattatagggacatggccaagcgaggagggtggtactctccgccattccgactggagatcaagttccggttc

SEQ ID NO: 1098 - DNA, 1518 bp, unidentified
  source 1..1518: mol_type = unassigned DNA; note = Bacteriophage uvig_136571 from the Index of /pub/databases/metagenomics/genome_sets/gut_phage_database (ebi.ac.uk)
atggtgctgatgtatctgcgcaagtccagagccgataatccctacgaaactgtcgaagaagtgctgtcacggcacgagacaatcctgcaggaatatgccgagcgaaagtacggcgaacggataccagagagccaaatctaccgagaggtggtgagcggcgaaaaaatagagacgcggcccgaaatgaaatccgtgttgcgacgcatggaagcacccgatgtggacgctgttctcgtggtggatccacaaaggctctctagaggtgatttgatcgactgtgggacactcatgcaggccttcaagtactcttacacaaaaatcgagacccctatgaaagtgtttgacctgtgggataagtttgacgaaaaaatgatacgggacgagttccttcggggtagggaatacctggagtatgctaaagaagtcatggctaggggcaggaagttgtcaacttccgagggctggtatgtatcatctatcattccatttgggtatgacgtggactacgtaatggatggaaaaagaagacgcaagactttgaagcctaaccctattgagagcgtcatcgtccagaatattttcgagtggttcgtcaacgataaacttagcatgtatgccatcagcgatcggctcaatgctgctggtatcaaaacccggaaggataaagaatttgccaccgacgctgtcagaggcattctgaaaaatcccgtctacattggaaaaatcgcaattggtaggagggatacgaaggagaatatggtagacggcaaggttgtgaagagtagacctaggactgaacccaagaaaatatttgatggaaggcatcctgcgatcgttagcgaagagatttttaatgcagcgcaggagagaatagggacattgccaaaggtgaaacgctccacagagttccgcaatcccttttctgggattgcccggtgctcatgtggcagagccctggcatacaacatcgggcgaggggaggttaggctgatttgcggaggccgcaagaagtgcggagcacgctctgtgccacttgacgacttcaccaacaaggtgatcaaggctctcaaagagacagcgagcgacttctccgttcaaatcgactcaggcatcgatattgatatccagagacacgccgaggaaactaaacaggcagaagctaccttgcgagatctcgatatccagcaggagagactttatagttttctggagtccggcacatacagtgaggaaatcttccgcaaacgaaacgccattcttgaggagaagaaggaaaaagcacagaaccactacaagtacctcctggacaatgagcctgttaagattgattatgagaagaaggtaggaaccctgtatcaggccatagataacgtggcctccgacaaacttaccccgaagcagaaaaacgacttccttaagactatcattagtaagataatctacaccccattgccgtctattgacgacggaacgcggttcgggcaacatcagtataggctggacatttttctgaaggac

SEQ ID NO: 1099 - DNA, 1539 bp, unidentified
  source 1..1539: mol_type = unassigned DNA; note = Bacteriophage uvig_469171 from the Index of /pub/databases/metagenomics/genome_sets/gut_phage_database (ebi.ac.uk)
atgatagaaagaagcggaacctggctgatgtatctgcggaaatcccggcaggatgaccctaatgaaactgtggaacaggttctcgccaaacacgagaatatcttgcaagagtggtgccagagggagatcgggtcccagatcccggagaaaaacatctaccgggagatcgtctctggagaatcaattgatgctagacatgagattaaggccgtactggcccggattgaggatcctgccgtggcaggggtcgtgtgtatggagccaagtcgcctcagccggggagatctggctgattgctccaggattatagacagcttccgctttagtcgctccctcgtggccaccccctacatggtttacgaccttgagaacaagatggaaaggaaattcttcaaagacgagttgcttagaggtaatgatttcctggagtataccaaagagatactttttcgaggtagggtcgctgcagtcaagagaggttgttatatcggcaatacacctccctacgggtataacaaggttaaaattggaaaagaccacactcttgagattaacgaagctgaagccgccgccgtgcgcctggtcttcaagtggtacacgcaagagcagctgacaccactgcgcatagcggaccggctcaatgaaatgggcgtgaagccagcgcgaattgataagtggaaaaaagacacaatcagagtaatgcttagaaatccacactacgcaggatacgtcgcgttcaaccagaagaaggagacacaggtgctggaaaatggcagaatagtaaccaagactcttgcccagccggaaaaggatatcatcatcgccgaaggcaagcacactggcattatcagcagggacgaatggaaagctgcacaagcccttgtggcccggaacccccgaatcgatcccagcaaagagttggtgaatcctctcgcgggtctgctcgtatgtaagaaatgcgggaatcgaatgattcatcatccttataaacatgctgctgacagaatcgagtgcaggaccagaccccgctgctacaagtcagccaaacgggaagatatcgttgagtctctcctggtgatcctcgagaaggaacatcttccacaactgttggcacgaatcaagaacggcgacggggacgcaaggaaaattcagcagaggctcctggccaaactggagaagcagatggaggattatagggcacaagaggaacggcagtacgatctgctggaaaccaatcccaactacccacaagaggtctttgagaggaggaacaaggcattgagagaaaagatggatgaatgtcaggcagctatctacaagacaaagagtgccttgccccagtcagtggactatgctgagcgcgttgccgctctgcgccacgctattcgcctccttcgggacgacactgcaaccctggaggcgcagaacaaggctctgaagatggtgattgaccacatagattattctgcccaggaatctgaccctacgaacagacagcgcaacggcgtggactttgatctggccgtgtttatgcgactt

SEQ ID NO: 1100 - DNA, 1545 bp, unidentified
  source 1..1545: mol_type = unassigned DNA; note = Bacteriophage uvig_155463 from the Index of /pub/databases/metagenomics/genome_sets/gut_phage_database (ebi.ac.uk)
atgccacagcatcacattatgtatcagaggaaatctcgacaggatgatcctaacgccacggtcgaggaggtgctggctaaacacgaggcgatgctccaagagtacgcaatcagggagctgggcggcccgatcccggaggagaatatctatcgagaagtggtgagcggcgaaagcatcaacgacaggattgagattaaaaaagtgctggcccggatcgaggatccacagatcaccggcgtcctggtagtggaacctcagagactgtctcgcggagacctcgctgactgcggtcaacttatcaatgcttttcggtatacaaatactcaggtctgtacccctgtgatgacgtataacctggcgaataagatggagcggaagtttttccaggatgagcttctgagaggtagagatttccttgaatacaccaaagagatcctctttcggggaagggtggcagccgccaaacgagggtgttataacggcacatacgccccatttggctatcgcaagataaagattggtaaagaccacaccctcgagatcgtggaggacgacgcagacgtcgtgagaatgatttttgatttgtatacacgcgagcagctgactccattcgccattgcagaacggcttaacgacatgaatattaagcctcccagagccgagcgatggaagaaggacaccatcaggcacatcgttcggaatgagcattacattgggaaggtccggttcaataaggtaaaaagtgtgcctatgctggataatggggaagttattaccaagaggataacacaggagcccgaagatgttatcctcgcagaagggagacaccccgcaataattgacatggaaacctggaacaaggctcaagcactcgtggctagaaacccacgagtgaaacatacatacgatttgaaaaatccatacagcgggatgctggtatgcggaggctgcggtcgcgcgatgatcattcatccctataagcacgccgaagaccgatacgagtgcagggccacacgcgaagccaggcgctgttacaagtcagtgaagtactccgagctgaatcagactatcatccacgccctcgaatccgtcgagctccccgccctgcgcctcaaagtaaaaaacggggatggagatgctgccaagatacagcagcggttgcttgctaagctggaaaaacaattggcggactatcatcaacaggaggacaaacagtacgaactgctggaaactggacgctatactcaggagcttttcgatagaagaaacgctcagcttcgggaaaaaatggaagcctgtcagaaacagctgcacgaggcacgagcagcgatgcctcgcggcgttgactacgctgaaagggttgctagccttgaggccgctatagccaaacttaaggagcccgacgcatcaccccaagagaaaaacaggttgttgcgggccgtcgtggataagatcgttttcaagggatctcctccggtcgacaagagtattaaggggtggaagaagggcgaaaactcatacaacatatccgtgcaactgagactg

SEQ ID NO: 1101 - DNA, 1389 bp, unidentified
  source 1..1389: mol_type = unassigned DNA; note = Bacteriophage uvig_597316 from the Index of /pub/databases/metagenomics/genome_sets/gut_phage_database (ebi.ac.uk)
atgtttgccggggtctacaccgatgaaggcatttctggcctgaacacccgccatcgagaggggtttaaccgcatgatcgcagacgctcttgctggcaatatagacctgatcgtgactaaaagtgtgagccggtttgccagaaatacagtggactccctgacaaccatccgcgatttgaagtcccatggggtggaagtctactttgaaaaggaaaacatatggacatttgatgggaagggtgaactgcttatcctcattatgtccagtctggcacaagaggagtcaaggtcaattagcgacaacgttacatggggtcagagaaaacactttgcggatggaaaagtgaatatgccatacgggcagttcctcggatacagaaagggtccggacgggcttcccgagatcgatcccgaagaagctgaaactgtcagattcatctatcggctgtttatgggcggaaagactgtgaatgctattgccaagattttgacggaggccggagtgcctactccacgaaagaaggccagatggcaagataaaaccgtcgagagtattctgaccaacgagaaatatagtggggatgcggtgctgcagaaatcattcaccgtagacttcctctccaaaaagatgaaaaagaatgagggggaggttccccagtacatcgtgaccgacagccaccctggcataatcgacaaagcagagtgggagctggtacaggctgaaatggccaaaaggaaagcaaagggcaggtcccagaattcattgagccctttttctatgaaaatttgctgcggcgaatgtggatcttggtacggcagcaagatttggcactctacgaacaagtatcgccgggttgtttggcggtgtaatggcaagtatgaaaggcagaccggatgcaagactcctcacctgtcagaagcccagatcaaggcgctcttcatgcaggtcttgtctaagctccacgagcagagggagactttgatcgccgattgtgaggctttgaagggtatgctgagtgacacatccgagatagacggagaacgagcaagaattgccgccgagcaaagcgagacagagacactggccgctgcattgatccagcaaaacgcaatgaccgcaatgaaccagagcgaattcaaccgcaggtacgaagagtatgtcaagaaacatgatgccctctctgagcggttggataagcttgacgggaagcttgaaaaacggaaacaagagatagtggtgctgaatggattcatcagcgatctcaccgcgatgaaggagctccccgtggaattttccggcgagctgtggaacgctttcgttgagaaactgacgattcatccagacggcggcgccgagttcttgttccgaaatggtgctgtaatcactgaa

SEQ ID NO: 1102 - DNA, 1281 bp, unidentified
  source 1..1281: mol_type = unassigned DNA; note = Bacteriophage uvig_181332 from the Index of /pub/databases/metagenomics/genome_sets/gut_phage_database (ebi.ac.uk)
atgtatgcacgggatattagccggaaggtgagatcagctcataggatcagagggaattctggggagcccctgggccagccgccctatggatacaggaaggatcctctgaacaagaagcactggatcattgatccagaagccgctcaggttgtaagagatatctttcgcatgtgtctggagggtaaaggtaatgacaccattgcccgcattttgcaggagaatgagatactgaattgtactgcatactggcatgagaaaggcataggcagaggagggaaaaaaacccaaccaaacccctatcgatggaaaaactctacaatacggaagattctcacgcagcaggagtactgcggggacgtcattaacttcaagacctactccaagagttttaaggataaaaccaggattgacaatccagaggagaattgggttatctttaaggatgtccacgaacctatagtggaccgggacatctttgagcaggtccagaagaagatcattaagagaacaaaacgaagggctcccaagagtgaaaacggtgaaaaatccatattcagcgatcttctctactgtgccgattgtggccacaaactgtggtaccacgtcaacactatcaacaagaacatctgcttcttttcctgctctaattatgtaaaggactatcggggctcatgccccacacgccactacgtgagagcagatgccattgagcaggtggtgaaactcgagctgcagcgaatggcgcaatttctgagggacgatgagccaatgttcgccgacttgctggagcgcaaatccaacagggaaatcgcggaggagaaaaagaggctggagggcgaattgcagaaagctagaatgcggaccgaaaccgtgtctcgcctttacaagaaggccttcgagaagaacgcagaaggacttcttagcgacgagggctttctgcaaattacacatgaatatgacgtcgagcagcttgctctcaaagtgaagatccctcaacttagggagcagattgccgaagccgaacgccaggccgctaataaggataagttcatcgctgccatccggaaattcatgcaaatggacgaactgactgctccgctcttgagagaactcatcgaccatattgaagtgtacgaaacgcagggagtgggaaaaagtcgcactcagcgaattaccatacattatcggttcgttgggtacatcgacatcccagccgcacctctgacttcacactatatcagcgaaacacgacaaggcgttgcggtggagtacatccctgca

SEQ ID NO: 1103 - DNA, 1806 bp, unidentified
  source 1..1806: mol_type = unassigned DNA; note = Bacteriophage uvig_222038 from the Index of /pub/databases/metagenomics/genome_sets/gut_phage_database (ebi.ac.uk)
atgaagttcacgatttttgccgccaatgtgaccaataagtttgagagagccatgaagcgagcagccctcctcctgagatgcagcaccgatgctcaagattatgaaagacaaaaactggatctgctggacaccattaaaggaatgggttatacaacaagcgatgatctcgtatttgggcagtacattaccggcaaggacgatgttcgcaagaaagaccgagagtccgttgctgaatgcaagcaggctgtcagggaagggaaagttgacgcgattttcatcaatgaggtgtctaggcttagccgggattccatcgctggacggctgtttatcagagaattcaacgatgaatataagattcccgtctactttagggatttgggcatgtggaccatcaatcctacaacaagaattgtggaccggtctttcgagactatgctggggttctacttcgacatggctcagaacgagctcaaatccatgaaaacgcgcttcgcatccggcaaacggaagaacgcacgagaaggaaaaacaattggcggcgccgtgccatttggcttctacaaagatgaggatgggaaactgcaggtggacgaggaacaggcccaagtggtgaggttggtctataataagtacctggaggatggtggcagtataccatctgtgtgtcgatatttgttgtcctgtgggtatgataagaaattcaacaagaaattcggaacgggaagcgtccggaaccttctcagagagaggaggtatattggcgagcagcgctacaacctcgtgaatcctgacgaagcaaaaaagcaggaggtgtatatctacaaggtggacgccattatcgacacgacaatctacaataaggtgcagatcaagctggacaaaaatcggactactgagaccaaaaaggttaacaaggacaagaaaatccacctgctggctaagctcattacttgtcctatctgtggcgacagctacacatctaaaactgcctcagcaaataagagtggtgagagataccggatatggaactattgttgcgtatccaagtataatttcagtgaatgcacatccgatataaccctcaatgccgataatatagaatctataatatggcagctcacaaaacgagagattctggcgttgcaggaactgtcccttgaagagcgccagagcaaaattgatgaagccgaacaaaaactggccagctataaagacgagttggacgtcatcgcaaaaagtatcgacaagctcaatgtgaaaaagaagaagcttgtagccctgttccttgacatcgaagacgacgatactgcgattttcaatgaacagcgagaagcaatcaacaaggagatcgactcttataacaataggatccagtttctgaacaccgagattaccatatgcgagggtaacatagctaggtttaaggaagccgactttaccgatgaggtcctcgacaaaatcgagcaagaccttctcaagaagaaggagctcatcaaggaatatatcaaggttatccgcccataccgactgactaaagctcgccttatcctggaggtggagtcaaagcagaccaactactgtattctgtttgagcccagaaatagcaagcgccggtgctggtacattcaatcaagtttggctcagtggcagaacggactcctgaaaacttcaaccgctccgctcgggaactttttttacatccccatggcctctctcctgctggatgaacccgacgatcttgatgcgattgcatcattcgaggacatgaaggagatttgcagcatcaacaactacgtcatcgagtac

SEQ ID NO: 1104 - DNA, 1461 bp, unidentified
  source 1..1461: mol_type = unassigned DNA; note = Bacteriophage uvig_211114 from the Index of /pub/databases/metagenomics/genome_sets/gut_phage_database (ebi.ac.uk)
atgcaggcgatagaagctgacgacagtatcaattgtgtgtatgcctgggaaattagcagaattgctcgacggaaaaagattctgttcagcatactggagtatctcacgaaacgcaaaattcagctgaagattaacgaaccttctatcaccttgcttaacaacgacgcttctatcaatgaagcctccgagacaatttttacgctgttcgcacagattgcggagagcgagatgcggaataagaaagctcggtttcagcgcgggaaggctgctaatgccaaacaaggtcgctataacggaggactggtgaagtttgggtactgtatcgattccgatggcaattatatcataaacgaggacgaggcgtcactcataaggactatttttgatatgtacgtctaccagaaattgtctcacagccaaattctgaaggaacttaaggagaccgggaaaattgaacagaccaaacagaaacagttcattactaagatcctgaactcaattgagtacaccggcgaagccaataagtactcattcgaacggaaatatcccataatcattgataagtacgtgttcgacaagagtagagaaattgcagcacagaataagaacgaggccgataaaactaagaacctttacctgtgcaaaggcctgattttttgcaagtgtggcagtaggtacactgccaactcactgtccctccagtatatctgttacaatcggttccataagaagtgcgacttttctaatgatatcaacataaacatagccgattccatcgcatggtactgcgccaagattcaacagatgaagctgaattctgagaatgtcaagcaagtcgtacacaagtacaaggagaatatccagcttttgaatgagaagatcgatgttctccaacaaaaaattacagggctgaacggaaagagagaacggaacgccgatatgtattttaacggttccatcaaccaggagaaattcaagtcaaacgagagaataatcaatgaggaattcaacgagcatacatccaggatcaatcagcttaatgccgaaatcgctgactacaatcgcatgatagaggcaagcgaagagtctgtgaactatcggaatattgttaaagacgtcaatcagatgaacgacaacctgaagtaccagattatccacaacttcatcaaaaaaatcagcgtagaaacaatccgatccagagtgctcaaagaagttagtatcactctcaaagacgacaggatctttacctatcttgtggacgtccgaacaaagaagttgtataagaaatgcgatgactttgaattggacatgcagaagaccctcaatccaaacgtggaagtgatctatgacgattttgttcaggaggagggcttcaagttcatcgagagaattaaacttagtgaggataagctgaacaagaaaagggagatggtgcgcaaaatcaggaaagagaaaagcaag

SEQ ID NO: 1105 - DNA, 1167 bp, unidentified
  source 1..1167: mol_type = unassigned DNA; note = Bacteriophage uvig_473863 from the Index of /pub/databases/metagenomics/genome_sets/gut_phage_database (ebi.ac.uk)
atggccaacatctacgttgtgtttcaacacatcggttacaagcggcatccttctattaagaataagcttatcatcgacgagcaggttaaggacattgtcgagaaaatctttgatatgtacgcgaatggacaagggtcagtggaaatcgtgaattttctgaacacaaacaagtatctctccccaactggataccggaaaacgggcataattcaagacgaaaacaagaccaattacgactggaatgaagtgaccctgtgcaacatgctgaaaaacgaagtctacattgggaacacagttcagaacaagaagagcgtcatctcttataaggtgaaaaaaataaggacggtagagaaagagaatcagattagagtagataatacacacgaggccatcatagataaagacaccttcgagaaggtgcaatgtatcattgagaaacgaggcactaatactaagctgaagtatgattatctgctgcgggggctgctgtactgctaccattgcaaaaggaaactccagatagtgctcaaaaagaacagtaggcgcaatgctcagtcacattcttacatcatttgcgcagattataagaaaaggggatgttatcccctctccatcaattatgagaagttcgagaaacacattatctatgtcgctaagaagatctgtagtatctacgccgataaagaagtcttctactcaatatacgagaagtaccagaacaagacccttgacatcagagaaggttacagaaagaaggtggatcagatcgacaaggccatttttgacattaacaacaatcttgacaagatgtatatggataagctccagggcatcattttggaggaggattatattcgcgtgagccagaaattcatttttgaccgcactaatcttatcaaacagaaagaggagcttgagcagaaattgattggcaccgaagaaaaaatcaacacaaagtataagaccaaggaagaaaaagaactcgacgagctgatcgaaaactttttgaagcttgaaaagatcgataagatgtacctgtatcgactgataaacaagattgagatagacaaagataaaaatgcatacatcttcttcaacttcagcaaactcaattccatcaatgagaatttggacgaattcattaaagttgaggagctgataaacaag

SEQ ID NO: 1106 - DNA, 1098 bp, unidentified
  source 1..1098: mol_type = unassigned DNA; note = Bacteriophage uvig_73839 from the Index of /pub/databases/metagenomics/genome_sets/gut_phage_database (ebi.ac.uk)
atgaaagatcccgcaaataagaatcactacattccaaatgaggaaaccgctcccatagtcactaaaatatttgagaagctgcgggccggcgtcctgcctaccgatgtggggcagtggttgaacgacaataatattgccgtaccttcagaatccgtgggaaatacccatactagaactgcaaatgaggtgaaacgacaatggaatcgcaccacaattgtccggattgctagagatgagacatatctgggatatgtcataagcgagaaatcaagaaaggtcagctacaagtcaaagaagataatccaggtgccgaaagaagaacagatcaagatcaaaggtatgcatcaacccttggttgacgaagagacgtttaacatcgttcaaaaaatgatcgatagtcgaaagcacaccaggaaatacaagtatgattttcttctcaaaggccttttggagtgtgccgaatgcgggaaaaagctgtctatcttgactcagaaacagaagaacggcaatgagatacagtacctcagatgtaacacatatgctgccatgacacgcctgaagctgtgcacgccacactctaataattgcgagaagctgactaatatcgtgattgataccgtaaaagaaaggatcaagaagtatctggacgaagaaaaattctacgagctcgcgaacaacattaaggacaagaccgcctacaaacgcaatctcctgaacaatcagattaacggtttcttgaacaagatctcccagatggagaagaagattgaccttctgtatgaggacaaaatcaacgggactatcggagaagatgacttccaacggatgtacgtgaacacattgcagaagaaagaagagctgaaaaagtccattgaggagctcgagaaagaaaaagaggaagcaacgagggagatcgacctcaaaaagattgtgagcaactttacagaaatgaaggaggtgaacagggagctgctcgtgagcttgatagatcggatcactgttaccgaggacaagaagattaaaatctactatcagttctctatccttaacgaaagtagtaattcccagaagaacaacgttgtgacaatgattaccgct

SEQ ID NO: 1107 - DNA, 1734 bp, unidentified
  source 1..1734: mol_type = unassigned DNA; note = Bacteriophage uvig_154548 from the Index of /pub/databases/metagenomics/genome_sets/gut_phage_database (ebi.ac.uk)
atggcaaagtgtatcctgctggttagagtctcaaccgagagtaaaaagcaggaaattagccttagggagcaggaaaccgaattgttcgagctcgccctgagcaaaggatattgtgaagaagacataatcgccatttgcaaacaagagtctgccttgaaaaggaggtatgctacatccgacgaaaaagatgctattgaaattaaacagcagggccttcaggagatggaggatgctatcaaaaatgactcttcaattaactgtgtcttcgcttgggaaatatctcggatcagtcgacgcgagaaagtgctcttcgatgagcttgaatttctgactgacagaaaaatccaactcgtaatactcaagccctatatcgaactgctgaactccgatggctccttgaatccatccagtaagatgcaattcagcatgttcgccgcccttgctgatgccgagatgagaaataagagtgaccgcttcagacgcacaaaagagtcaagacgcaaggaggggaaatacgtaggcggttggctgcctttcggatacatggtggaaccgacaacaaaaaaaattatcattaacgaagaggaagcggccatcgtgaagtacatgtttaacgaatacctcaaaggaggtacttctatctacaaactggccaatgaactgcaagagcgggggattataagctacgataacaagcactctgcattcacctttgcatacaccattctgcggaattattcttatgcgggactccagggcactgttagacaaaaggaccgaaagccaagcactaatgtgtatcccgccatagtcactaaggaaatgattgacaaggcaattgaaatgtccgagcaggctaagacgaagcccaaaacaaacgttaaaaatatctactactgcaaaagtctgcttaagtgcgcagactgtgagcgcgtttacgtcgctcggctgaataaggcggtctaccagtgtacgaacgacaatgggaagtgcaacaacgcagagatctctattaatcttgctgacaccattctgtggaatgtagccatgacccttaagatttcacaaatgctccatcagacggaggaagacaaaacggcctatcagcttcagatcgaggtgctgaagcagaagatcgagaagatcaacattgacatcgaaaacaacaacaaggcgtattccattttgaacaagagaataattatgcagaagatctccgaggaggacggggagctgatcgagaaagagctggatagcaccaagaaggagcttgaaaagaaactcaacgagtataataacaaggtggccgagattgagcagatcttgtttaacatgaatactagcatagcctttaagcacatcaacatagatgatatagcagatatcgaggacgataacttgcggtatgaaattatccatgagatcatcgactattgcatggtggaaaaagtggcaaatagcatcattaagctcgagctgtatgctaaacatatcaatacagcatatacctactacgtgaccaccaggaatcgcaaaatctacaataaggattttaggatagaagaagcctacacatccgacaacactcacttggtcgattttaaaatcctccagcggtacaaacgacagggcaaggccaacaaggagtaccagaaacaatattaccagaaaaatcgagagaagctgattaagcagaatgtggaggctaagaggcggaggaagtcaaagcctgaa

SEQ ID NO: 1108 - DNA, 1146 bp, unidentified
  source 1..1146: mol_type = unassigned DNA; note = Bacteriophage uvig_578394 from the Index of /pub/databases/metagenomics/genome_sets/gut_phage_database (ebi.ac.uk)
atgctgtccatcttgagcggcctcgctgagtctgaaagtgtttccaacgctgaaaacaacaagtggtctattcagaggcgctttcagaacgggacatacaagatatcatatcctccctatggctacgataacgtggatggcgagatggtggtgaacgaacagcaggccgaaatagtccgctacatctttgccagcatcctctcaggaaagagtactcacaagatcgctgccgagctgaataataggaaggtccccaccaagaaaggcggacggtggaccgcaaccaccataaggggtatggtgggcaacgagaagtataccggggatgctattttccagaaaacctacacagatgtccatttcaaccggcacaacaaccgaggagagaaggatcagtatctgattaaaaaccatcatgaggcaattatttcacatgaggacttcgaggtcgcccaagatattatcgagcagcgggggaaggagaaagggttggagagacagcacaagaaatatcaaaatagatacccattctccggaagcataatctgtgggcagtgcggcggaacgtttaagcgaagaattcactcctccggccgccaccgcattgcgtggtgttgcagcattcatatcgcagatatcgaaaagtgcagtatgaaatatgtagccgagtctgactttgaatacgcttttgtgacaatgatgaacaagctgatcttcggtcacgagttcgtactgaagccactgatcacttccctccggggactggactctgacgaaactttgggcaatatccaggcgctggacaggaaactgggcgaaaatgcagaacaacggaatgttctcgtgggactgatgacaaaagggtacttggagcctgcagtgtataataagagtaataatgagcttttgcaggaggctgaaagactccgaagacaaaaggaatcaataacacgcttccttaacaatgacttccagaatcttagcgaggtgtctgccctcttgcaatacgccacgaaggccagcatcatgaaagactttgacggtgacatcttcaaaaggtttgtcgagagagttgtggtgtacagcaggactgaaatcgggtttgaactgaaatgtggtattactcttaaagagcgactggttcgg

SEQ ID NO: 1109 - DNA, 1527 bp, unidentified
  source 1..1527: mol_type = unassigned DNA; note = Bacteriophage uvig_175345 from the Index of /pub/databases/metagenomics/genome_sets/gut_phage_database (ebi.ac.uk)
atgaggagagctatcagttacattcgattctcaagtgaaaggcagctgaaaggcgacagcgttcgacggcaatccaagctggtgactgattggctggataagaaccccgagttttatctggattcctccttgtccttcaaggacttggggaaaagtgctttctctggaaagcacctcaaagggggtctgggcgattttctgactgctattgaaaagggcctggtgaaggctggagatacactccttatcgaatctttggacagactgagccgccaggacatcgacatcgccagtgaactgctgcggcgcatcttgagagccggggtggacgtcgtaactctgagcgacggcgagcactacacaaaggagtcactgaaggacccccttagcctgatcaagagtattcttatcatgcagagagctcacgaagagtctctgcgaaagtccgagcgcgtccaagcggcttggaataggaaaaaagagttgatttcagagggcataaagatttctcgccgatgtccagcgtggcttaaacttaacgacgatagacggaccttcaccatcatacctgacaaagtggaagtagtgaaacgcgcatttgatctgaggcttcagggtctcagtttctgggctattacgaggaccttgaacgatgaaggccatctgagcctcaaccagtacactcctaaacagaagggttggtcagacaccgccgtgaaaaagctcctgaggaatagagccgttatcggatgcttcacacctgccgggcgagaggaggtgcagggctattatcccgccataatctccgagtccctgttctaccgagtacagcagctcaacacgggacagtacgggagggcatcagtctcttcaaatccgctgagcgtgaacttgtttagaggaattattaagtgtagcgagtgtggcgccaccatcgtgctcgggggctacgccctgaagcgctttgggatgtataggtgcccaaataggagcgcgaacagatgcagcgcaaaagccatttctagaaagcaaacagacgccactatcctgtatatgctggcgctttgtgaccggtttgagaccgagaataccgatataatagactccttgaagttgcaacgggaggatctgcaacggaaaatttccaagatggcagaacttgcaatcgagttggacgatatgactatcataaccgagaagctccgggacatgaaaaatgctttgagcaagctcaaccatgatattgaagaggaaacaaagcggataaaagccatcacaaccggctccctgaaagatattgaccgcacgaccaaagagggaatgatagagacacagctcttgatcaaaggagtcctcaaggagatcgtgatcgatgcagcaaagcggaggtgcaaagttactttccataatggtagaatcatcgatctccccattaccgaaaatccatctgaagacgtcacagaagccattcagtctttgtcagaagtgactgaacgcggtctgatcgatgtcgacgaggttattatt

SEQ ID NO: 1110 - DNA, 1128 bp, unidentified
  source 1..1128: mol_type = unassigned DNA; note = Bacteriophage uvig_574139 from the Index of /pub/databases/metagenomics/genome_sets/gut_phage_database (ebi.ac.uk)
atgaccattaatgaggagggcgctaaggtagtgagactgatttttcacaagttcgtttacgaaggcaaaggcacacacgtgatagcccgcgaactccgcgaggaaggtatttctccaatgcgagtgaaggagtggtcaaatacagtgatcttgagagttattcggaatgaaaaatactgtggggacctggttcagaagaagacctacacccccgacttcctcagtcacgagaagaaatataatcgggggcaggaagaatttgtcatcataaaagatcaccatgagcctatcatttcacgagagctgtttgacgaagccaataggattctggacgcaaaaagtctgtcacaggaagggaaagccaaacattcaaatcgctatcccttctctggaaagatcaagtgcggctgctgtggtagctcctatgtcgccaggaacaagactcgaaaggacggtagcagatacaaggcttggagatgcaacgaagccgcgaaacacggatcaccccacatcgataaggcagggaaccaggtgggatgcaccggcctttctatcaggaacgaagatgcaacccatataatgtatcttgtgactaaaagtctgaagtacaatcgggacaagatcatcaataaccttacggcggtgatccaatccattatcgctatggacacaactggaacggacgtgttgaaactccaggagcagatcaagaagattgaggggaaaagggcgaacctgatcgacttgtacatgagtaatctgatcaacaaggatgaattcaccgccacaagggcatcttgtgatgctgaaattgaggagttgcagtccattatagagagcgtggataagcaacgcgagatgatagagcaacaacagcagctcttgaaagaaattgaggatgccatcaaggaaattgtgtctggcgtagagtacgaggacgagttttacaagcatatactcgataaaatggtcgttcaggataaggataacatcgacgtatatctgaaccttcttccaatgaaatggtcctatactgtggctaaggcctccaaaaaagccgtcgcaagcgagtggaacatcagcgaggctagcctgccgatgagcgtctctcggcctttcaactccgcc

SEQ ID NO: 1111 - DNA, 1554 bp, unidentified
  source 1..1554: mol_type = unassigned DNA; note = Bacteriophage uvig_189213 from the Index of /pub/databases/metagenomics/genome_sets/gut_phage_database (ebi.ac.uk)
atgcaggaagctatcaagaaggatgtcaagatcatacgaccgacaaaaggactctgcggggataagaaactccgcgtggcagcatactgcagagtttcaacatcttctgtggaccaggaaaactcctttatcgctcaggtgaagtactacaatgacttcctgaatagatctgagaacatggagttggtggacatctacgccgacgagggtatcactggcacctcaaccaataagcgggacgatttcaatagaatgattaaggattctagtctcggaaagatcgaccgcatttttgtaaagagtgtgtcacgatttgcccggaatagccttgagtgtattgaaaacatccgactgctgaagtcttacgggactacagtactgttcgagaacgacgctatagacacggagactatgaattcagagatgatcctctacataaaaagtgcctttgcccagagcgagtctctgtccggctccaaaagggtgagcacagccatcagaatgaagatggagaacggagaattctacaattatactgcccccttcggatacaaagctgagaataagactctcattcctattcctgaagaagcagagatcgtcatcagaatctttcgggaatacatcggtgggaaggggattgggaaaatcgtcgcggatcttaacaaggatagcgtgcccgggaaaccatgggttaaagaacgggtaagatatattctgaccaatgagaagtattgtggcgatagcctgtatcaaaagtcctatacgcccccagtgctgcctttgaggaacatttctaaccggggcgaggtccccaagtattatgtggagggcacacacgccgctataatcgacaaggaaacattccatactgtgaaacagatgtttgacaggaacatgcttatctacggcaaacggcagaagagggaaatagagaattttgccggcaggctcatctgcggcgactgtggtcgcgtatacaagaaacgcattgtcgggagccaaccaacctggatatgttccaaaaacggagtcgcgggccagcggtgcaagacccacccactcagtgaaggagcacttaaaaaatcatttgttttcatgtataatcgcctgcaacaacaccgagaactcatcattaaagaggcctaccagaagctgctggagctgcgcaaggccttctttaattccagttccgctgttctggatattgataccgaattggcggagttggcagagcagaacgccatgtatgtgcgcttccatagccagaagattatcgatgaagtcacctttatcgaacagaccggtgagattaaacagcgaattaacgagctgagatccaggaggataaaactgatgaacaataacgaggaagaacggtgtattgaacttctgcgcgaggctatgcaagagctggaggaacttccgcaggcaattctcttgtttaacttcaatatcttcgataaacttgtgaacaaagtggctgtgatgcctgacagccttgttttcgagttgagatgcggcatcaagcttagggaagagataatctggaat

SEQ ID NO: 1112 - DNA, 1503 bp, unidentified
  source 1..1503: mol_type = unassigned DNA; note = Bacteriophage uvig_296776 from the Index of /pub/databases/metagenomics/genome_sets/gut_phage_database (ebi.ac.uk)
atgcagaagcaaaatggccttgcctactcttacattcgcttttcttccaagaagcaggagcagggcgatagcgtacgcaggcagaccgaattggctgagaagtactctattgcgaataacctgacactgtccgagaagaactttcaagacctgggaatctctgcattcaaagaagggaaccggcctagtttgggtgacatgttgagtgccattgaacagggggctatcgagagcggctccaccatcatcatcgaatctctggataggctgagccgaagaggcatagatgttactcaacagatcatcaagagtattttgcagcacaacgtgtttatcgcctctctcaccgatggcctcctgctgaatagggagtccgttaatgacctcgtgtctgtgattagaattgccctcgctgccgacctggcacacaaggaatccgaaaaaaaatcacagagactgcgcgaaactaagcagcagcagagaaaagccgctttggaggggaaagttattaataagattttgccgttttggcttgcccgggaaaaagatcaattcgtgtttagcgaccgattggatgcggtcaaaagaataattgagctgaaacgaaagggactgggaactaataagatcgctaaaaccctgaacgacgaagggtttaggccactgcgcagtgccggatggaaccatactaccgtcggtaagacattgagctccgttgctctttatggcgcttaccagacatcagagacgactaaagacagaaaggtaatactgctggacattatcgacaactattaccccgcagtcatttccaaggaggactggatgctcctccaaagcgacgcaaagcagaataagcccggctataagtcagataaaaacgcattcacagggcttctgaagcatagctgcggtggagcactcgtccggaaattccacgtggtcacggggaaaacctatcagtaccacgtgtgcgccaacgccagggatggcaagtgtacagtgactcagaactttaaaaacatggaaatcgcactgtataagatcctcaagcacctgaaaatggaaaaaaagacctcagtggataccaccatagcccaagaacgggctcaactcaaagagcagattgataatttgaatgggatgctgcttacgatgaaaaaggtgcctatgagtgtgctcgaaacaataggcaatctcgaggagaagcttcaggaactggaccagcagttcaagcagcagtcagatatggtgctcgccgagcaatctgttgacttcaatctgttgagcgagatcaaggatccaatcgagcttaacatgatgctcaaacgcgtcatcaaggagatcacagtcttcaacttgaagaagtcttggaggataaaagtacagtatctcaatggacattcccaaagtttccggtgggatggttactccatgagcttcgtgagcgactcaaagaaactgctggagtacatgaatgcggagaaagagcagcttgacaac

SEQ ID NO: 1113 - DNA, 1950 bp, unidentified
  source 1..1950: mol_type = unassigned DNA; note = Bacteriophage uvig_173157 from the Index of /pub/databases/metagenomics/genome_sets/gut_phage_database (ebi.ac.uk)
atggcgaaagatgaaaataaggagagcgagatccggggtgacgagcaagaaatcgtcgatcagaggctcccagtgtggagaccgcaggacgccgatcgagaatattaccgctatgagaccaagaagcggattcaacattataccgttccaccccagacaatttttagacccgctaagccgacgcccaccatcagggatgctgaacataaaagagtggcagtctatgcacgggtctccaccaagtctaaggaacaggtctccagcatcgagaatcagacaaagtactacactgaaaagattgctaagacgcctaattgggacctggcagaaatctactctgacgagggcaagagtggaacaagtaagaaatggaggcctgagttcaaacgaatgcttgaagatgcatccaagaagaagatggacctcattgtgtgcgcttcagtgagtcggttcgcccggaatatctctgacttgatcgaggaggtccgcaaactcagaactaccaacccttccaacccggtgggcgtttacttcgaaaccgaggatctctacactctggatccaaatatcaatgaacgactccagatgcagggcttgtttgctgagtgggaatcagggaacaagagtagaaggatgattctgtcctacgatcagcgcatttgcacaggacagttccctctttccgacttgcttggtttgcgccatacaatcgaaggcggctttatcattgaagaagaggaggcaaagactgtcaagtacattttcttggctacattgtgtggatatactgctgaggaaattgccgaggtgctgaccgacaaacaacgccccaccctcagaggacgcactgagtggaccgcgagcatggtgaaggccataatggagaacgaaaggcggtggggagacctggaggtgagaaaaagggtcgtcatcgattacaaagagaaagttacagccaagaacgacgggttgagggaaggggcctacattcctcactatcatgaaggaatagtgtctcctgaaatcgctagggctgcgcacatgatgcgggccagtcgatacaagtttggatcagtacctgatgtatacgtaatcgactcaggcgccctgaaaggctttgtgagcatttccccaacgtggtccgggatcgataaccgggcattccaggacataagcaggcaagtgtacaacgaggacgagttttgtgagttgcagaggcgggccaatataatgaacggccgcacccactcaaatgttgtatccatgacactgaacgattatcgagtggcccccggggtgatgtttatgactaggtccgacccccagcttaccttctctcaacgcagcatgaaactgaacgccgtctgttgggagaagttggggcagcaaaagtatgtggagttcctgtatcaccccgtgctcgaggtgatagccgtgagatcatgcaatgccaccaatccaaacgcagtgctgtgggacgaaacaaaaaagtctggacttcagctgtgtacgtctgcattcagcaacgcggtgtatgacaaactggattggatgcggaagtataagttccggtttcgcggtgtgacacgagtacgcggcggcgagagaataatttttttcttccttgacgagccccagatcctcgttggtaaagataaaaaacacctggacgccatggataccagcgattctactgtgaagtacatcccatataaagagagtgaatgcggggaagccgcaggcttgacagccggtatagcttacccagagaactggcaggagcaggtgggggtcagctacgagattaaacagcaaagaggccgggtcctggacgctgtatcaagcgcagatatcagaaatcatgggactaaagttgttaatccctttatcggagttattcctacccacggtgagctggaagacgaactggagcagatctatgaggccatg

SEQ ID NO: 1114 - DNA, 1515 bp, unidentified
  source 1..1515: mol_type = unassigned DNA; note = Bacteriophage uvig_393561 from the Index of /pub/databases/metagenomics/genome_sets/gut_phage_database (ebi.ac.uk)
atggaactcgcttttagctatgcccgattctcaaccaaaagtcagtccacaggtacttcactcgaaaggcaactcaacgcttctaggctcttttgctccgagcgagggttgacactctcaccaaaaggataccacgatctgggcgtgtccgggttcaagcaggtgaaacggcccgaactggagcagatgcttcaagctatccagtctggtgacatccccagcggatcctatatccttattgaagcaattgacagactctcacggaagggtattagccatacccaggatgttcttaagcagattctgcagtacaaagtcaaggtagcgttcgttggcgaggatgcaaagaccctggccggacaggtcctggatgaaaattctcttaatgacctctcctccgttatcttggtggcattggcggcagatctcgcgcacaaagaatctgtgcggaagagtaaactggtgaaagcagccaagagtatcatccgcaagaaagggaccgaggggcataaggtccgcggccatacaatgttctggatcgattggtcagacaaaaaacaggatttcgtactgaatgacagggtcaaggatgtgcacaaaataattcagcttcgccgagaaggccaaggtcctcggaagatcgccaaaacgttgaatgaacttaacatccccggacctcgcggcaatccatggaaccatatgaccgtgactgtggtgctgaggagcccagtactgtatggggcctaccaaactcatcagatcatagatgggcagaaggttcctgacgtgcttctggaaaatcactaccccgccgtgatcactcaggaagagttcgttacgattcaggccgacagctccaaaagtaacaagggcaggcccagcaaagctaaccccttcagcggagtgctgcgctgtgagtgcggtcaggctatgctgtttagcaagagaaccaacctgaataaggacggagaacctttggagtatgagtaccacttttgcctcggctatgccgagggccggtgtaaaaacaacaagagaattagagatttggtcccactgctggttcagcttatggacaagctggtcatcaatcaagccccgaaaaagaacctcaatgtcgagcttatcaaacaaaaggagcagaagattgagcagctgaacaagatgctcatagagctggactctcctcctctttctgtactgaaaacaatacagaccctggaggctgagctggatattctgcttaacacgcacgtggaggagccagtacaagctgatgtgcagacactttcttccattaccgacgcacaggaatacaatcagcacctgaaacgactggtgaagaagattgtcgtgtatcaaaagaatggcccgaagaatctgcggatcaaagtttacaagactgacggacactaccagaactttctcgtcaaagacggcactgtgctttttaagagtgacacaaaagccttgaaggagttgatagacgggttcaacaaggagagaagagaaagg

SEQ ID NO: 1115 - DNA, 1578 bp, unidentified
  source 1..1578: mol_type = unassigned DNA; note = Bacteriophage uvig_296393 from the Index of /pub/databases/metagenomics/genome_sets/gut_phage_database (ebi.ac.uk)
atggcagaaaaacgaaaattggccttctacattaggttgtcagacgctgacgaggaagttaaagaggggacgaaagatgaatccaacagcattaccggccaaaggaaactgctttacgcctacatcaaaaaaaccgaggagttcgcagggttcgaagtcctggagtattttgatgacggctactccggcaccatgttcaataatcgagctgagttccagcgcctgatccaggacgccgagttgggccggtttgaatgtatcattgtaaaggactttagcaggtttggcagagactatctggaagtaggaaattatctggaattcgttttccctgctatgggtatgagattcatttcagtcaatgacaattacgactctgaccggaacttcggagtgaccggaggcatggatgtggcctataagaacctgatctatcagctgtactcaatggatctcagtaggaaggtaaagagtgcccggcgcactagaaaccttagcggtgagtatactgcgtcatttgtgtgctacggttacaagaaggaccctgacgataagcataaactgatcatcgatgaggaagcggccaaggtcgttgtggaaatattttctctcataattgcaggctataacgcttctgaggtggcccggattctcaatgagcgaaagattccgacacgcgtccagaatcagtggaagaacggaatcaattacgtccccgtgcacaacaagggggactacatgtgggacaacagcgaagtgatagctatcgtccagaatgaacaatataaaggtatcatgatacagaacaagtgcgaaacagtgggattcggggataataagaaagtcagaaaacggaataaggaggattggagcgtagtggaaggggctatccccaggattgtttccgacgagatgtttgacgaggtgaataagatgctgcgcgttgaagccagggggatcgagaaatccaccaagaaacgcaaaaaaaatctgttcatctgcccatactgtggcagaaagcttatgaacagtagcgccgtgtgcactcccaagctcctctgtccaaagagacggatggtgcgcaccggagaatgtcaacagatctttatgcttaaaagtgaggcccaggataaggtgctggagattactaaagagatctgccgcacacttatccaggaagaggagcttaagaaggcatctaaagacaagcgcaaggtcacaagtgatgaatatctgatctccgagctgaaggcagaatatgataggatttcaaactccactgtttcttgttatcagtcctaccgggaggggaagtacacgaaagaggagtatgtacagctccgaaagaccaaccaagaactgttggcagatctcgagaaccaaattagcgatttgcaagagaaggtggctaatcaggaacctgatgcggaagagaagattgagcagcttacacagtactctatgctggagcagtacgatggcgatgtgctgagcaatataattgacaaagtcctcatctacaacgacaaagacatagaagtggtttttaaaggagagaactttatcagaaacgccgtg

SEQ ID NO: 1116 - DNA, 1575 bp, unidentified
  source 1..1575: mol_type = unassigned DNA; note = Bacteriophage uvig_123245 from the Index of /pub/databases/metagenomics/genome_sets/gut_phage_database (ebi.ac.uk)
atgactaaccatcgcaagactgccgtgtatattcgactctccgcggaggacgataacgtagacggcagagcgaaaaaggaaagcgactctgtcacctcacagcgaattcttctcaagagctttgtcattgaccaactgggggtcgatgaggccgatattctggaatatgtcgatgacggtgtgagtggtactcatttcaagcggcagggctttcagcagctgcaggacgacatgaaatctggtgagatcgggtgcgtggtcgtgaaggattttagtagatttgggcgggattatcttgaagtggggttctacatcgaatatattttccccttgctgcagatcaggttcatatctattaacgactcatacgattctgctgcctctagcggcatgaccggaggaatgaacgttgccctgcaaaatctggtgtataatatgtacagcctcgatttgtctaagaagatttccagtgccatgcagactaggacaaagaatggcacaagactgcctgtgaacgctcggtacggatacaagaaggggaaggatgggaggctggaggtagaccccgaggctgctaaagtggtgaagatgatcttccagatggctgccgaaggcacgagttttgcagacattacccgggaactgaataggcaagccatagccacctgtgatgagcagaagcttagtcgcggcgatcaagtgcagtttcagcggtttgataccatcaaaaaaaagcactggagcccaactacagtgtccgcaatcgtcagggacgagatctacatcgggacaaggatttggggcaaaacaagatgttcaatgcacacgggacataaagcagttttgaatgatgagaccgagtgggttcgcctggaaaaccaccatacagccattatcgatagagaactcttcgagaaagccaatgaaatgcacccgaagaagaagaggtctgttgccgaatccaggaccaatttcaccctcgagagaaggaaaaagcagcctgcgctgctgatatgtgcaaattgcggacattccttgctcaaagaaacagagcacctgttgaagtgttcagatgcacggaccaacggagaccccgtgtgccgcagcttggttataagacgcgagccaatggaggagaacatccttggtcttgtacgacagtacgctgctagtatgctcaaaaaaggaaagaaagtgtcctctaaacgccaatgcgaatataaagagatcaataccacggagctgcagaagcagtcacgacagctcacttccgagaagatgaaactgtacgacgactataaagacggccggattgatcgcgatagctacaaacaaagagctgaaaagatctccgtacaattggacgaaatcaagcggaagatcgaggacgcaaaaaacagcaagaaactgttggaacagaacgagctctccgacaagattaaacttaaggactttctgggcatccagaaattcgacactgagaagcttcgagaagttataaaggtcatcagagtgcactcacaggatgaaatagagatcgagtggaacttcgacgacattttcagcgagcagcgc

SEQ ID NO: 1117 - DNA, 1347 bp, unidentified
  source 1..1347: mol_type = unassigned DNA; note = Bacteriophage uvig_58220 from the Index of /pub/databases/metagenomics/genome_sets/gut_phage_database (ebi.ac.uk)
atgaatacggcttttttgttgttcgctctgcacctgcctgaaagacgcatgttcaatgaatggtatgcaagggacatatccaaaaagcgaaggattagtaacaagataaagggaaacgccggggagccaatgggacccccaccttacggctatattaaagatccagacaacccgaaacactggattgtcgatgaggaggccgctctcgtggtacgacgcatctacaatttgatcctcgaggggtatgggacagagcaaatagcaagcatgtttgaatcagaggggatacttaccccacgagcatattggttgaaaaaaggcatcaggaaacccggtaaggaaacccagcagcccagtactaagtggaacccttcaactatcgtcaatattctgtctctccaagagtactgcggagacgtactgaacttcaaaacgtatagcaagagttacaagaataagaagcggatcccaaacgatagagaaaactgggccatatttgagaacgtgcatgagcccgtggtggacagagcggtttgggaacaggtgcaggagaagcggggcaagattaggaggagaaagcctaaagatggtgagcgaaatatgttctgtggactgctggtgtgcgcagactgtggccacaacctcaactaccacttcaaccagggcaatcatgacatcaagtacttcaactgctccaactataactccggaagggggagctgcaccagcacccactatattcgggttgactttcttgaacaggttgtgctgggcgagatccggcggctcaccaagtatgccgtcaggtacgaagatgaatttcagcaggctattatgggctctactcagaaggccgtcgagctggaacggaaactgaaacaaaaggagctcgctgcagcacaggcccgggacggcgaactggacggtctgttcgagcgcatctacgaggataacattagcgggaaacttagtgatgagcgctttacaaagatgtcacagagatacgaagaagagcaagccgaactgtccgagaaaatcaaggccttgagaaaagagcttgacaagctctctggtgatgctgtgtcaacagatatgtttctgaccacagtccgaaagtataccagagctaaaaaactgactccccgcatgctcaatgaacttgtcaatcatattgaggtgcatcaggcggagaaaatcaatggagagtgggtgcaaaagctcacaatctactacaattgtgtgggagccctcttcatccctgatacaccgtccatgccagttcctgacgtcactgtgaatacccgccgaggcgtatatgtttcttacgaacccgcccagaatgggcag

SEQ ID NO: 1118 - DNA, 1596 bp, unidentified
  source 1..1596: mol_type = unassigned DNA; note = Bacteriophage uvig_448547 from the Index of /pub/databases/metagenomics/genome_sets/gut_phage_database (ebi.ac.uk)
atgaccgaaaacaataatcgagtatgctgtttgtacagggtctccacagacaagcaggtcgattttaactccaaccacgaggctgaccttcccatgcagcgcaaagcctgtcataagttcgccgaagccaagggaagggtgatcgttcacgaagaaagggaggaaggcgtgtcaggtcacaaggtccgagcagctactcgcgacaaactccagatcattaaagactacgcacggaaagggaagtttgacatcctcctggtgtttatgtttgatagaataggaagaatagccgacgaaactcccttcgttgtggaatggttcgtcagaaacggcattcgagtttggtctacccaagagggggagcagcgctttgacaatcatacagataagttgctcaattatattcgattctggcaggccgatggggaatcagagaaaacctctgtccgcacccggaccagcctgaggcagcttgtcgaggaaggacattttaaaggaggaaatgctccttatggatatgatctggtgaggtccggcagaatcaacaagagaaaacacgagctctatgagctgcatattaacgagcaggaggccgctgtggtaagaattgtgttcgacaagtacgtatacgaaggctacggcccccagcatattgccacttatctgaacaatagcgggtatcgggcccgatctggtaagtgctggcaccccagctccatcagaggtatggtgcagaacctgacctacacaggggtgttgagatgtggtgatgctaggtctgagctcatgccagaccttcaaatcgtgcctcaggagcagttcgaaaatgcacagcggatccgaaacgaacggagtgtcaggtccaccgcagaagccgagaatcgcctgccgctgaacattcacggtaagagtttgctggctggcaatgcctactgcggccactgcggggctaaacttgagctcacttccagccggaagtggaggaagatggcggatggaagcctggatgataccctgaggatccgctacacatgttacggcaaacttcggaaacagactaattgcactggccaaacgggctacactgttcatatcctcgacgagatcatcgataaagcggttcgacaaatattttccaagatgcgcggaatcccaaaagagcagattgtgacgaaaagatacgaaaaggaaaatacggagcgcaagaaccacttgcaggacctgcagacccagagagacaaggcggaaaaagacttgctcagtctgaaggccgagatactggcctgtattaagggcgaatcagttctccctcgggagaccctggcagagatgattacagagcaagaggagaaattgaaggagttggaagatctgtgcgaaagcgcaagtgaagagctcgagcggacagctgagcttatggacaaggtatctaggttgtatgacgagctgatttcatatgccgatctgtacgattctgcttcattcgaggcaaagaaaatgatagtgaatcagcttatccgccgggtggatgtgtaccgagggtatcaaatcaacatcagcttcaacttcgacctgacaccatatatcgagggggaa

SEQ ID NO: 1119 - DNA, 1584 bp, unidentified
  source 1..1584: mol_type = unassigned DNA; note = Bacteriophage uvig_400458 from the Index of /pub/databases/metagenomics/genome_sets/gut_phage_database (ebi.ac.uk)
atgccagataaggtgctggccttctacattcggctcagcagtgaggacagggaccttaagaccaacgcgcttaagaatgaatcaaattccgtattcaatcagcgcagactgttgcaagactattacgatacacacgaatcactgcacgggtacgaagtgatcgtgttctgcgacgacggcgtcactgggactcactttgaccgaccaaagttcgatgaacttatcgaaatggctaggaaccaggagatacactgcatcatggtgaaagatctgagtcggttcggccgcaactttctcgaaatggggaattatcttgagctgattctgccactgtacggtgttcgctttatctctatcaatgatgccttcgactccgatgactacctgggagtcactggcggccttgaacttgcattgcggaacctcatcaacaacatgtatagtcgcgacctgtcaacaaaggtccgatccgcatatagaactaggaacctccggggcgagtattggggaggttccggattctatggatatcaggtgcatccacataataagaaacggctcattgtggatgagcaggtgcgggacattatcgttatgatcttcgaatcttgcgtggctggcatgacgaccagcgagatcgcccagatgctgaacgatatggggctgccgtctccccttgagcataagcgaaggaacggtggcttttacaatggcgtggtcaaagaggaaacaggcatttggttgaagggggcggtgagaaaaatcctgacggacgagaggtacaccgggaaaatgataacaaatactagggagacagaagaagttggaaaacctaagatgcggtccctgcccagggatcaatggataattgtacctggaacccacgaagctatcattagcgaggaaatgtttcgagcagcacagaatgccctgcaagagcggatacgcaatgtgaacaagaacactgccgggaacagagcaaataaccttttcgtttgtggttgttgtggcaggaagttgcgcaaaaacccggccaaagagcctcacttggtctgccccaagaacgacagcatcaagggagctgagtgtgccggaatctttgtgaatcaggcacaaattgaacaggctgttctccagatgttgagagagcagtctagaagtttccttgaacagcattgtctgatgcaagcgtgcatcgataagaagctcagctccattcagacagagttggacgccaataccaatatgacgcgcagactccagtcaagaaaggccgaattgtacgagcagtaccgagcaggacgcatcagtcgagagaaattcgccgacattcaaaaaacagatagcgaaaagctcgcccggctctcttcacgagctgaggaaatcgagagactgctggtcgagcagtacgagtccaggggcaatctggctgctggcaaaaggaccgccgatcagataattcttctgaaagattatgaccccgagatcattcgaaactttgtagagcgcgtacgggtctacccttctggtgagatagagattgacatgagaacctctagcgggtttgcttttgtgaccgccagc

SEQ ID NO: 1120 - DNA, 1566 bp, unidentified
  source 1..1566: mol_type = unassigned DNA; note = Bacteriophage uvig_172639 from the Index of /pub/databases/metagenomics/genome_sets/gut_phage_database (ebi.ac.uk)
atgtatcagctgccgagtagcatccgcccggaaaacacactgatctacctcagaaaatctaggacagatgaccccatgctttcagtcgaggacgtcctgtctaagcatgagcagttgttggatgagtggtcaatgcggacgttcggagccctggttcccgcggcgaatagatttcgagaggttgtgagtggcgagactatatcagcacgcccacaggtgcaaaaggtgctgagatccatagagagccctgcttatagcgctatcctgacagtcgagcctcagcgactgtccaggggcgacctggaagatgctggctacctcatcaaggttctccgctacacaaacacacttgttattactcctgtcttcacatacgacctcgcagatgaacgcgacagagacctctttcaaagggagttgcagcgggggaacgaattcctggaataccagaaaagaattatgaaccgaggtcggctccttgccgtagagaatggttgcttcatcggccagatcgccccatatggttacaagaaggcgacggtacggattgggaagagactctgtcacaccctgactccagacccagatgaggcaccagtggtcaggctgatcttcgacttgtatctgcagggcatgggcgggggcaaaatcgctaattacctggaatcccacggaatacccgccccctctgggcaagatcattggtgtactagctactttcggagtatgctgaccaatgaacactatataggaaaagtgaggtggaaccggcgcaagactcagaccacaatcagggatggtcaactggtgcaaagcaggccgtgggctactgagtaccttttgtgcgacggacttcatccatccattgtggaccctgatgtttttcaggccgcacagcagagaagggggaagaataatagggcccgaaaagacgtcaccttcgcgaatccttttgctggactcatctattgccaatgcggatacagtatggtgcgccagaactataaaggcgccgaaccacgcctggtgtgttccgatcaaaggagatgtcacaccgcctcatgtcggatgatggatatcatccctcccattgctcgcgccctggatagagccatttctgactttgagattagaatagccgcaggcgaggaagggaccgtagatgcccatcaggcggccgtgagcgtccttgaaaaaaggtgtgaggatctgcgggcaaccgaattgagacagtgggagatgctgtccagtggaaagatgccccaggagattttcgaccgactcaacgagaaggtgctttccgatcgggctcaagcagagcaggctcttgctgatgcccaggaaaatgcacctattgtgatggacctcccagccaggcttagcaccttccgggcagctctggacatgctgttgacccccgacgcacccgcccaggaactgaacgatcttctgaggtcatgcatccgacgggcaacctattctcgccagaaagcccctacgcgccgcgggtgcgccagaggccacgcttctcccactcctatccacctcgacattgacatgctcgtg

SEQ ID NO: 1121 - DNA, 1644 bp, unidentified
  source 1..1644: mol_type = unassigned DNA; note = Bacteriophage uvig_189626 from the Index of /pub/databases/metagenomics/genome_sets/gut_phage_database (ebi.ac.uk)
atgtataaggagtaccccaagttttactattatgagtccttggagtacggcaggaagtcccgcatggacgaccccctcctgtccgtcgaggagacacttcagaggcactcagaaataatcgatgagtatgcgagaaaatacctgggcggatctattccggaggagaaccgctacatggaggtcgggtctggcgaatctctgaaagatcgacctgagatcacacgactgcttaaagctatcgagaacccggccatcaaagcaatcattgtggtcgatgtgcaaagactttcccgcggagatctggaggacgccggaaagcttattagactccttcgctacacaaatacgtgtgtgatcactcctcataagatctatgacctgcgagatgaatatgacagggacgccttcgagagagaattgaagaggggcaacgagtacctggagtactttaagaaaattcaggcccgggggagactggcaagtgttaaagcaggaaattatgtagggtcagtggcaccctacggctatgatagagttgaacgatatgatgaagtcctcaagaaaaactactttacactggtggaaaggaaggaccaagctgatgtagtgcggatgatctttaattggtactgcaacgacgacattggtgtgacgaccatatgcagaagacttgaggaactgggggtgaaaaccaaaactggatgtagcacttggaagccatccattatcttcggtatccttgagaacgtacactatatcggctgcgtccggtggaattggcgcaagaccattaaggttatagaaaaccaagagataaagaagctgaggccaaaagccaaggtcgatgagtacctgatcttcgaagggaaacacgatggtattatatcagaggaactcttctacaaagctagagccattaaggggaaaaggcatcggacaaaacagaacctcagcctcaagaaccctttttctggcatcatgttctgcaccaagtgcggtagtaagattggatataatacttacaaccggaatggagtggaatttgctcctcccaaactggtgtgcaataaccaggtgcattgtaaaactgggagcgttgattataatgaagtgctcgattacatgtgtaaagtgctccgcgactgtattgaagacttcaaggttaggattgagaatgatcaagacgatagtctgaaactgcacaaggacttgatagaacgactcacaaaacagttgaaagacgctgaacagaaggaacaggaccagtgggaggctcaatatgatccagatcccaataagcggttgccccagcacatattcgaaaagttgaacaagaaagtcctcgccgagaaagaggagatcaataaggctcttgacaaagcgaagggcagcgcaccaaagcacatcgattacaaagacgaactgatcaagaccaccgaagcattgaaagccctggaagacgccgacctcgatgccaagattaccaaccagtacctgaagagcatcatcgaccggattgagtacgaccgcccacagatcgtgcggatcaacaagaagaatgcggagattttcgagactgacgtaaggaagggcctgcagtatcatgtggccccttataccattcgcgttaaactgaagtgtgag

SEQ ID NO: 1122 - DNA, 1554 bp, unidentified
  source 1..1554: mol_type = unassigned DNA; note = Bacteriophage uvig_170915 from the Index of /pub/databases/metagenomics/genome_sets/gut_phage_database (ebi.ac.uk)
atggattctattatgaattctgccgaccgacgaacttgggcctgctgcgcatacctcagaaagtcacgcgaggatgaagagcgggaacgaatgggaaagggggaaacccttgctaggcaccggcgcatcatcgagagtctggcgatggaaaacggccacgagatccgggagtggtatcccgaggttgtgtcaggagagactattgctgcccggcacgagataaaaagattgctcgtggatcttgctgacgggaagtgggacgctgtatacgtagtggaagcctccaggctgggccgcgggggcggaagtgaccaggagaaaataatcaatgccttccggtataccgacaccgcactgataacggagatgaaagtgtatgaccctcacaacagaggcgatatgcggcagctgaagtccgagctgaggtcatctgaagacgaactcgacgcaatttccacaagactgaaacggggtaagtatcaagccgccaaggaaggagtgtggcaggccaccggcaaggagcccttcgggtggcgatccatcagggtgaacggaatgtggacactggagccatcagaacggcacggtgtgctgatgcatatctatgacctgctggaagccggagagaattactgttctatagcaagaatcctgaacgaagagggcgagccaaccccgcgcggcggcgagcattggagacaccagacagtcaaggcgattgcagagaatcctgtcaattgcgggatgaacagatacggagccagggtgatggttagagagtttgacaaggaaacctttgagggccgcaaaatgaagaagaacaacgctaacccacagttgactagaggcctctggttcgggaatgggactttgagcattgagaggtttgaacgactggtcggaaaaagtgtcgcctctgccagactgcataaggatcgagagttgaagaaccccctggctggtctgttgaggtgtgctgaatgcggctacgccatgcaaatgcacatgatgagctccggcaaaagtaaagcttatttctttcaacatgcgaaaaaggatgcaggtaggctgcgcagctgcaagggttgtcggggagcccgagccgatcaggttatggcaatggtcgccgaagcactgcgcaaagcagctgacgacgttgagattgaactcgccaagcctacaaatgatagctttgaagcacagaggaaagctcttgaagctagcttgaagaaggaaaagctcgccaggaaacgcgcttccgatgcctacgaggcaggggtgtatgatttggctgaaagcaaacagcgacggcagaagattgataatcgcatcgaggcgcttgagactaagcttgctaaggccaaaccaaaacgctacgacaggcaaacagtggtgacgctcagagagtgtatcgacatgttggaggatgatgaggttccggtcaaagcaaaaaacgacttcttgaagcaggtcgtagagcggatcgaatacagcaacgacaccgcgccctacgtgcttcctaataagccccatctcgaaattttcctcaaaggg

SEQ ID NO: 1123 - DNA, 1176 bp, unidentified
  source 1..1176: mol_type = unassigned DNA; note = Bacteriophage uvig_195109 from the Index of /pub/databases/metagenomics/genome_sets/gut_phage_database (ebi.ac.uk)
atggcacaagcggagtcagagtcattgtcaggcaatgtgaagtggggtcaccggaaaaactttaaagacggcaaagtgtactaccattgcaagaatttcctcgggtataggtggggagcggatggccaacctgagattgatcctgaacaggcagcggtggtccggcgcatctttagtcggttcctgctgggccatagtgtcaggcagattaccacagacctgatggcggatgggatcaagacagcaacaggcaagaccgtctggcacgattctgtcatccagaagatgctgtgcaacgagaaatatatcggtgatgccctcctccaaaaaacctatattgctgaccttttcacgcgggagaaaagaatcaacaacggcgagctgcccaagtactatgttcacgactgccatccagctatcatcgaccgggaaacttttcagaaggtgcaagaggaactcgcccgcagatcatccctcaaaaagacctccagcaaagctaagacccagcttggaaagtattgtggcaagtacgtactgtctgaactcctggtatgcggggaatgtgggtctccataccggcgagttatttggacacagaaaggggttaagagagtggtatggaggtgccagaatcgccttgaacatggccgcaaaatatgtaagcacagccccaccctggatgaaggagacattcacgatgctgtgattagcgcaatgaatgaattgttccagacgcaggctgcccgcaacgccgtgaaggcctccattagcgccgttctggcaggagaagaacaaacactgtctcttccggccgtggagctccagataaggaatcttcaagagaggcagttggagctcttccagctgatcgtgtccgccggggctgattgtactgattacgacgaggagttgcgacaggtgaacatggctaaaaccaagcttatggcaaagaaagccgagctcgaaaaggagcaaaggggtgccgccgcattcgaggaacgactggctgaacttgacgccgagttggagcagtcctgcggagcactgactgactttgacgagttgactgtgagacagctcgtcagcaatatcaaagtcctggacaaggacagtctgctgatctgttttaaagatggaactgagataacccaggccatgcagagaagacagacagct

SEQ ID NO: 1124 - DNA, 1542 bp, unidentified
  source 1..1542: mol_type = unassigned DNA; note = Bacteriophage uvig_597743 from the Index of /pub/databases/metagenomics/genome_sets/gut_phage_database (ebi.ac.uk)
atgcggaacgagtataatccgattattatcaagtacgtcgctgaatacctgagaaagtctcgcggggagacaactgaggatctgattaagcacaagaccatactggaggaactgtgtaagagtcgggggtgggtatatgtggtatacgaagaagtggaaaccggagaatcactcttcgctaggcctgtgatgcagcagctgcttagagacgttgaggacaatatctacgatgctgtagtgtgtgtcgaccttgatagactgggcaggggcgacctggtggattggggacaaattaaacgcgtgttccagaagaccaacacttacatggtcactccgagctcactgtacaatttgaacgatgataacgaagagtttgccgtcgacctgcagacattgtttgcccgaagagagtataagaaaatcacccaccgcctgtccatgggcaaaaaggtgggagcaaaactgggcgcctggacaaatggtacgcccccaatgccctatgagtatcaggaatggattgaccctgaaacgaatacacggtattacaacgagaaggggctggtcgttaaccttcagaagctgagcatctaccgattcatggtggactcctttatcaaggacaaaaaaagcaccaacgagatagcatgggaactcaataggaggtctattcccagtccacggggcggcaggtggtgtaatatgactgttcgaagactcctcgtcgatgaaacacacctcgggaagataattagcaacaagacaaaaggcgatggacataaaaataagagtcccaataagcaaccattccaaaaaattccaaaggaacagtggaccgtggttgagaacaggcatgaggccatcaaaacccaagatgagcacgaaaaaatcctcataggtattcaacggaacctgaaaagtccttaccgaagatccgatcattattatcctctcaaagggctgatcaagtgtggattgtgcggctatggacttcccctcgaatacaaacgcggtaaggacctgatcgttaagaaatgctggcataaggactacctggggaataagtgccctaactcatctgggaaagcacaatacattatcgacgcgatcgacgagcagctgaaagagtacgaagaacagatcaagaaggaaattgagtcttgcgaagaccagagcactaatctcatccagttgcagatcaaaaccatcatggacaagcttaataagaaagacatagcgttgaagcgagcaaggattgcctacgatgagggtgtggatacactggacgaatatcggtttgccaaagagcggattctcaaagaggtggacgagcttgaaaaccagctctctgtcgagaacctgaaacttcagaaagctcagtccatcacgaatcacgagaagttgcactatatcgaggagttcagacgctcacgctgggaggatgagctcgatgacaaggagttgaacgacctctacaagactatcataagctccattatatggaccaagcagggcgataacattgatatcaaggtgaattttctt

SEQ ID NO: 1125 - DNA, 1602 bp, unidentified
  source 1..1602: mol_type = unassigned DNA; note = Bacteriophage uvig_595313 from the Index of /pub/databases/metagenomics/genome_sets/gut_phage_database (ebi.ac.uk)
atggaaaatttgttcactactaataatttgttcgcccagcctagcggacctacggccaaagaagcggtgatttttgcccgggtgagctcacgggagcagtcccgcggccagtcaaccactgcccaggtcatgaactgtcagaagtactgcgacttgaatagcatcaaggtcatcaaaatcttcaatatcaccgagtcctcaacccgaggcgagaggaggagattcaaggagatgctcgagttcgtaaagagcagaaagacgaagacacttataatcgccgattgcgtggacaggatacaaagatcctttaaagaatccgttgaactgaaagaactggctgaaaagtctgtgctcgaaattcactttcttcgagagaacctcacaatcactgaccactcaacatctgaggaacaactgaggtggaatatgtctgtgatggctgcacaatcctacgttgactgcctgcgagataatgtgaaccgctctatgcagattaactggagcaacggcatctggcagtctttcgcaccccttgggtatttgaatgtggaagacgaaaagggcaacaacacaataatccaggatacggtgcgggctccgctggttagaaaaatgtttgaagaatttgccacaggacagtatagcgtgaaaactatagcaaagtgggcgcatgacaacgggctcaccatgagaaaaacccctaacaagcccgagcgggatatcccaaattctactattcacacgatgcttcaaaacccattttactatggatatatgatcgtcaaggggattcggattcaacacatctacaccccgatcattgatgaaattctgttcgagcgagtccaagacattctgcatggtaggtgtaggcttcctgccaaaagtgtgtacggcgaaaagcaatttctgttccgaggtctcgtgaagtgcgctcactgcggacacactatgacacccgaaaagcatcgcaagccaaatggaaaggagtacagttacctgagatgtagtcatctccacaacggctgtagtcagaagcccattagggaggatgtcctgctgtctcagctggaacatgagctcaccgtcgaatgcaagctgtccgagaaagctcttaactgtattcgcaattttgtccagaatagccttgagaaagagaaccagtgtaaaataggggcagagaagtacatccttaaacgcatcaccgagctgaaggctaggaagcagcggctgacaacagcctgggcggacggcgacatcgataaggaaagttatgaggaggcaaaaaaaagcaccgagaaagagatccaggagcaggagaacatctacaacatgtatctcgaaacagggaccaatatattggagaccgttgataacgtagagaaaattttcaaggaccccctcttctttctgaaaagtagtcagattgaggttcggtcagcctttctgcggcttatctttactaactgctatgtagacggtcagaaagccagattctcattgaagaagtccctgagcctcttcgtgaaaaatcgggatctctccatttggcagccacactccgattctaatcgcgacagccgcttggagagagctgtgtca

SEQ ID NO: 1126 - DNA, 1404 bp, unidentified
  source 1..1404: mol_type = unassigned DNA; note = Bacteriophage uvig_244256 from the Index of /pub/databases/metagenomics/genome_sets/gut_phage_database (ebi.ac.uk)
atggcttccaactttttcgcgccccaacccgaactgttcggcagacgcgtggtgaagtatatcagatgtagctctgaaggtcaggtgctgcacggggagaccctggagacacagaatatgctgctcgacgacttcatccgggtgaatagactggtgctggtcgacacctttgttgacgaagccttgacggctcgaaaacgctacacaaagcgcaaggaattcgttcgcctgctggatggagtgcaggctcataattttgatctgatcttgttcacaaaactggacagatggttcaggaacatcggtgattatcaccagatccaggcaatacttgaggagaatggagtccaatggaaagccatcctcgagagctatgacaccacgacctctaacggtaggcttcacattaatatacggatgagcgtagcccaggacgagtgcgatagatgctccgagagaatcaaagacgtgtttgcatataaactgcgcaataagactttcgtagcgggcaaggttccccgggggcttatgctggatgaagagaagcatattgtgcacgatcctgagtggaaacagtgggcacttgatctcttcgacagcattgaggccaccggaagtgtgtatagtgccagagcccttatggcagagaagtacggctttagcttgactgaacaggggttcgtgcgagcaagcaaaaacagactttacaaagggcagtatagggatgacccagaattttgcgaaccattgattgacccggagcgattcgacaggatccaggacctgatcgcaaggaataagcggtttggcaaaaccaagtattcctactcctttagtgggcttctgatttgttcttcatgccggcataagctcgtcggcgctacatactctaccaagaacctcgatggaactgtcaggcaatacacttgttacagatgcaacgtgcatacttcacagccctctctcaacctgtgtgaccggagtcacgctattcgagaagaacgggtggaagaatacctgcttgagcacatacgcccagcgctctccgagtatctcagcagttacaacgtttccgcccaggagtctaagcggaacacccatcaagccgacgctgctaagattaggaggaagatagagaagctctatgacctgtttatggatgatttgatcgagaaagaagaataccgcgaaaagtacgaggatctgcaaaagcagctgaaagagtgtcagattgcacctgtgccagctcctgcccctaatctgggccagttgcaggaccttctctcacaagactgggaggccgtttatgccacattttcaaaaccggaaaagaacgccttctggaaatcatttgtccacagcgtcgtagtctacgatgatgagcacatggatatctccttcctt

SEQ ID NO: 1127 - DNA, 1359 bp, unidentified
  source 1..1359: mol_type = unassigned DNA; note = Bacteriophage uvig_555240 from the Index of /pub/databases/metagenomics/genome_sets/gut_phage_database (ebi.ac.uk)
atgagaaaaatcaccaaacttgagaccaagaacattgagctgccgaagctgaaacgagtagccgcatatgccagggtgagcgtagagaggggacgcacgctccattcttattcagcgcaggtgtcatactacaacgaacttattcagaagaatcccgaatgggagtttgccggcgtatacagtgatctggggatttctgggaccggcatcgaaaagcgaaatgatttcaagaggctgttgcaggattgcgaagagggaaagatagacatcattctgaccaagagtatctccagattcgcccgaaacactgtggacctcctgaatgttgtgagacacctgaaagagctgggaatagaggtccggtttgaaaaagaaggtatcagctctctcacgggagatggcgagttgatgctcagcatacttgcatcctttgcccaggaggaggtgatcagtacatcaaacaacatcaagtgggctattaaaaagaagtttgaaagcggcaagccccagtgtcggtacaagatctatgggtatcggtgggacggggacaacttggttatagagcccgaggaggccaaaatcgtgaaactgatcttccaaatgtacttgaacaaggtcagcgctgaaaggatggaaatcgaattgaaggagatgggcgttatcgcaactaacgggggctatttcaatatcggaaccattcgcgatatgctgctcaatatcacttatacagggaatctcctcctccaaaaaagctacaccccaaacccacttgtgaggagaaaagtgaagaataacggtgagctgccaaagtactacgtcgagaataatcacgaggccattattcctatggagatgttcatccaggtgcaggaggaacgcaagaggcgcaaggcagaaggtcaacgcgccaactttggcaaaaatattacttgtttttcttgccgagtgaagtgtcctatttgcggcaaaaattacatgcggaacagtagatccaagaactccgacggtattaaggcccatatttgggcttgtggaacacgccttacaggaggttcaaaagcttgccctgggaaaaccatcaatgaaatcgcactcaagagagtctctgcgaaagttctggggctggatgaatttgactcaaacgctttcgatgagcagatcaagaaggtcatcgtgataggcgacgaccttctggagttccacttcaacgacggaaaaataatttctgagaaatgggaatacaacgctcggaaagaatattggacggaagaaaaacggagagagaggggcgagaaactgaagaaatcctggcggatgaagaatgacaagaagtccaataatgatacaagcattactaaa

SEQ ID NO: 1128 - DNA, 1317 bp, unidentified
  source 1..1317: mol_type = unassigned DNA; note = Bacteriophage uvig_336926 from the Index of /pub/databases/metagenomics/genome_sets/gut_phage_database (ebi.ac.uk)
atggtggccgacgccctcgctgggaagatcgacctgatcgttacaaaaagtatcagtagatttgctcgcaacacagtggactccctggtgacagttagaaagttgaaagagcatggaaccgaagtgtacttcgaaaaagaaaatatcttcacttttgattctaagggcgagctgctcatcaccataatgtcctcactcgcacaggaagagagcaggagcatttctgaaaatgtgacctggggccagcggaagagattcgcagatggtaaagtgtcactgccttataagcagttcctgggataccggaggggtgaagacgatctgccggagatcgttcctgaggaggctgaaatcgtgagaaaaatctacgggctgtttatccagggcaagaccacacatggcatcgcaaaacagcttacggaggagaacataccaaccagtgcaggtaaggaaaaatggcaggcctccacagtggaatccatacttacgaatgagaaatataagggagatgccttgttgcagaagggcttcacagtggactttctcaccaagaagacgaagaagaacgaaggtgaagtccctcaatattacgtcgagaactctcacccagccattattaggccccacgaatggcaactggtccaaagggaattctcaagacgaaaaacattgaggaggaagtattctggcaatagcatttttagcactcgcctggtatgcggcgattgtggaaattactatggccccaaaacttggcaccccaaaaagccttaccaaaagatcgtttggcagtgcacccacaagtacaaaggagagaactcatgtgaaactgtaaccctcgaggagactgagattcagcagaagttcatccaggcgatcaatggcttgttcagtatcaaaggtccagtgttggagaattgtagaataatgcaggaggccctgactgattgcacagggattgaaactgagctggctactcttactcaggagttggagttgctgggacagatgatcaaggataccattaaaacaaacgcgttggaggctcaaaaccaggaggagtacacagcccgctataatgcccttgccgaacgatatgaaaccacccatcggcaaattgtcgctctccaggagaagcgccaggctcgggaaaacgaagcggaggcaattgggggctttatgtttgccctccgcgaaatgggaaccgaggcacaggagttcgaccccaaactgtggctgagcaccatagaccgagggaccgtcaaccgggacgggagcattacgcttcggtttgtgtccggggccgagattacagta

SEQ ID NO: 1129 - DNA, 1629 bp, unidentified
  source 1..1629: mol_type = unassigned DNA; note = Bacteriophage uvig_239031 from the Index of /pub/databases/metagenomics/genome_sets/gut_phage_database (ebi.ac.uk)
atgatgatagccaagtacatcagactttctagtgccgatgaagacgcccgctacggggacaaacccgaatccaactcagtgactcatcagcgcatgcttctgaatcggtaccttgaaacccacccagagttcgaggaatatcaggttctggagttccaagacgatggcagaagtggaactaacttcgaacggccggggattaaagctatgctggaaatggtcaggagacgggagatcgattgtgttattgtgaaggacttctctaggttcgggcgaaactacgtcgaggtgggcaattaccttgagcaagtatttccatttttgggagtgcgctttatcagcgtgaacgacggatatgactctaaagattacccctatggcgtcgcaggagatatcaataacggcctgagaaatcttataaacgaactgtacagccgcgaccttagccaaaaggttaaggacagttacaggcagtacacgaagcgcgggcagtgcgtcagtgcctaccctatctacggttatgtaaaaagtcccgctgatcggagattgcttattccggatcctgaagcagcagatatagtgcgccgaatttttgagagatgcaatgctggcgagggtcctacccagatcgcctccggtctgaatagagacggggtgccaacaccctcacagcggaagcgggatttgggatctaagcgccagctctggaatagcgcgaggctccagaacgaatggtctgataaggctattaccaggatcctgcgggacgagaggtataccggaaaactgattggcatcaagaccacccgcactgaactcggcaaccagaaaagctcacggaagcagtccgaggaggactggattgttgttccaggaacattcgaagcaatcgtgagccaagagacgtttgacgaagcccaaaggcagcttgagacactgagacgacactccagcaaacgggaaactaatacgcctgtcgtgcaccttttctcacgcaagttgaaatgtgggcattgcggcctggcactgggcaggcatgtggtagacctcggcgtgtactatcattgcgagaggcgcgcctggaactccggggcagcctgtctcggagcccgattgttcgaggatgatctgatcaggacagtgttggcgtccatcagattccaggctcgactggctggaaaggcggaaaagcgactggataagctcgagaacgcggagaggcgagagcgcgagtccctgtgggaacaacggagaagaattcagatgaagctggaccacttgacaacccagaaggctgaggcctttcttctttttaaccagggggacctgacacagaaaacctatgacgccaagtgtgcaaagctcgacaaaactatcctggagcagaggactaaactcctcgacatgtctgggacacaaaccggtacccaggatggcgctgtattgcactgccgggaagacatcgcccgactgaaagagctgagccacttgcgaacactgaatagacagactgtcgagaaactcatacagtccatccgagtgtatgatggtaaacggattgagattgtctggaatttttcagattcttatatgaagctcctgaccggcgaagagcaaaaccatgaaggt

SEQ ID NO: 1130 - DNA, 1707 bp, unidentified
  source 1..1707: mol_type = unassigned DNA; note = Bacteriophage uvig_146316 from the Index of /pub/databases/metagenomics/genome_sets/gut_phage_database (ebi.ac.uk)
atgaagcagtcatcaaaaaagcatgagctgggtacagccgcactgtactgtcgcctgtctcgggatgataatatggacagcgagtccaactcaatccagaaccagcgaaagatactccagaaagcagctaaagacaagggatacacggatacagtgttttttgtggacgatgggattacgggaacaactatgaagcggccagggtttcagaagatgctcactgctatcgaggccggatacattagcgccgtttttgtgaaggacctgtctcggttgggcagaaattatatcgaggttggaaagctgaccgaagaattctttcccctgcatgatgtgcgacttgtggccgtgagcgacggggtggactctgacgaaggcgaggacgacttcacccccttcaagaacataatgaacgaatactacgccaaggatatttccaaaaaacgaaggatcgtgaataagatgaagggaaatgcaggagtgcctctgtctccccctccttacgggtacattaaaaaccccgatgacccacggttttgggttgtcgaacctgaagctgccgaggtggtgaggcgcatctaccgcatggccctggaaggttatgggctcgctgaaactgccgcgcagttggccgctgatggcgtagtcaaccctacatattattggagatccaggggaacatctcggagtggcagcaagagtacggtggaaccgactaagtggggccacaccaccgtcaagaagattctgaccttgcaggaatattgcggggacgtgatcaatttcaagagttactctaaaagttacaagatgaaaaagaggatcgagaacccggaggagaaccgcgctatctttctcaacgtccatgaggcgatcattgaccgccaaacatgggagaaagtccaagccctccagaaggggaccaggcggaagaaaccaactgtaacacaagagcccagcgtttttagcggtctcctgaagtgcccagagtgcggtggcaacctgaatttccatttcaaccagaacaatcacgatattaagttcttctcctgtcagaatcacaactcaggctaccggaagtgctcaaagacccattatattagattggattttcttgagcaggtggtcctctatgaagtgaaacgacttgcctgttttgcttccgagtacgagaatgacttcatcaaagcaatgataggcagatccgcaaaggtcgccgagaataccgctttgaggaagcagcgggaattggacgcacttactgccagggatcgagaattggatatgcttttcgaaaggctctatgaagataatgttgctggaaaaatcgatgatgcacgcttcgccaagatgtccaaaaggtatgagcaggagcaaggtgagaacgccaaaaaaatcaaggcactgcggctggagttgaaaaaagacgagagcaaaagaatggacatagatgacttccttgaaaccgtgagaagatacactgatgcggcaacaattaccaaacgcatggttgccgagctgattgaccacatagaggtatatcacgcagaaaagcaggatggcataactaatcaacgcgtagtaatccactacaattgtatcggggcctttgacgtccctgacagaagaaaaatcccagaggcggacattattatggagacccgaaaaggcgttgctctgagttatgctcccgaacaggtcgccgtg

SEQ ID NO: 1131 - DNA, 1074 bp, unidentified
  source 1..1074: mol_type = unassigned DNA; note = Bacteriophage uvig_390637 from the Index of /pub/databases/metagenomics/genome_sets/gut_phage_database (ebi.ac.uk)
atgattgcagacgcactcgctggaaaagtggacctgatcatcaccaaaagtgtgtcaagattcgccagaaatacagttgatagtctgtccactatacggaagcttaaggaacataacatcgagtgttacttcgagaaagaaaacatatggacgtttgacagcaaaggcgagcttttgttgactattatgtctagcctcgcccaggaagagagtcggagtataagcgagaacgctacatggggacatcgaaaacgctttgcagacggcaaggtgtccttcgcgtacagccgctttctggggtacgagaagggcccggatggaaccattgtagtcgtgcctgaacaagccaaaacagtgcgcctgatctacaagctcttccttgatggaatgacaatccacacaattgctggtgaactcacaaaacgggggatcaaaacccccggagggaaagataagtggaatcagtctactgtgaggtcaatcttgaccaacgaaaaatataagggcgatgcgctgctgcagaagtcctacactgtggactttctgaccaaaaaaactaaaacaaacgagggcgaggtgccccaatattacgtcgagaataatcacgaggccattattgactcccagatcttcgaacttgttcaggccgagattgccaagcgaaacaagggcaaggaacactattccggcgtttctatctttagcacgaaagtgcagtgtgccgagtgtggtgggtggtacgggtctaaggtctggcacagcaatgacaagtataggcggattatctaccagtgcaataacaagttcaggaataagaccggttgctcaaccccacatctgaccgaatatgagattaaagagtattttatcaaggctctgaacagattgataacggagaaggacgagataatcgcaaacactgaaatgattcagaagatgctgtgcgacaattcagagctcgaggcaaagagggacgtgcttcaggaggaaatcgcggttaccgtagaacttactcagaacgccgtcgctgaaaatgcccgcgtcgctcaagatcaagatgattataacaagaga

SEQ ID NO: 1132 - DNA, 1683 bp, unidentified
  source 1..1683: mol_type = unassigned DNA; note = Bacteriophage uvig_383825 from the Index of /pub/databases/metagenomics/genome_sets/gut_phage_database (ebi.ac.uk)
atgtttcaccagtctaacactgcggccgcactccaatttccttacaacgcaatgagtgtcgaagctattacagccttgtactgtaggctttccagagatgacgagctgcagggcgatagcaatagcatcatcaatcagaagaagatcttgcagaagtacgcattggagcatggatataccaacttcagattctacatcgatgatggaatatctggtaccaccttcaacagacccggctttcaggagatgattgccgacgtggaagctggtattgtgaagagggttatcatcaaagacatgagcagattcgggagggactatcttcaggtgggaatgtacaccgaaataatgttcccagagcatgacgtgcacttcatcgcagtcaatgatggtgttgactccacacagggcgataacgagttcaccccattccggaatattatcaatgagtggtatgccaaagacacatccaagaaaataagagccgtaatgaaggttaagggtaacgccggcgagcacctgactacttctgctccttacggatatatgaaagatccggaggatagcaagcactggattccggaccgggaagctgccgatgtggtgtatgagattgggctgtatgttatggatggcttcggaccttcacaaatcgccaggaaactccgggagcgcaagattctgacccccgccgcctactatgagtccaaagggatcccctgtaatgtaaagaagcagggcgacccatacgggtgggacaacacaaccattgcaggaatcatggaccgatggcgagagtatctcggacacacagtgaacttcaagacgacaaagaagtcatacaagtccaagaagaagattaaaaaccccgagtccgagtgggtgatttttgaaaacactcatgaaccaatatggaccgaagcgatcgctgaagcagtaaaacaggctagacaatcacgacgccggcctaccaaaatgggggaaatgggcatgtttagcggtatgatgtattgtgctgattgcgggagcatcctgtaccagtgcagggcaaccggtttccggaaagatcaggagtactacatttgctctgggtaccgaaagggaaagcaggtttgcaatacaccccactccatacgcacggtgatcttggaagaactgatactgcaaaatctgcgcgagattgtctctttcgccagaagccacgagaataggtttgcgcaaatggtgatggacatggacgtcaaagaaaggaacaaggggcttgctcagaaacgcagactgctctctgaatccaaaaaacgcatcacggagctggacatgatctttaaaagactctacgaggataacatctcaggcaagcttactgatgagcgctttcataaactcagcaccgattacgaggctgaacaggccggcctgcaggcccaagcagcgatgttgcgggaagaaattgaagaggctgagtcaaagagtgccaatgtggatcggtttcttagtgtcgtgcgccagtatactgacattccagaactgacacctcggattcttcatgaatttgtcgagaagatcgtgatacatgcagccactgacccccacagtaaaatcaataggaggcaggaggtcgacatctattataaaggcattggcatcttggagatgtctaaggtatttgacagtcgacagaaa

SEQ ID NO: 1133 - DNA, 1416 bp, unidentified
  source 1..1416: mol_type = unassigned DNA; note = Bacteriophage ivig_4414 from the Index of /pub/databases/metagenomics/genome_sets/gut_phage_database (ebi.ac.uk)
atggaaaaggttgccatctacataagagtatccaaaaaggagcaaacacgagacaagggctcagattccagcctcaacctgcagctgaaaaaatgccttgattattgcaaggagaagggttatgaagtcctgaaggtttatcaagatatcgaatccgggcggattgacgatagaaaggaattcaacgagctctttgaggcaattagtaagaaaatctacacaaaaatcgtgttctgggagatttcacgaatagccaggaaaatctctaccgggatgaagttcttcgaggaacttgaactgtacaagatcacttttgactctatatctcagccgtacttgaaggatttcatgacactctctatctttctggcttggggaactgaagatctcaaacagatgtctctcagaattaaaagcaatcttgaagagaaaaccaaggccgggtactttgtccacggccgcccagccacgggttacattcgggggaaaaataagatgatcattccagatcccgaaaaagcaccttatatcctgtccatttttgagacgtatgcaaaaaatttcaacttgacagagaccgcgaggatattcaataagaccaggatggacatagtggatatcatcgataataagatctacatcggctacgtgccctttagaaagtatatccaggaacttaatcagaagaagcggatacaagtctccaagaaagatatcaagtggtacaagggacttcatgaacctattgttcctctggagttgttcgaattttgccagagcatcagggagaaaaatattaaaagtcgggctgcttatggcgactataaaccccatctgctgttttcatctatgatctactgtgagtgtggagacaaaatgtatcagcaaaagagaaaccgaacctacaaggacaacactaactatgtgtactatagctacagttgtaagaatcgcaaacacaagaaaagcttcagtgctcgcattatggacaagacaattaaagagatgatactgaacagtaaagagcttgaggacctgaataactacaacagcaacgacatcgagaagtcagaaaagaaactgttgaagcttgagaataacctgaaactcttggagaatgaaagggagagaattattaatctgtttcagaagtcctatatctcagaggacgagctcgagaacaagttcaaagatttgaacaccaggatccagattgccaaagaaaaaaagattgaattcgagaatactctgaacatcccccggaataacgacatcaaggtactggagaaacttaagtttatcatcgaaaactacgatgaagaggacgtgattgagactcgcaaaatactcaagatgataattaaggaaatccgcgtgattagcttttacccactgaagatttccattcttttctat

SEQ ID NO: 1134 - DNA, 1899 bp, unidentified
  source 1..1899: mol_type = unassigned DNA; note = Bacteriophage uvig_80069 from the Index of /pub/databases/metagenomics/genome_sets/gut_phage_database (ebi.ac.uk)
atgatcgatctggacaaaagacgactgaaggaacagcagaaggcccggcagagacagcggatgcagggaaggctggaccctgataattatgagtacatccccgctaaaaagccgatagacttctacgataatgatgtgcaccagagagtagggatctatgctagagtttctaccgacgatgtacgacagacgacaagctacgagcttcagaaaaagtactacgaagatttcgtggtgcgacaccctaactggacactcgtacggatctacgcagatgaaggcatctccggtaccagcctgaggaagcgagatgaattcaatcaaatgatctcagactgtcgcgctgggaaacttgacataattattaccaaaagtgtgtcacggtttgcaagaaacgtcatgatatgcatcggaatggtgagggagcttgcagagctcaagccacccgtgggagtattctttgagtcagaatgcatctttagcctcaacgacgagtcccagatggccctcagctttcaagcaactatggcggaagaagagtcccatattcggagccgatccatggaaacaagcctgcgcatgaggctggataatgggattccactgacccccaagcttttgggatatacacacgacatggacggaaatctgatcgttaacgagcaagaagccccaaccgtcaaactcgccttctttatgtacctgtatggctatagtactcaacagatagcagatgtgttcatcgccctgggtcggaggagttatctcggcaatatcaagtggacgtctaactctatagttcagattctgcgaaacgaacgacactgtggagacgtccttactcggaagactttcactcctaactttcacgatcacttgtccaaaaagaacaggggcgaacgcccacaatccaggtactacaaccatcatgagcctattgtttcacgcgatgactttatcgctgttcagagactgcttgataatgccaagtaccgcgggaaaagtgtcctgcccgagctgagagttattgacagcggcatgttgaagggttatgtgtccgtgaatccccgatgggccgggttcaagagtgatgattacatcatggcttcacagagcgcctatgcagaagacgaggcagaagaaacgtacgcaaagagtgaagacaaagtgatagagatcgaagtggagccgggcgatttcgacttgcgcggcttcgaggtagccagatcagagctgtttaaccccctgaacagagcgacagtggtcctttctgaccaaaagatcaagttcaacactacctgcgtgcggaaattcggaaacaagaaccgggtggagattctgattaatcccctggagcggaaactggccgtcaggcctaccgacaaggcgaacaggaattctgtcattttctccaaaaaagaagatgggacctatcttcctagagagattcctgctagcgccttcatcggtaccttgtttgagctcttcgggtggaagttggactgtaagtacaggatcattggatctctgtacgaaactgacaccgagatggcttacgtgttcgatgctgtgaataccgaagctttttttaaaagttatgtccttccagtccaacagctctctccggaaggcacagccctgattgaacccctcacaacttctgggaaacgcatcagggcgattccaaaggaatgggttaatgagtttggcgagctgttctaccttcaggagcgatcccttgccgcccttgagtcacagtccgaggaggactggaagttgtatatggagggccgcatgtttgagagcggtaagcagttgaaagtgacatcttttgacgagctccagcgctatatcaaacaggagttgagcgtgctcacaagaccagaggtcaatcatgaa

SEQ ID NO: 1135 - DNA, 1521 bp, unidentified
  source 1..1521: mol_type = unassigned DNA; note = Bacteriophage uvig_395426 from the Index of /pub/databases/metagenomics/genome_sets/gut_phage_database (ebi.ac.uk)
atgaagcgggtgataagctacattagattttccagcgagcgccaggccaaaggagacagtcttcgccgacagtccaagatggtgacagattggctgaaggcccatccagaatactacctggatcaggatctctcttttcgcgatttgggggtctctggattcaccggcaaacatctgaagggcggactcggtgatttcctgaccgcgattgaaaaggggttggtaaaagccggggatacactgcttatagaatccctggatcgcctttcacgccagaatgtagaccgggcttcagaactgctcagaaatattctcagatctggtgtcgacgtggtgacccttagtgacggcgagcactatacacgcgagagcttgaaggatcccctggcactgattaagagtattctgataatgcaacggtctcatgaagaaagcctgagaaaatccgagcgcatccaggcggcctggaatcgaaagaaagagctcatctcagaaggaatcaaaatcagtaaacgatgccccgcatggcttaggttgaacgacgacagaaagacgttcagtgttatacctgagaaggtagagaccgtgaagcggtgttttcaattgaggctggagggtaagagtatctgggagatcgttaggacactgaatgctgaagggcacagatccatgaatcagtataaaccggggaagttcgggcagacgagcgtccaggatctgttgaaaaatagaagcgtgatcggctatttcaccccaaagggatgcgaggaaatttcaggctactaccctgcaatcattgacgaaaccactttttacaaggtgcagcagctctcacactcaaggtatggaaagcggtcagtgtctgacaaacctctctccgtaaacttgttcaaaggcgtgatccggtgtagtgagtgtggccacgcattgatcatcaccggcttctccgatacccggtctggaatctatcgctgcccactgcgaaacgagaataggtgtagcgctaaaggactgagccggaagcagacagatggtactcttttgacccttctgtctcgacttgacagatttgatagcgatactacaaacatcatagacatgctgaggctgcatagggaacacatcagctccaatattgagaagctggtgcagctgtccttggagattgaggatctgaacgccatcacgtctaaacttaaacaactcaaaggtgaactctctcaggtcgacgctgacattgagaaggaaacccaaaggctgaagtccatagacgtcggctgtttgtccgattgcgacctcacaaccaaggcagggcggattgaggcccaactcattatcaaaagtgctgtcaaagaggtggttctgaacacagccaagagaaggtgcaaggttacttttcacaacgggaaaactattactctctcaattacagagaaccccagcgaagacgtgactgaagccatccagagcttgtctgaggtcactgaacgaggcttgatagacgttgacgaggtgatcatc

SEQ ID NO: 1136 - DNA, 1542 bp, unidentified
  source 1..1542: mol_type = unassigned DNA; note = Bacteriophage uvig_434714 from the Index of /pub/databases/metagenomics/genome_sets/gut_phage_database (ebi.ac.uk)
atgtatgatagtatgcctgctgagtggctctgttgtgcttacctcaggaagtcccgcgaagatgaggaacgcgaaaaacagggacgctataagacactggagagacacaaggccattttggagtctctgtcttctgacaatggacataaaattgcccagtggtatccagagattgtctccggagagacaatcgaaggcagacctgaggttaagaaactgctcgcggatttggctagcggcaagtgggacgctgtctatgttgtagaagcttcccggcttggaaggggtggagggagcgaccaagagaaaattgttaatgccttcagatacaccaacacgtggctggtcacggaggaaaaagtgtatgaccctagttcaaaggccgatatgcgccaactgaaaaatgatctgagatcaagcgaggatgagctcgattccattacaactcgcctcacccgggggaagtacagatcagcgcaagagggaagatggcaggcaaccggaaggacaccctatggctggcgggcagtaaggatagccggcttgtggcagctccgcccagatgagaaccattgccacatgctcaggatctatgacctgctcgagagcggcctgactccttgggacgtggcaaatatctacaacgctgagggtatccccacccctagaggcggtgaccattggaccgctgccatagtgcgagctatcgccctgaacccagccaattgtggctacgtggtgttcgggaagcacaagacaatgcgaatttttgacccggtgacttttgaagcaaaaaaagtcagagtcaagaacgacaaacccgtcatggtgaaagggctgcactacggcacaggcgggatctcagaggaacgatttgaaaggattactggacatctggtgggtagcgcacacctgcgcaagggtctggagctgaagaatccacttgccaggttgttgaaatgcgggaagtgcggctatgctatgaaccaccaccggatgagctccggcaaaagttatggatacttctaccagcaccccgccaagcgcaacatgactcgggcatgtgatgggtgccgaggcgccagggacgatctggttatggatacccttgtcgcctctctgcggtccctctgtaatgacatcgagcttaggattaaagctgataatagggcctccgagcatgaggctcacatcgaagcgctccgaaaggaattggagaaggtgcgggccgcgagaagcagggcaatggaagcatatgaagcaggggcatacaccatagccgagctgaaagcccggaaggatgaagccgagaaacgaatggaaagtattgagagagcgatcaaagacgctaagccacccaagtacactccggaactcgtagtgtctatcaacaagtgcatcgatatgcttctggatgacaccgtgtcagtgcaggtaaaaaatgacttcctcaagtctgtgatcgggcgcatagactactacaacgacacgcctccctttgtgcatgacaacaaggttcatcttgaaatcttcctgcggcag

SEQ ID NO: 1137 - DNA, 1518 bp, unidentified
  source 1..1518: mol_type = unassigned DNA; note = Bacteriophage uvig_425922 from the Index of /pub/databases/metagenomics/genome_sets/gut_phage_database (ebi.ac.uk)
atgcgctccgtgattacctatctgaggtattcctcagccatacagggagctgagggcgcggactccacacggagacaaaacgatctgtttaagcagtggctcaaaaaaaactcagacgcacaggtcgtggcctctttctccgacgagggcctcagtgggtataagggcaaacatttgacaggccagtttggagacatgcttgcgcgaatcgagtccggcgaattttctaaagggaccatcctgctcgtagagtcaattgacagaattggacggctcgagcacctggagactgaagctcttatgaatagaatcatcgcccacggcatcgagattcacaccttgcaagacgggctgatctacacgcgcgacgccctgagcgacgacctgggaatcagcataatccagcgcgtcaaaagttacttggcacaccaagagtctaagcagaaaagtttccgcgtgtctcagaagtggggtcagcgggctaagctggcattggccggcaagcagaggttgaccaaaatggtcccggggtggatcgacccggagactttcgaagtgaacgaacacgctgaaacagtccggcttattttcaagcttctcctggatggtgaatccttgcataacattgctcggcatctgcaggccaataatataagctctttttcacgccgaaaggacgcaaacggcttcagcgtgcatagtgtgagaactattctgaggtctgagaccaccatcgggacgctgccagccagccagcgaaatgacaggcctgcaattccaaactactacgaggccgctattgatgccgctacgttcaacaaggcccaggagatactggataaaaacagaaaagggaggacacccgcgtcagataaccccctcacaatcaatatctttaagggccttttcaggtgccagtgcggcgcaagcgtccaccctacagggaccaagaataagtacgcaggtgtatatcggtgcaataacaatcccgatggacgctgtgacgttcccccacttaaaagaaagccatttgacaggtggatgattgataatttcctgggaatgatcgatgtgggtaatgatggggaatctgagcgaaagatcgctgctctccaacacgaggttgaaatcgtgacagcaaggattaaaaaggccacagctctgctgctcgagatggatgatatcactgagcttaaaactcaggtgaagggactgaaccagaagagaaccgaactgcaaaccacaattgataatatgagacgcaaggccagcctcacggataaagaacttcctcagttgaaggacatcgatttgaccactaaggccggacgggttgaatgtcagctcatcctgagtaagcatttgaaaggcttgacactgggtaaggacagcgtgaccgttactctgcaaaacgacaccaaaattactatacctactaatcctctgcccttgaacgacggttccccaatatttgaaattgcggataaagagttgctcgatatagacgcctaccagctc

SEQ ID NO: 1138 - DNA, 1743 bp, unidentified
  source 1..1743: mol_type = unassigned DNA; note = Bacteriophage uvig_114951 from the Index of /pub/databases/metagenomics/genome_sets/gut_phage_database (ebi.ac.uk)
atggattacaacttcacccagttcaccgtgtatgacttcctgctgtatttgcggaaatcccgagctgattctgagtatgagactattgaagagactctggcaaaacatgagaccgaacttcagaattttgcgattcggctcctcggagtgaagattcctgaatgtaacatcttcagagaagttgtctccggcgagacagttcaggatagacctgacatccagaaggtgctttttgccattgaaagtgggagcgtcaggggcgtgtttgtaatcgatccgcagcgcctgtcaagaggagattgggaggacggcggtaaaattctgtcatcttttaagtactctgacactttgattctgacgcctgcaaagatctacgacctgaataacaagtttgactacgactttttcaagatggagctttctcgcggcaacgattacttggagtatacaaaggagattctcaggagaggcagggttgctagtgtaaagaacggaaattttatcgggtcagtcgctccatacgggtttaacaagatcataattgacaaaacccccaccctgacgatcaaccgcaaggaggccgaagccgtgaatatcgccgcaaagaagtgtgtgtatgacgatatgggttggacagccataggtaaggacctcgagctgatgggctataaacctcggtctgccgagcattggaatccatacactcttcgggatatttgtatcaaccccgttaatatagggaaggttagatggaatacccggaaggtcgtaaagatgtacgatgatggaaaacttgtgaaaaaacgaccggtgaataggggagacgatgccatgttggtcgacggcaactttgacgggataatggagcccgaactgtatcataagctgatcaagaaagccggcgtgatgacgaaagagaagagcaacaccagccttattaaccccttcgctggcctgctctactgcaagtgcggtcacgccatgatctacaggagctatcacaaaaatggagtggaacgctccgcagcaaggctcatttgcacccaccgctcacactgcaatacaaaaagtgtgctcttcgacgtcgcttacgaaagtattatagattgtctggaagatactgtcaaggatttcgctttcaaactgcagcatgacaatagcatggacacatatgccttgcaaacaaaaatgctggcggagcagcgagaggaattgaaaagactggacgccaaacaggaggagctttatgatttcctggaggatgggatctacacaaaagatgtgttccttcaaagaagtgaccgcctcaaaagcaagcgagaagaagtcgaaaaacaaattaagtatcttcaagataacaccgtggagccagtagactataccgagaagatcgctaccttcaaagatgtgattaatgcactgcgggacgataacatcagcgcgaaacacaagaactccttgctcaagacgataatcaagcggatcgactacgaccgcacagaagtgaccgaacaggatggaaaagtgtacatctgcacatacaggaaaaggggcgacctgtcagcggctccatccgagactactgcccttctctccgcaaacgctactcggagcgacgcatggcactattttcagtctcacatagggaaggagtacaagatccttaagatcgtcagagactatcagcaccgaacagtttacgacgcctccaagcccgtttttaaagtgcatctgaatgatttc

SEQ ID NO: 1139 - DNA, 1593 bp, unidentified
  source 1..1593: mol_type = unassigned DNA; note = Bacteriophage uvig_442872 from the Index of /pub/databases/metagenomics/genome_sets/gut_phage_database (ebi.ac.uk)
atgttgtacgagatcaatcgagaggacttcgaaaacgtcataatctatctcaggaagagccgggctgacgacccttgtatgaccgtcgaggaggttttggcctctcatgagagacagttgcaggaatactccatgactttttttggcgcaaaaatcccagaggaacgcattttcagggaagttgtgtctggggaaacgatagctgacagacccgtaatgaaagaggtcatgacccttctcgaaactggaattattaagggcgtgctcgtgattgaaccacaaagattgtccaggggtgatttggaagactgtggtaagattattaatacgttcaggtataccaacaccctcgtaatcactccaagcaagacatataacattagcgatgagtacgaccgcaagttctttgagatggagcttactcggggaaatgattatctggaatacaccaaacgcattctgtctagaggcaaactggcctcagtgaaacaggggaatttcatcggctcagtggcaccttacgggtacaagaaggtgaccaagggaacggggaaagatacataccataccctcgaaataatacctgagcaggcagaggctgtacggttgatgtttaagctgtatctggagggtaacggattcaccaatatctctatctgtctggatcgcttgggctataaacccttgaaatcacaacactggagccccgcagctatctctgacatcctcgagaacccagtctacacaggaaagattagatggaactacttcaagactgtcaaaaagatgcagaacgggcagataatcaagagtcggcctattaaccgggatacatccgacgtgatcatcgtgccgggcaagcacgaagctatcatcgaccagaaaatcttcgacgctgctcttgaacgccgaggatccacaccgaaagttaaaaaaggaaatgagctgaaaaatccctttgctggtctgctgttttgtgggaccgcaggctgcggtcggagcatgtcctttaaacaatataaggactacagaagcaaaactgacaagaggagcgagtatatgctgtgcacaaaccaacgaatctgtcacaccaagagtgtccagtacagcgccttcgtggccaaggttaaagagtcactgcaggccagtattaaagacttcgaagtgaagctgaaagcggaacaggaaaacgccgacgatctgcgccaaaatattataaagaatctcgaggccgaagtgtctagacttaagatcaaggatgcacgccagaaagacgcctatgaggacggcctgtacagtaaggaggaatatgcgaaacgaaatgccaagcttcaggaacagctgtataatacaatgaatactcttcagcaggaaaagagtgccacagcgccctccgtggattatgaggagaaaatcatgaggtttaaggattgcttggccattattgatgataccactgtgtcagcaggcaagaagaacgagctcctgaagtcttgcattgagaggatcaactactacaacaactgcgagtccaagcctggcctcgggcggtacgttgataatccatttcatttggaggtcatactgcgcctg

SEQ ID NO: 1140 - DNA, 1473 bp, unidentified
  source 1..1473: mol_type = unassigned DNA; note = Bacteriophage uvig_510225 from the Index of /pub/databases/metagenomics/genome_sets/gut_phage_database (ebi.ac.uk)
atgtatctgagaaagtctcggcaagacaatcccgaagaaaccgtggaagaagttctgtttcggcacgaaattcagttgcaagaatacgcgatgaagaacttccattacaggattgcggaggaagatatctaccgagaggtggtgagtggcgagaccatagaggacaggccagagatgaagaaggttctgaaactcattgaatcttcaacggtcaagggcgtgctcgtgatagaaccccagagactttccagaggagatatgcttgattgcggcaccattgtgcatgtgtttcgatacacaaataccctcgtggtaacacctcccaagacttacgatctcactgagaagtacgaccggaaatttttcgagatggagcttagcagggggtcagattacttggaatataccaaagagatcctgaaccgcggcagagtactgtctcgcaagcaggggaactacatcgggagcgtggccccatatgggtatactaaaattaagaacggcaaggagcattctcttgtgataaacgaagaggaggcacagtatgtgagaatggcctacgatctttttatcaatggtcacggatcacactatattgcagagcagctggaggccatgggagccaaacctagaaaagctaaacacttcacacccgctaatattaggaagatgctccggaatcctgtctacattggacaaattgtacttaaccgcagccagagcgtcaaggtatacgaggacggatgcctgaagaccaaacgggtgtacaatcctgattatgagactgtgccggggaaacatgaacctatcataagcgaggaaatcttcgagctggcaaatagcgaggcatgcagaaaagctcgagtgccatcctctaaggaaatccggttcatcttcgccggcctggctaagtgtagtgtctgtggcggctccctgggtctgaaaatacacaccggccgcgagcatccgtatagggtcggttgcttgaagaagaagtattgtactaacacaagtattctctatgaagactttatcgatctggtcgtcaatgccctgaaagctcagatccaggatttcgaagttcaaatagaaacgaacgtgtataaggaggcatttgagacacaaagcttgctggaatctctgacgaagcgacttgagaaaaccgacgagaaaatgggtcagttgtgtcagtacttggaagaaggaatgtacacacccgacatgtttgttaagcgacgcgacaccctcatccaggagaaagatgagttgcagaaagccgtcaaagaagcccgcaaaaaaatgtccgggatgaaagacattaaggagaagacaagttccctccacgaggccctcaacctgctgagggacgactccatctcaccaaggctgaagaatactttcctcaagaagatcattaaggctatctacttctcacgactgaacgacaaaatcgtgcttaaggttgttttgcgg

SEQ ID NO: 1141 - DNA, 1524 bp, unidentified
  source 1..1524: mol_type = unassigned DNA; note = Bacteriophage uvig_281842 from the Index of /pub/databases/metagenomics/genome_sets/gut_phage_database (ebi.ac.uk)
atgaacgagtatctgatgtatcttaggaaatctcgccaggataatccggacgagacggtcgaagaagttttggccaagcacgaaagaatccttcagaactttgctacaaaccagctgggacatactatccccgaggaatgcatctaccgcgacgtggtgtccggggagatgattagcgaccgacctcaagtgaaggcactctttcgggcaatcgaatcaagtcagataaaaggcgtgcttgtcgtagaacctcagaggctgtcccgcggggatctggtggaatgcggcactatcgtgcggtattttaagtactccaataccctcatctacaccccagccaagatctttaatctcaaagacgacttcgattgtagaatcttccaggatgaacttatgaggggcagggagtatttcgagtactcagtccgcataatgcagcgcggaaccaaacaatctattcttgagggtaattacattagtccagaacctccatacggttaccagaaagtcaaggaggggaaacgacagtatctggtggtcgaccccatcgaatctgagtatgttaaaatgatctacaacttgtaccttagcgggtatggtattaagcggattacaaaccgattgaacgagctgaacattcgaccacggcgaatttcttattggactcaaagttccatcctgagaatattgggcaatcaagtatataccggctgtatagtttggaaccgcagaaaaagagaacgcattttgatcaatggggagatcaagaaaaaggacgtctatcaggaaaagcccatcattgtggaggatacccacgaggcaatcatcgacaaagaaacattccagaaggtgcaagagctcaaaggtaaagcccccagaatttcccaggggaccacttttagaaacaccttcaggggcctgttgcggtgcgcagtttgtaatcacgccatgaagtgtcaggtgaaagccgacggcagcataaggtacttctgtccgcagagttcacggtgcggatgctacggaacaaccgagaagacaatcacggaggaagtcattaagggcctcaagcaacatctcaacgattttgaggtagatgtgcagaccagctcacttatctccgtgaaacaacatgaaacgattctgagcgaactggagtctacattggcttcacttgaagagaggcagcagaaactctacgagtacctcgagcacggatcttatacagagaaagtgttcatcgagcggaatcggatcctgaacgaagagagaattactcttaatgctcaaattgaggctgagaaacagaagctcaatgagcctaccgatactaagcagataaaggcgactctgcacgaagccataagcctgctggaggacgaaacagtaagcgcgtaccagaagaatcagtttctgaagtctttcatctccgtcattcattacaagaagatggtgaggctgcagaataacaagaagggaaccgtgctgagtgataacgaccttgttagcctggaaattgttctgaaa

SEQ ID NO: 1142 - DNA, 1533 bp, unidentified
  source 1..1533: mol_type = unassigned DNA; note = Bacteriophage ivig_126 from the Index of /pub/databases/metagenomics/genome_sets/gut_phage_database (ebi.ac.uk)
atggataagtacttgatgtatttgagaaaatcacgatctgatgatccgaatgaaactgttgagcaggtgctcgccaaacatgaacggattctgcaaaactacgcttccgcaatgcttgaccagaagatccctgaggaatgcatctaccgcgaggtggtaagcggagaaacgattgaagaccgcccagaaatcaaacgcttgtttgagctcatgcagtctaatactatcaagggcgtcctggtggtagactgccagcggctctcccgcggtgacttgatcgactgcgggaccatacttcaaaatttcaagtacaccaatacacttatcgtcacacccaaaaagaccttcgacttgtccaacgagtacgattacaagtccgttaaaagtgagctcatggcgggctcagattatctggattatatgaagacaataatgcagagaggaacactgcagtctgtcctggagggcaactatctccctaccaggaccccctttggatataagaaagtcaaagagggtaagagaagacagtatttggtgccggatccagaaacagctccttatgtgaagttcatatacgaaaaaattcttgaggggtacagcgcacatgctatcggcctcatgcttgatgacctgggcgtgaaaccttttatggcgaagtactggcatgagaggaccatcaaacggatcctgtctaacgaggtctacattggatgtactgtgtggaatcggcacaaagtggagaaaaggattgttgacggcaagctcaaaaaagtacgagtgaggcaggagaaacccttgattgtccacgacacccacgagccaatcatctccaaggagatgtttgatagtgttaaaaagctgatggttagcaagagtgtgaaggttaatatgtctaaagaactgaaaagcccatacgccggactgctgcgctgtaaactctgtggcagaatgatgagataccaaggggagaaaggcaggaatgtgcctcggtatgactgttcaggaatacgacactgccggaacatgagtaccaatgcaactgtggtggacaacgcaattattgaggctttgaagtctaacctggaggactttaagattaagctgaataagacggatgaggaacaaattcagacaaagaagaacatgatctccgacctgaagaagtcacttgataagatcgaccagaaaaaggagagaatctatgagtttctcgaggatggtacctacacgaaggaaaagttcatagagcgaattaacaagctcgagattgaaaaaaaggggatcgagacaagcattaataagatcgggtccactatgccaaacaggaacgaatggaaagaaaaatatgccactctgaacgaagccatagatatgctgcagaaccccaacattagcgccaagagtaagaataccttcctgaaaaagttcatcaaggtaatctattacgaaaagcatgaacgcgactcaagcgcccccaggcacggggccgtcactcacagcaaaaatgtgaatattgaaataatcctgaaa

SEQ ID NO: 1143 - DNA, 1569 bp, unidentified
  source 1..1569: mol_type = unassigned DNA; note = Bacteriophage uvig_581976 from the Index of /pub/databases/metagenomics/genome_sets/gut_phage_database (ebi.ac.uk)
atgtcagtcagaaacattattatctatttgcggaagagccgctctgacgacccgggaatgtcagtagaagacgttctggccaaacacgagagacaactgcaggaatatgcgatcagtgaatacggggagcaaatcccggaggatcacatatttcgagaggtggtatctggtgagaccatcgcagacaggccagtgatgaagcaggtgatgcagcttctcgaggcagggaatattactgcagttctcgtgatcgagccccagcggctgtccagaggcgacctggaagattgtggaagaattattaacacgttccgctacacacatacattggttgccacacctcccaaaacctacgatcttaccaacgagtatgataggaaattcttcgagatggagttgatgcggggaaatgactaccttgaatacactaaaaagatcctcaatcggggaagagtggcctctgtccgccagggcaactttatcggctccgtagctccatacgggtacaagcgcgtgcgactgggatccgggaaagatattagttataccctggaaattatacctgaagaggccgaatttttgaagttgatgtatcacctgtacctggacgagggttatggctttacaagaattgccaagcacctcgacagcataggagccaagccccgaaaggccgagcattggtctcctgctgcaatcaaagatatgctcgagaaccctgtgtatatcggcaaaatcaggtggaattggaggaagacagaaaaggttatgactaatggacagattatcaaaacgaggccaaagaccaaggatgaagctcagtggatctacgtggacggtaaacacaaagctatcatcgatgaatcactgttccgggctgttattgaccgccgaggcaagaatccttgcgtgcggaaatctaaggaactgatcaacccattcgctggccttctgttctgcggtacatgtggcaaagccatgagctataagcattttaagcagtatagaggcaaaagtgaaaacatttgtactagcatggtctgtaacaatcagtcccactgtaagactaagagtgtgctctacgacgcctttctcgacagggtgatttcaactctcgaggataccattactgatttcaaaattaagctccaaaacgatgactgcgacagcgcgaaactgcatgctaacgtcgtaaaaaatctggagctggagttgcagaaactccaacagaaggattttcgccagaaggacgcatatgaggatgggatctacacgaaggaagagtacgctgcccggaacgctaaactgcaagagcagatagccacaaccatggacagcctgtcaaaggcaaaggaaagcgtgctgccatctgtcgactataatgagaaaatcatgaggttcaccgattgcctgaatgcactcaaaagccccgatgtcagtgccaccgaaaagaacatgcttctcaagtcctgcatcaacaagatcgtctactacaactccatgccctctaaagccggggcggggcgatggatagacaatgtgttctccctcgatatatttctcaatctt

SEQ ID NO: 1144 - DNA, 1560 bp, unidentified
  source 1..1560: mol_type = unassigned DNA; note = Bacteriophage uvig_49690 from the Index of /pub/databases/metagenomics/genome_sets/gut_phage_database (ebi.ac.uk)
atgtattccactggctccacactcctgtctgatgtctggataatctatcttagaaaatcaagacaggacgaccctaaggagaccgtcgaggaggttttggccaaacacgagaacatgctccaggagtatgccgaacgggaactcggcgctaggatatccgaggagaatatctaccgggagattgtgtctggggagtctattgacgaccgggtggaaatcaagaaggttctggctaggattgaagaccctgcagttaaaggagtgctcgtcgtagaaccccagcgcctcagccggggcgatctcgaagattgtggtcggcttattaattctctgagattcacacatacccaggtagctactccttacatggtgtacgatttggaaaacaagatggagagaaagttctttcaggacgagcttttgcggggtcgagattttcttgagtacaccaaagagattctttttcgaggcagggttgctgcggtgaaaagaggctgctacattgggaattatgccccatacggatacaagaagattaagataggcaaagattttaccctggaaatcatcgaggatcaggccgaggtggtacgcctgatctttgatctttacaccaaggagcaactcactccgctccgaattgcagaccggctgaatgagatgggcgtgaaagctcccaggggagacaagtgggtaaaagacacaatccgcgtgatcgtgcgaaacgagcattatatcgggaaggtggtgttcaataagcacaagcaaacgccggtgctggagaatggagaggtcgtgatcaagcgcctcgcacagcccgaagatgaagtgcttattgccgaaggaaaacaaccagcgattatctccctggaaacatgggaagccgctcagaccctcgtagctaggaatccccgagtgaaaaacgagcacccactgagcaatccatatagtggcgtcctggtttgcggcaagtgcggaaaggtcatgtacaagcacccctataaacatgcggaacacaggtacgaatgtcgaacacgccctaggtgcttcaaaagtgtgcgcgcatcagaaatcggggatgccattctgctggcgttggaggaggccgaactgcctgcactgaaattgaaggtcaagaacaacgacggaaacgccgccaaaatacagaggcgcctgcttgataaacttatgcagcagatggaggggttccgggaacaggaggacaaacaatatgagctcctggagacagggcgctacactcaggacttgttcgacaggagaaacgccacccttagagctaagatggatgagtgtcaagccgccatctacaaagcaaagagtgtcatgcctaaaaacgtggattatagcgaacgggtcgttgctatggaagcagccattgagatgctgaaggaccccgaggccacgccaaccgagaaaaataaggctttgaaggcaatcgtggaaagaatagaatataaggggatcgagagcctgggtactgacagaaagggcaaaaagaagggtgaaaactcatttgaactgaaagttttcctgcgaata

SEQ ID NO: 1145 - DNA, 1533 bp, unidentified
  source 1..1533: mol_type = unassigned DNA; note = Bacteriophage uvig_572170 from the Index of /pub/databases/metagenomics/genome_sets/gut_phage_database (ebi.ac.uk)
atgcacgacaccatgctcgatctcacctgctgcgcttatctgagaaagtcccgcgaagatgaagagcgagaaaaaatggggaggggtgaaacacttgccagacataggcgcatcatcgaaagcctggcttccgagaacggtcacgagattttgcattggtatactgaggtgaagagtggagagacaattgccgcgcgaacagagataaaaaatctcctcagtgacttggccgatggaaagtgggatgtcgtgtacgccgtcgaggcctctcggctcgggagagggggtggatccgaccaggaaaagatcatcaacgccttcaggtacacccagacacacctcataacggaaatgaagacttatgatcccgaaagccggggcgatatgagacaactgaaatctgagctgagatcatctgaagatgagctggacgcaatctcaacccggcttgtccgcgggaagtatcaagcagccaaagagggggtatggcagtctaccggaaggacaccttacggatggaaagcggtgaggatcaaaggtctctggcaacttgagcccgacgagaatcacgagagcatgttgagaatctacgatctcctggagagcggcgagaactatagctctattgctcgaattctgaccgaagatggcattccaacccctcgcggaggagaccactggaggcaccagacagttaagagtattgccgaaaatgtggctaactgtggcttggttatgtacgggaaacgacacgtggttagggagttcgaccgcgatactttcggtgtggtcaagactaagcggaacaacccggagcccatcgtttcaaggggcctgcactatggcaaaggtggcatttcagaagagcgctttgagagattgactaagaaatccgtgaataatgcccgccttcataaagataaagtcctcataaacccgctcagcggcctcttgaggtgcgggaagtgtggctacgccatgtctatgcatcgcatgagctcaggaaagagtgcagctctgttttatcagcatccacggagcaaaaatatgctgggcgattgtgatgggtgccgagctgcaagagccgaccaggtgattactatgctgattgatgctcttgagaagatagcggaggacgtgaccatcgaagcaagcaagccccaaagtgaagtggaccagtccagaatcaaaagtattcaggcagcaattaagaaggaagagaccgcaagacgaaaagctatggaagcttttgaagccaatatctacacaattgaggaactgcgggagcgaaaatcaaaggccgacgcggctatagaatctctgaagaagcgcctgaaggaccatgagccaaagcgcgtttccgccgatgcccctgtgaagatccggagatgtatagatctgctgcgggacgagggcgtatccgtgcaggacaaaaacgaccttctgaaatccatcatcgagcggatcgactactacaatgacacgccaccctacgtattgcctaacaggatcaggctggacgtccacttgcgg

SEQ ID NO: 1146 - DNA, 1557 bp, unidentified
  source 1..1557: mol_type = unassigned DNA; note = Bacteriophage ivig_2192 from the Index of /pub/databases/metagenomics/genome_sets/gut_phage_database (ebi.ac.uk)
atgtacgaactcggggagtatctgatctacctcagaaaatctcgctccgattctgagctcgagaagatgggcgtggacgttttggagagacatgagcagatcctgttgaatctggctaaacaaatgaaactgtccattggcggtatctaccgagaagtcgtgagtggggacagcatcagcgccaggcccgagatgcagaagctcctgtccgaagttgagtcaggaagatggaagggtgtacttgtgatggaaatcgagcggctggcccgcggggacacggtggatcagggcattgttcagagggccttccagtactccggcactctgattgttactccagccaaagtgtataaccctgataacgaatttgatgaggagtatttcgaattcggactctttatgagcagacgcgaatataagaccataaagcgccgaatgcagaccggcaggtacgccgcggtccgcgaggggaaatggccctataatacggcgccttatgggtttaacaggaaaaagctgtccaaggaaaagggatggaccttggaactgaacaaggacgaggcccctgtcgtacggctcattttcagcctgtacactggtcccaatcgggtgggcatcaccaagattaaacatgagctcaatcagaggggaattaaacctagaaaatccgacaagtggactgaaagcacaatacgagatattctcaggaatgtggtgtacgaccagcaggtgaaaatcggagagagaaaggtggtcatggttatccaggacgggagtccagctaagacacggccccgggcagatgactatattattgtgcccggccgccaacctcggctcatcgctcacgagatctttttggaggctcagtcctaccttggccggggcaagccaaaagctccctcaagctatggggtgaagaacccactggccggactgatggtttgttcagaatgtaagaagaagatgatgagacgaccagctagtcctgatggtaagtacgtgccctatgacctgctgatgtgcacaacagagcactgcccaaccatcgggtctccgctggaccttgtggaagagatggtggtacaggccctgtcagattgggtcaaagattataagctgagtggaaaggcaacctacgtgtcaaatatcccggaaaaagaagccattctcagaactgccaaagagacccacgaacaacttctccagcagaaagagaagctgtacgacttcctggaacagggtatctacagtacagaaacatttttggagaggtcatcctctctgcaacagaggatctctgaaagctctcaaagcatacaactcctcgagaaggatttggaagaggagaaggagcgagagcttaatgtcgaaatgtttcttcccgcgtgcgaaggattgctcgattactattggaatctgtctgcacaggagcgcaaccaagcactccgacaggtcatagacagcatcgagtacaagaaacttgtaaaaaacaagaaaggcgacgtccggaacgcaaacttcgagctcaccataaagcctaaaattccacgaaaa

SEQ ID NO: 1147 - DNA, 1476 bp, unidentified
  source 1..1476: mol_type = unassigned DNA; note = Bacteriophage uvig_394091 from the Index of /pub/databases/metagenomics/genome_sets/gut_phage_database (ebi.ac.uk)
atggatggcctggccattgagagacagagagaagattgcgagaatctggcccggtttagacactgggaggtcgtagagacttacgtggatcagagcataagcgctagcgacaaaacgaagaagcgcccagcctacctccagatggtggctgactatgaagcaggcctgctggacgctattgtatgttacgacttggacagacttacacgacaacctcgggaattggaggactggatcgatcgcgccgagagtcggggactgcttctcgtgactgcaaacggtgacgccgacctgagtacggacggagggcggatgtatgccaggattaaagcagcagtggctcgcgccgaagtggagagaaagggggcgcggcagtctagagcacacgttcagcgcgcccggcagggaaggcctccaaagggagtgaggcccctgggctattctacatcagggcagatcataccgcacgaagctgaaggtgtgagagcaatctacgctgcattcctgcgcggcgatagtcttcaaggcatcgctcgggccctctcaggaacacagatggacggagaggggttgggtgttccgcatcttccactccattccaggacagtggtccttgaacgaaacgccaggcgggaggtggaaggcaaagtcccccgacccgtgcctgaggatagaccatggagcgcaagcaccgtcctggggatcttgagaaatccccgatatgcaggctacagcgtgtacacctcaaaggacgtacgccgccaggagactggtgaatctagacggaaggccctgagggataacttggtgaaggacgagaatggagaactggttctgggtcagtggaatgccatcgtggagaccgatcagtggtggaccgttcagaatttcctggatgaccctgctagagtcaccaaccgctctggctccacagtcagaaaacacctgggagctggactttaccgatgcgaggtgtgcggcgagcctgtgcgaactagggctaggtattattcctgtaaagcggggcatctgaaccggactcggagtgccatcgatgattttgtgagggccttggtcgtcgagcgactcaaaaggaaagacctgcggcgacgcaagaaacaggccgatcctgagattaaggatgcattttctgaaagaatcgcggaacagagagctaggattgccagggcggaacgggactacgacgcagaagttatagagggggaggacctcgcccggattcggaaggctgctagggccgaaattacacgcctcgaggccgagaggttgacctccggcaccggcactgttctcgcccccatccttggcacttccgatccagcacaggccttcctggaggcccccatggcgctccaacggaccatgatagataccttgatgacagtaacgttgcgccgcgcgcaacaagggaagaaagggttcgctccagaatcagtggagatcgtctggaagcaa

SEQ ID NO: 1148 - DNA, 1647 bp, unidentified
  source 1..1647: mol_type = unassigned DNA; note = Bacteriophage uvig_598290 from the Index of /pub/databases/metagenomics/genome_sets/gut_phage_database (ebi.ac.uk)
atgttttaccagccggagaaagagctcaagcctgaggagatcctgctgtacctgaggaagtctagaaccgacgatcctacactggatgtggaggaaatccttgccagacacgagattatcctggatgaatatgcagaacggatctggggcaagaaaataccggaggtccagaaaatgcgggaagtggtaagcggcgaaacgatcgactcaagacctgagttgctgaaaatccttaagatgattgagagccctgatattaagggtgttctccttgtggaggtccaacgcctcggcagacccgatcttgaagacattggccgattgtccaaactgttcaggtacacgaacactctggttataacccctactaagaccttcgacctggggaacgaatacgaccgggaggcctttgaacgggaacttatgcgcggaaacgagtacctggaatacaccaaaaaaataatgaatcgggggagactgctcagcgtccagcaaggcaattttatcgggaccaaacccccatatggctacgacaagagtatagtcacagacggcaagaagaagtgtcatacattggtcattaacgaagccgaagcagacacagtaaggatggtgttcgatatgtatgttaataaggatatgggacgcgtgaatattgctcactatctgaatgacatgagggtgccaacccgcactggggccctgtggagccaagataccctcaagaacatcctggagaatgagcactacatcggaaaggttcgctggaattggaggaagacagtgactatcgtggaggacggggagatcaagaaagtcagacccaagaacgaggtgggagagtatctggtgtttgaaggcaagcatcccccgataatttcagaagaactgttcatcgctgcgcgagaaaaacagggtaggaaccaccgcactaaggtagacgccaaaattcgcaacccattggctggactgttgttctgtggatgcggtcgagtgatgtctctccggacctacaccgcaagaaatgcggcccccaggctcctctgtgacaaccagacatattgcaaaacaagttcatgccggtatgaggatgtgatttgccttgtccgcgagacactggaacagtgcatgaacgactttgagattagaattgagaatgacgataagaatttgaggcatatgcaggagaatataattaagcggctggaactcaagagcgaagagcttgataaaaaagaaatctcccagtgggagaagtactccgaagaaaagatgcccaaggagatcttccgcaagttgaacgaaaaaatccttaaagaaaaggacgatgtgcagcaggctctccgaaaagccagagagactatgccagaaccagtggagtatgaggagaaaacgctgtatttgaaaaatgcactggaggctttggaggatcccgagatctctgctgagaacaagaaccgactccttaaagcatgcattgaacgcattgattataaacgagagaaagccgaacggaagcagtctcaacagatacggtgttacgacaaggagaagaaaagaacctactgtaagagtccactcaacgttggcgggaattggactgaccctcctatcgagctttgtatcaggctggccgtaaaaaggtcc

SEQ ID NO: 1149 - DNA, 1425 bp, unidentified
  source 1..1425: mol_type = unassigned DNA; note = Bacteriophage uvig_517008 from the Index of /pub/databases/metagenomics/genome_sets/gut_phage_database (ebi.ac.uk)
atgcgctgcgtttcctatacacgcaccacatcatgcaagaacacaaaaaacattcctagcgatatcatccaacagcagaacgagcacatccagaattatatccagtctcatggctggaaacttgtcgcaaagtacagcgatcggaagaaagacgcgaatgagaataccgctttcgaagagatgacggccgatggtataaacagaaagttcgatatggtggtcgtcgatagcgtcgacaggtgcgggaagtatatttcctgtgcggaagatgttttggtgaaaaccttttttcccgccggtctgcacttcgctatagtccaatctgacttttgttcaattggaaagagtcgggaagagatagacgagtacttccgcaaagagaaaatcgcagtgcaggtaaaaagtatgcgggaatatactattagagagcagattgaagggtactacaccgtccacgatgaaaaatacggatatatcctgagcgaggacaggaaggaactgatagtggaagaggaggctgccaaaattgtaagggagatctttcagatgactttggaagagatgtccatcaagaagatcgttgctatcctcaatgagaggggcgaggaatctccaatggtgcacaacgccagagtgggccacaaacattggccgcattatgaaaacaagtggtctgaaggcgctctgaggcgaattctggaatgcactgcatacgatgggtattggaagaagactattaatggtaaggtatgtacgcttagcattacaccaatattggacccaggggttttcgacaaggcgcgagagatcatcaagaaccggacaaccaccgataatataattggaggaaagcccggcccctacgtcagaaagatctatgatgaagctactggcaagcctctctatctccgaaatttcaggtccggtgacgtggcattcgtgtttaatcctcagatgggggaacttcccaagaaacggaaaatctacattgaggaagcaaaggtgaccgaggccgtgaagaacgccatttcactggaaatggatatggctgagaaaatgaaggcatacctgcagacagagaaaatgcaacagctgctccagaaagagatccagcagtactcagaaaaggcctggatgattttccaagaaatggagcaggtggagaaggacagaattccactttacgagaaatttcgagactacgaaataggccaaaccgagtaccaggagaaaaaagaggagatccaggcccaactccagatgtatgaaaacgactttgagggactgatggaccgccttgccgatatgaagaaggcctattccgaggaaaacgagtggatcaaaactttccaacgcgaggaactccctgaaaagctggagagtcagcatgttaaaaaatgggtggacagacggttgcgcagaatc

SEQ ID NO: 1150 - DNA, 1134 bp, unidentified
  source 1..1134: mol_type = unassigned DNA; note = Bacteriophage uvig_223324 from the Index of /pub/databases/metagenomics/genome_sets/gut_phage_database (ebi.ac.uk)
atgctgtacctgagtggcctcattgacatcataatcttcatcaagctggatagatggtttcgcaacgtgggggattattatagaacccaatctattcttgatgctcacaatgtgaagtggaagtccgttcttgaggactacgatactacaacaagaacaggccgactgaacctgaatatcaagctcaccatcgccgaagatgaagccgccaacacctctgagcgggtgaagtttgtgttggacgccaaggtgcgcaatggggaaccaaatacaggtacccagccattcgggtacaagatcgagaagatagacggaatcaagcgaattatcaaaaaccctgacacccaggccgagtgtgaagatatgttcaggcggttcttcgagactaaaagtggatacgagaccacgaggtacataaaccagaaatacggaagaaatcacgcggacaatacgatcacccgccgactcaagaatttgagctatactggcgagtatagaggtatctatgattataggcccgcgtatattacgcatgaacagcatgccgagattctgaggatcctgggcaagagtacccggaaagccaaaggccgaaaagtctacttgtttgctgggatggttgaatgtcctgaatgcgaaagaacacttgctagctgcacttcaaataagctgacactcgcctatcggtgccggtatcatggggtatccaattgtgactacaagcacattgtgaaagaaaaggacatcgaggaatacttgctctccaacattaagaacgagctggagaactataagactaatatcaagtccaaactccgcaaaaaagcaccagaaaatcccgctgtctacgagaaccagcttgagaggctgaataacgtctacattatgggaaatatttctaacgaggagtacaacagaaaggcagctgagcttaaagcaaaaattgcagaccttaaagctggtaacaaccaggcggataccatcccccaagatactatgaaactgctcagcgacagctcatttcctgccttgtacaaccgcctgaataggaaagaacggcgcgccctgtgggcatcaattattgacaagataaagatcgagggcacaaaaccgagctctataaagtttttggaa

SEQ ID NO: 1151 - DNA, 1680 bp, unidentified
  source 1..1680: mol_type = unassigned DNA; note = Bacteriophage uvig_347727 from the Index of /pub/databases/metagenomics/genome_sets/gut_phage_database (ebi.ac.uk)
atgaaaaataccgtgaaggtgtgtgcgtattgtcgcgttagcacgaataagagtgagcagaaactgtcctttgaaaaccagaaaaaatattttgaatcaatcctcacaaaggacaaagggtatgagcttattaatatctatgctgatgagggcctctctggtacaaagttccggaaaagggaacaattcaacaagatgctgttcgatgcaggtctgaacatggtcacaaactctttgaagattaatgaagatcgcaacaagtacattagcactgattacgttctgagcgatcgcgaacccctgttcaatctgatctttgtaaaagattccagcaggtttgctcggaataccgaagtgaatcgcattctcaaccgcctcaaagataaaggcgtgtatgtatactttgaagatctgtgtaaaactaccgaaaatgaggcagacagaattattatcgactttttgtttggcatgtcctatcaggaatcagtggacaagagtaataagactaagtttggaatgaaacgatcatccgagaacggaaaagttcggtgcgggcatgaattgttcggctatacgtttaataaggacgagaacacccttcgggtgataagcgaggaagccgaagtcataaagcttatcttcaagcttaggctcgaagggaatgggactaggagaattgccaagtatttgaatgataacgggtacaggaccagaaataataagcagtattgcatatctcggatcaacaccatccttaagaacgcgacatataccggaaaacaagtgtacaataagaccgagatgcagaacctgggggatggctccagtaagaaacgaaaacacatcgatgactggataatcaaagacacggacaaaatcgaccagataatcgatgaagacactttctacaaagtgcagcagttgattgcagacaatactacatcaaataagggagtgtataacggcgcttctgagttgtgcaactatctgtattgtggaaagtgtggcgccaagtattacaagttcaattctagatgccgggtgtactacaggtgcaagaacaagatcaacattaacgccgaagtcaagtgtgacaacaagaacgtcaagctggattacatctacagcatcctgaacagttactgtgacgactacaagaatacatgcatctcatacttcaacatggtcaaaaatagcgtgaataagcaaatcgtcaatatcaaggaggacactgacaacgaggccgtgttggcaatcaaagagcaaattcgagccaaagaagccattctcgaagagctgctggataacatgttgaacaatagttccgagacagtgaagaaagtcttcatgaagaagcagaaacttatagacgacgagttgaaggagctggagggtcagctcaaacagtacaccgccactgacgaggagaagcaggacaaaattaattacatcaacaacaccctcaaccagctcgactaccacattaaacatatccctgatgatctggacctggataagtttatcaaaacatgcttggatagaatcattgtttacgaggataaaattgagatttccaccatcttcgatatgctggctaaggctatctgcgagttgctgggcattagcatactggacgtaattcaagaggacatatctaacaatgagggacttagactgctc

SEQ ID NO: 1152 - DNA, 1665 bp, unidentified
  source 1..1665: mol_type = unassigned DNA; note = Bacteriophage uvig_47521 from the Index of /pub/databases/metagenomics/genome_sets/gut_phage_database (ebi.ac.uk)
atggataaacggatcctgtgtatcattagggccagcaccgaaaaacaggagaccgagagtcagaaaaaagagctgatttcctattgcgaagccaagggcttcacagttgatgaaatggcgtttatcgaagtagctggcgcatctgctaggaaactcaacaagaaatatattcaaatgctggaggatattaaggctactctcctgtccagcccaaccatcaaagccgttgctctgtgggatctgaaccggctgggcagagtcgaatccaaactgcatgagatgaaggagttttttgtggcacacaaaatccaagtctactgtaagagcccggaatttgtccttcttaatgaggacggtactgcctctgatgctggcggaatagtcttttctgtgttcgcatccattgtgaagcacgacactgatgaaatgttcgcaaaaatgaatcgagggaggatgcggaataaggagaatgggatctattacggagggcagatcaagttcgggtacaccctcgacgaaaccaagcacttcattattaaggaggaagaagccaaaacaattcgcctcattttcgagctgtacgcgacgggcaagtatagcttttactcccttatcgacgagctgaaagcccgaggaatcacgaagaatggcaagaaaatcactttcgagatgatccagaacgcactgagcgacgaagcatactataacggaaagctgcccataatttctaaggacttgtttgataagtgtaccgccataaaggctaattcagtggccgtgaaacgcaccaaggagacctgtaatgtgaacttcgcagttgggcttctgaaatgcgaatgcggcaacaatttcatcgcttcaggtgactattacacatgcttctctaaagttaatcgcaaacgcaagaaagtagtggtcgagtgtgacgcgcccgttattaaaagtgatctgctggatgatctcttgtggattgtgacaaggcctctgcagcagaaattccttatgcagacagatagccagagcgtggccgagaacaacgataagatcaacgtgttgacagtcaaggtgtccactgcacagaaagaactgtcaagcttcaaagatagaatagagaaactcgaagacgcttattatgtggagggtgaaatggacgaagcccaattcaagaaacggcttgggatcctgaagagtaaaaaggtacagaccgaatccttgattaccaactacaggaacgagatcaatgacatcaaaaaggtgatagagcaattggagcagcctattaacgacagatatcttcaatctctgctcctgtctaatcttgacacagaggacatcgaagacagaaagaagattaaggagatgatgtttatgcatatagagaaggtcaccgccaagaaggtaatgctcggcaaccacaagggagtcgagatcactatcatcgcgaagagtggtttgtcctttgtttttttctacgacatttggctctcaagctttcgaaagggcgaatgcaacactttttacgaggataaacccctgtacgaggtgaatggattcatcaagagtatgaacacgaaggtgcagaatatgatatacgaaaagatcgggctcccattgttgtcatataaggaacttggagaggccgctgccgagtacgccaaaacacat

SEQ ID NO: 1153 - DNA, 1548 bp, unidentified
  source 1..1548: mol_type = unassigned DNA; note = Bacteriophage uvig_539751 from the Index of /pub/databases/metagenomics/genome_sets/gut_phage_database (ebi.ac.uk)
atgactatggaccgcagcgcccatagcagactcgcagttacttaccggagaatctcctccctcaaccaggtcgacaacaactctatgtgcgctcaggagcaagcaattaaggattatgcgaagaagaatcacctgaaaattgtcgaggcatttcatgacctggctaaaagtggcacttccgttcaaaacagaacaggttatcagcagatgatggaatatcttgagaaacaccccgaggtcacctgcgtgttgctccatcacctggaccgcctgcaccggaacgtgcgcaaccagctgaatgatatctacaccttgaaatgcaagggcatagcagtggtgacaaccgatgggctgaatagcatggatgaagactgtatgagtgaaatacttgatgaggctgcctccgcagagaagtactctaggagactctcaaaggaaacgatgaagggactgcgagtgaacgctgaacaaatgcttcacaatgggggcttgccaccttacgggtatactgtcggttcagacaaaaaactgtacattgacgaggcgaaagctcctgcggttcgaaaaatgttcgaaatgtatgctgccgggatgtcatataaacaaatcgcccagtggttggacgacaatgggtttacaaccgtgaagggcggcaactttaagagtaccagcattaagaccatcctggagaacgaaaagtactgtgggacctacttctggaataagcgggcctccaaagatttcagaggcatgaggaacagccatcagcagaaagaggattactaccaggttcatggggccattgagccaatcgtgtccgaagagctgttcgacaaggttcaggaaaggttgcacgataataagaatagaatctgcaactacaacggcaaaaactactatcccttcaatggaaaggtgttttgtggcaagtgtggtaagaaactgtccggacacgtgcagtattcacggaccaacaagaacaatgacctggtaaagcagtataggttctcttgctcttgcccggctgtaaagacagtcaatgagaagtacctggacgacatggtgatcaacggccttcgcgcatgcattttttctcccgagaattatgaggagcttgtggacaagctgaatgcatacggaaaaatccaagaaagggtcattgacctccagatagaagtgttgcggtcagataaggagaatgccgagaaacgatgtagcaatttgatggatatagccgaaaatggagacggaacaaaaagtatcgttgataaaatcaagaagcttgacaaacggatggccaagatagacagacgaatcagcgagtacgaagccgctaaaaaagtctttaaggccgaggatattgatcggattcgcgaccgattcactgaatatgtgatggagaaccgcaacgaggacgtactcggattccttgaagatactgtggacaggattgaggtcgatgatacagtaagggtgcacctcaagaaaaacatctgtgtggatagggaaacgaagaaaggttttcgccaggagagatctatcaaaaag

SEQ ID NO: 1154 - DNA, 1344 bp, unidentified
  source 1..1344: mol_type = unassigned DNA; note = Bacteriophage uvig_124673 from the Index of /pub/databases/metagenomics/genome_sets/gut_phage_database (ebi.ac.uk)
atggagaggattatccaaaaagtcacacctcccgcccggaaaaaagcaccaaaactgaagcgggtggccgcctatgcacgcgtgtcatcaggccgagaggctccccttcactcattgtccgctcagatctcacaatattccggaatgattcagaagacccccggctggcagtatgctggggtgtatgctgatgaggccctgacaggaacaaaggattctcgcggagagtttcagagactgctggctgactgcagggccggcaagatcgatatgattataactaaaagtgtctctcgatttgcgcggaacactgttacgacactgagaaccatcagggaattgagacttatgggtgtggacgtcttcttcgaagagcagaatatccataccatgggggaggacggtgaactcctgctgacccttctggctgcatacgcggaagaagaagcaaggtccgtgtccgagaaccagaaatggcgaatcaagagcaattacgaacagggcttgccttggtctattactatgtacgggtatcgccaggtaaacgggcgactggaggtggtaccggaggaggcagagattatcagactcgccgcagatctgtacctcgagggatacggtcgctgtaagcttgaagacgccttcgcggctgtgaacattaagggccggcatggtgctaacatgggaggaaatagcatcgttgacctcatatgtaatgagaagatcgtcggggacatgctccttcagaaaacctttgttgtggacccaataacgaaggaggtgcgcaaaaacaatggcgaaaagccccagtacttcgtcgaaggtagccacgaaggcattctggacagagagacatacgaaaaggtactggctgaacgggcccgaagagcggcagcctataaacccagatctggcaactatgagcgcaaccgctttccattttccggaaaaatccattgcgggaagtgtgggaagagttttactaggaaagtgcttaacggaaataccccttacgagaaaaggggctggctgtgccggacctttaatcaaaaaggcaaggcccactgcgatgcaaagcagataccggaagagattctcaagcgggtgagtgccgaagctatgggtctcccagagttcgatgaagcagctttcgccgccaaggttgaggagatccaggtccctgagaatggcgttctggtgttcgtcttctacgatgggcacacagtgactaaaacctgggacaaccctagcagaaggcacagctggaacccagaaaataggcaacgcgcaagagagctggccttgcgacaggccgccgagaggcggttggccaagtgtcaacag

SEQ ID NO: 1155 - DNA, 1188 bp, unidentified
  source 1..1188: mol_type = unassigned DNA; note = Bacteriophage uvig_430255 from the Index of /pub/databases/metagenomics/genome_sets/gut_phage_database (ebi.ac.uk)
atggccaagaagctcgatccgcaggaaatcgagcagtctagacggaaaaaaacgagggctgataaccgggaggaaaggaaggagcgaattcatgatggaatacgaaagaacagagaaagcggtggcgtgattattataccacctccccctgccgtccaagcccaaggccagacccctcggaaaatgcgggttgccgcatatgtgcgcgtgagcactcaggaggagcagcaagtcggctccttcgaaatgcagatcgtgtacttcaagagcaaaattgagtccaaccccgactgggagcttgtgaagatctaccaggattacggagtgtctgggacctcaactaataagcgccaggggttcaaggatatgattgacgacgctaaggccgggaaaatcgaccttatcctgactaaggggatcaatcggtttggccgcaacacagtcgatattttgaacaacctgcgcacattgaacgcacttacaccaccagtaccagtcaggttcgaaagcgagggcctttcatccataggagacggttcaaataacctcctgatcgctgttctcagcgccttggctgagttggaatcccagcagaaatctgaggccataaaaaatggcattagatggcgcatggccgaaggaatctatcagtttagcgtgatcaacaccctggggtactattgggatcacttcggcagactgttgatcgagcccacagaagcaaagattgtggagtatatctatgaatcatgcttggaaggcgctaccccagcagagatcgcaaccgcactcaccgaacaaggaattaaaagtcctaaaggtaaagacttctggagggccgctaccatccgaggaatactgcgaaatgaaaagtactgcggcgacgctctgatgcaaaagacttgtacgattgactttagggagcataagagtgtaaagaatactatgctgaataagtactttaaggaggagcaccacaccgcgattataaagaaatctgattggcagaaggtccagcagatcctcgacgagaaacccctgcctggtaaaagtgccagattgcatgcgatgcccaagcggtttacagttacaagaagtaaagacaagtattttcgcgggtacattatcttggatccgagatggactgcgtccgagaggagggaactcctgaaagagctgaaaaatctg

SEQ ID NO: 1156 - DNA, 1662 bp, unidentified
  source 1..1662: mol_type = unassigned DNA; note = Bacteriophage uvig_581111 from the Index of /pub/databases/metagenomics/genome_sets/gut_phage_database (ebi.ac.uk)
atgtcagatactcccaaactgaatgccgctttctacggtcggtatagcgccggacctaatcagtcagagtcttccatcgaaggacaaaggcgggagtgttacgccagagcaaagagtcaaaatactatcatcaggaaagactacattgaccgccacattagcgggcagaccgaccaacgcccacaattccaacagctcatgaaagacgtgaaaaagggcttgtataacatcgtgtatgtctacaccatagaccgattttctagaaacaagttcgacattgcaaagtacaagaatgaaatgagaaaagcaggctgtcggttgatttcagccaaggagtacgtacccgccggtccagaaggaattatcctggagagcgtgctggaaggtatggctgagtattattctaaagagctgtctcgcaaggtgtctcggggaatctacgaaagcgctcttaaacaccagcatatcgggggcactgttccatttggtttcgtgctcgagaacaagaagtataaaccagatcctattaaagcaccgatcgttcgcgagatttttgagcgatacgtgtccggggagcctgctgtggatatttgctcaaatctgaacaacaggggaatcgctacttccgtggggcagaagttcaacaagagttccttgaacagaatactctcaaatacaaagtacataggcacatacacatataagagagcttacatagacgagatcacacaggagaaaaagaaggagctgatcgaattcaagaacgtgatcgagccgattgtcagcgaagagctttttatcaaagcagggcagagaatggaacagaataagcatacctcaaagcggaagaaggataaacctgccgtcgaatttctgttgagcggaaagcttttctgcggcaagtgtaaagctcctatgacaggcgactccgggaccggaaaaagtgggaacacctattattactatacatgcgccaacaagaagtccaaacgaggtaaggatgcttgccggtctaaaagttatcccaaagagaagctcgaggaattcattgttaagttcaccagggatgacattctgagccccgaaattctcgattggctgtctgaaaatatcattcaattgcagggcaaccagaaagatgacatgcagatcagactgatgcttcagcagaaaaaggatgtagagaacaagatagccaatattatgaccgcgatcgaaaacggcatcttcaccgaaacaactaaagataggcttgagaaccttgaggaggcaaaacggaacctcgagtacaatatccaggttgaaaaattcaagaataatgcccccgcggaaagcaaagatagtattatctactacctggaacagtttcgcaaagacgacattaaagacaatgattgccagaggctgataatcaatactcttatagacaccatcattatagatgaggagaacgacaggggcatcgtggcctaccgatataatgatgacaacaatggcacgcgcgaattttccatcaagaacacttttgacgtatttgagtgtgtctcctatggcgggctgagtggaacgaagcttacgctcctgagcaaggaaattatcgaagtgtgtaaggagaaaaacaacattatattctttgaggtcctgcagaattggctcgcggcc

SEQ ID NO: 1157 - DNA, 1143 bp, unidentified
  source 1..1143: mol_type = unassigned DNA; note = Bacteriophage uvig_154343 from the Index of /pub/databases/metagenomics/genome_sets/gut_phage_database (ebi.ac.uk)
atgaccgaaaatgttttgaaagggaaatataatggtgggacaatcccaatcggctttaaggtggacgaagagaagttcttccagatagacccgctgaaggcacccttcgtggtggaggcatttcagaggtacaacgacggagccacgatgaaggaactgatgaactggctgaacgacagtggagtgactaccaatcggaaccagaagttcacctacaactcagtgcagaaacttttgacaaacaagcggtacattggagagaatcactttaaggatatagtgatgcccgattccatccccgcaatcgtagataaggacttgttcgaggaggttcagcaaaagattaagaaaaatagccgcgcgccggcacggcataaggccgaagatgactatcttctcacgacaaaactgttttgcggcatgtgcggtgctatgatgtttggcgagtgtgggacaggcagaaacaaggtggtccaccactattataagtgcgccactgccaagagattcaagacatgtaaaaagaagaccgtgagaaaagaatggttggaggacctcgtcatcgctgagaccatgaagctgattcaagacgatgctgtgattgacgccattgtggccgaggtcatggaactgcaggaccaggagaatacaactctccccctcctggagaagcagatgagggaggtcgaaaatggaattgagaacatgctgaacgccatccaggctggcgtactcaccaactccactaaaagccgcctggaaaaactggaagctcagcagaaagagctcgaggttaggatcgcggaggaaaaaattgcacaacctcgactgtcagagaatcaggtcagattttggctgacccgctttcgaaaacttgatcctaatgtaaaaagtcatcgggaaacgttgataaacactttcgtcaatgctgtgtatctgtacgatgagaaggtgctgatcactttcaattacaaagacgggacaaaaactatcaccttcgatgaaatcgcggccaaagatgcaccagaaggcaacgggtctgatcttggttgtttcgccccacctatttgcaggatagttctttacgatgccgctttttttatccccaagaagctctggcaaaccgttccagactctgagcct

SEQ ID NO: 1158 - DNA, 1713 bp, unidentified
  source 1..1713: mol_type = unassigned DNA; note = Bacteriophage uvig_597740 from the Index of /pub/databases/metagenomics/genome_sets/gut_phage_database (ebi.ac.uk)
atgcctcaccccgccgtcgcgttggataagaaacccgtgtgtagctattattctagaaagcgggttttctgtgaagttgtgctgatgcatggagcttatatcctcgcacggtatagtaccgacaggcaaaatgaggattccatagaagtgcaggtgtcagcctgtcgcaaatggtgcgacgagcgctccctgcccgtcctcgatgtttttgcagacgaagctactagcgggatgaaggacacccgccctgagtacgccagaatgatgcggcagctggatcgcggtggagcagacactgtggtgatctacgatcaaagccgcatgtttaggaaaatgtctgcctggtttgacttcagagaccggctcgctaggcagggggtgagggtggtttccgtaactcagcccatgatcggaggagatttgcgagatccagccaattttgtcgctgaggggtcaatggcccttttcaatcagatgtgggtgctgcagacaagacaaaaggttgtggagaagatgcgattcatggccaggcagggtcttcacaccggtggaacccctcccctgggctttcgcgtggaaggcaagcgacttgtcatcgatgaggcggaggccgaaacagttaggctgattttcggccgatacgcagcagggtggacgtacagagaaatcatacgacagctgaacgctgagggacggcatactaaaacaggaggcgaattcggaacaaattcccttcacgatatgttgaaaaacccaaagtatgtcggcgacctggtgtatggaaaagttgagaagagaccagacggcagtagaaattctcatgctgtggccgatagccagatcgtgatcgagggcgctctcccggctattgtggacttggagacctgggacaaagtccaggccaagatgaaagagaacaagagagaggccgttgggcggccggcttccgcccgcgaatatcctctcaagggtaaagtgttttgccgcgagtgcaaaagtgctatggtagtgaccgctagtaaccggggtggcaagaaatacttctactatgcatgtgccgccaagcacaggaagggcttgtgtgataacatgccaatagcagtggatactttggaaagggtggtaagcgacgcagtccgagaacgcttctgcgacccccagaacgtcgaagccctgattaaggtattgcgagaggaacgggggaggctctctgaatctgcagtcgcacggctcaaggctctgcaggcccgggactcagacatcgggaggcagctggaggctgctgtccaagcagtgctgggcggcctcaacagccctactttgtcagcccgcatcacgcagctggaggttgagcgagctcaaattgaacacgatatgcagcaactgagagcccaggtgtccggggcggatttgcccgaagccagaatgcgagagctgctggctattgcaatgaatgacgccgcggccgtactgagcattgtggcgcgcgtcgaggtgggcagggaggagatagccatttggacaatcctcgatgcagatcctagcgggaaacttgacttcagtgaagacggtgtagcgttttcccctcccccaaatatctactctaactcaggctgcccatctacgggaaccaccaattactacaacatcgtcacaccggccgggttgctgcttttttacattgccagaccacggcagagagacaggcggtcc

SEQ ID NO: 1159 - DNA, 1647 bp, unidentified
  source 1..1647: mol_type = unassigned DNA; note = Bacteriophage ivig_2971 from the Index of /pub/databases/metagenomics/genome_sets/gut_phage_database (ebi.ac.uk)
atgcctgatgattgcgccgtgatctacgctagatattctagtcacgctcagagagatgtaagtatcgaggaccaggtggccgattgtcggatctatgcagaacgcctcggcctgactgttttggaggtctacgccgaccacgccacaacaggacgatccgacgaccgatgccagtttcagcggatgatacaggacgcgaagaaggggcgctggaaaaccgttcttacctggaaaacagacaggttcgccagaaatcgctacgactcagcagtttataaggctaggctgaaaagatatggcgtgcacgtgcagtacgcaaaggagagcattcctgatgggcctgaaggtattttgatggagggcatgttggagagctacgcagagtacttttctgctaatctcgctcagaatgtgaggcgcggtctcaacagtaatgctcagaagtgcaagcttaacggcccagccccgctggggtacaggcgcgggtccgacggaggatatgagattgtcgaatcagaagctgctgtggtgagacgcatctaccaaagcataacacagggcaccggctatgcagaactggtcagggaacttaacgcggctggcattaagaccaagcggggctctagctggactaaaaattccttccacaaaattctccgcaacgaggcctatatcggcgtataccagtatggtgagcataggaccgaagacgctatcccacccatcatcacgaaagaagagtttgcagcagtgcaaaataagcttgagacttacaagaaacacaacgcccacactggggaaattagggagtatctgctgacagggaagctcttctgcggcaattgtggagaggggatggtgggaatttgcggaaccagcaagagtggtgtgcgacattattactatatgtgtaaagggcaccaggcgcataggtgtgatttgaaaaacgttaaggccgcccaactggaggaccaagtggtaagctacacaatgcagtacgtgctgcaggacgatgtcatcgccgaattggtcgacaaactgctggagtatcaagctcaacagcaggatagtggaatgcttgaggccctccgggcagagctggctgacgtgcagggtcgactggataatctgatggaagccatcgaggccggtattatcaccaaaactactaaggcgagactgtctgagcttgaatccgaacaggagcggctcactcattcaattacagtcgaaacctgtaggaacaccggcctcagccgggagcaactgatctttctgttcgatatgttcagagcaggcgacatgagagatttggattttagacggcgccttatagacacctttgtcaacgccgtgtttgtttacgacgatggacggctgaagattgtgtacaacttccgggaggggaatgagaccgttacgaaggaattcgtcgactccgtggaatccggagcggtggattctgtacgaatggtagttaactccgtgtaccacggtcatcccaaaggctgtccattcagcttttccctgaaagcaagctcacccatctctaatggacgctctgggtgcttcaacatcaacattgtctcaaagcaggaggtgatagggggcataacggccgaagcccttctcttgacagcccccgat

SEQ ID NO: 1160 - DNA, 1599 bp, unidentified
  source 1..1599: mol_type = unassigned DNA; note = Bacteriophage uvig_458373 from the Index of /pub/databases/metagenomics/genome_sets/gut_phage_database (ebi.ac.uk)
atgttggtgtttggaatctacgcaaggaaatctttgcactctgatcaaagcgattctgttgagaatcaggtgctgttggcagaggaatacatcgccaagcactatcccgatgtggaaaagcgcttgatctactacattgatgaggacagaagcggcggggacatgtttagacccgactgggaacgccttatcactgacatgagaaatcggatcctcgatataatcgtctgttacaaacttgatcgggtggggagggacgttgctgaccttgcgctgttttaccgagaaattgtgcagtatgatcttatcgttgtaccagtaagagacaacctggagattaaagaggacatgacccccatcgaaaaggggatgatgtacatgaatgccgtgttctcccagattgagagggagaacacaattgtaagagtctcagacaatatgatcaaacttgcggaaaagggctattggtgcggaggtaggccaccgatcggattccagttgcagaaagtgatggctgacaattcaaggatgcacaccatcctcgtcgaaaatcctagcaccctgcctttttaccataagctcgtgcacgatttccttacggaaggccttagtcttgggggaatggagacaaagtataagaaggagaaattcacgacccctctgggcgccgcactgaccggctcacaaatttggatcctgctgacgaacccaaattacgtcgccgctgatggcataatgtatgattattacgctgcaatgggctgtaaaatggccaaaccccgggaactgttcgacggccagcatggaatcatagcttactgcagaggcagaggggctggcaaaggttcacataagcgaaagaggattctcaaccctccagagaaatggattatctctgtgggacaccacctgccaattctggattcccaaacttttctggcaattcagaaccgctttggacagaacgtaatagacaagaccagaaaacacaaaataggtatccttaagggggtgctgcggtgttcctgcgggcggctgatgaggacaaagtacaagtacgacaaacagtatgatatcgagtaccgccactattattgtcccacacgggatagactgggacctgaatattgtacagcccggatggtgcggctcgacgatttggacgatgaggtgattcgacagctgacagccatgtccctggattacgagttgattgatcagtacattagccccgttataccgctccctaatatgcgcactcgcgtcactgttgaaaaggaattgaagtccgtccaaaacaagattagcaacctgacccaggccctctctaacactgacgctatcgccgccgcgaagtacatcataagctccatcgaggcactggacagtcaaattaccaagctcaaaaaagaattgtatgacatatctagtgtggagagtaagactcgcaagagggaggtcgacaagatggagcgatatcgcatggtttgccatatcatcgagaggctcgacgatgccgattatgacgagatcaacggtttgatccgagaactgttcagcgagtgcgtgtgggacggtaaaaagctccatattaaaatt

SEQ ID NO: 1161 - DNA, 1338 bp, unidentified
  source 1..1338: mol_type = unassigned DNA; note = Bacteriophage uvig_200526 from the Index of /pub/databases/metagenomics/genome_sets/gut_phage_database (ebi.ac.uk)
atgaaaatagtgacagagatcggggctattgcccccattaaaaagcttaagaaagtgtgtgcatacgctagggtgtccaaggataaggacgccatgctgcaatctctgagctctcaggtgtcccactataacaagcttatatcttctaatccagaatggcagtttgccggcgtgtatgcagacgagggtatttccggcacgaaagaagacaggcctgaattcattcgcatggtcgaggacgccaaagccggtaaaatcgacatgatcataactaaaagtatcagccgattcgggcggaataccgagacagttattaagacagttcgaatgctcaaggcaattaacgtagatgtttactttgaatcacagaaaatgcacactctgtccgaagaaggggaattcatgctgaccgtccttgctagttattatcaggaggaggcgagaagcgtgagcgagaatatgaaatggcggatcaaaaaagactttgagcagggaatcgcctggggcggaaatgacaatttcggctacaagctgaacggcaggaccctggaaatcgtccctgagcaggcccagatcgttaaacggatatttgatatgtatattaacgggcttggcgtcttggcgattgctaaagcgttgaacgaggaaggtattaagccaacaatgggaggcaagtggatcaagagcaacgtgctccgcgtgatcaccaacataaactatatcggagacagagtactgcagactacctttaggcccgattttctgtccaagaaaaagaagattaataagggggagttgaagcaatactatgtcgaggatgaccacgagccaatcatagacaaagagactttcatgaaagctcaactgattaaagaggaaagagcaaaaaggttcaagcttgatgtgtcaaagcggaatattacctacccttttacgcagaagatcagatgttcatgctgtgggtccacctaccaacataagaccactaagtacaatcagtactggatctgctcaacattcaatatgaagggcaaaaagttctgcaatgacagcaaacagatccccgaggagaaactctatgaggctatcaacagctacctgggcatcgatgaattcgacgaggatctttttaacaagaagatcgactacattattgcaaaaccgaacaacgtattggaaatccatctcttcgatggtaaaatagatgaaattaagtggacagatcctactcgaaaaaactcttggacgcccgaaatgaaggaaaaggcccgcattaagagtaaagagatcgagaagaatctcaagcgcggagccgatggaaagtgggtgaagagtgaa

SEQ ID NO: 1162 - DNA, 1575 bp, unidentified
  source 1..1575: mol_type = unassigned DNA; note = Bacteriophage uvig_307306 from the Index of /pub/databases/metagenomics/genome_sets/gut_phage_database (ebi.ac.uk)
atgaacgtggtgatctacgcacggttctcctctcactcccagacggagcaatctatcgagggacagctgaaggcctgctacgaatacgctgagcgcaacagctacaccgtaataggagagtatatcgatagagccttgaccggcacaaacgacaatagacccgagttcctccggatgattgaagatagccgcaaaaagacttttcagggcatcttggtatatcaattggaccgattcgcacggaataggtacgattccgctgtatacaagaaaaagctcaaaaagaatggcgtgagagtgctttcagcccgcgagaacatcagcgaggatgccagcgggatacttattgagtcagtgctggagggtctggcagaatactatagcgcagagttgagccagaaagtgcgaaggggacttgatatcaatgccagcaagtgtctgtgcaccggcgggggtgtggctctgggtttcaaagttgacaaagaccgacacttccaagttgacgaggatactgctcccgtcgtgagggaaatctttgaaatgtacgccaatggcaagacagttaccgagatcatcactatgatgaatgctcgcaatatagtgactagtcgggggtctgcgtttaataagaactctttgaggaagatgctgcagaacaagagatatatcgggacctatacttacaaagggacggagattccaaatggaataccccggattattgacgacgatctttttatgcaagttcaggagatgatgaaaaagaaccggaaggcccctgcaagggcccgagcgaaagaggagtatcttctcacaaccaaactcttctgcggccattgcaaagaaatgatgactgggtatagtggaacctctcacacgagcgctgtgcaccactattacatctgtaataaccgcaagaagaaactgtgcaagaaaaagaacgtgcagaaggacttcatcgaaaagctcgtgatctcagaatgtcgaaagcttctgacaccggaaaatatcgaaagaatttctcacgaggtcgttgccgcatcacaaagggaccaggacatgaccaatgtgcgccatctttccaagcagttggcagatatcgaaaggaaaaggaaaaacctcatgtcagccattatggagtgtgacagtgatctgattagaaaaacactgtacgagcagataccactgctcgaaaaagagaagtccgacacagaactgcagctgacccttgaaaaagccaaacaggtcaagctgacagtgtcagaagtccggttcttcctgaacgccctgcgcaagggtgatccagattccattaagtatcaaaaggcactgataagtgtcctcgtcaacgccgtctacctttatgacgacaagattactctgatttttaacagcggcgatcatgccgtaaccctcgatgctgcgctcttggagaagatcgagcagcaggcggactccgtccccgtcgaagacagatttgtgtatgaacagctggctagtacaattggaagaatctccgagccttacattgcttggggcactgtttttgtgcagaccaaacggcattctcttcct

SEQ ID NO: 1163 - DNA, 1581 bp, unidentified
  source 1..1581: mol_type = unassigned DNA; note = Bacteriophage uvig_396131 from the Index of /pub/databases/metagenomics/genome_sets/gut_phage_database (ebi.ac.uk)
atggccgttaagctgattagatgcgccttctatgcaagattcagctgtgacaagcagagggacgcaagcatcgaagaccagttgtacgcgtgcaacgtgtacgctgaaaaacatgggtataaagtggtcgctcaatattgcgattacgcgatgaccgggcgcagcgacgatcggccccagtttcttcaaatgattgaagacgcaaagcagggtgcgtttgatgtgatcgtagtctggaaaatgaatcgcttcgctcggaacatagaggagcagtactactatgaacatgtgctgcgcatcacatctggcgtcacatttgaatccaccaaggagaacattgtgggcaattccatcgaagccacttctaataaggcccttaatgcattggtggcccagattcaatcacaaaacacttcagaggacacaatgcgcgggatgaccggaaaggcagacaagtgtcagtatctgggttaccacaggtttggatacagccacgagggcgatgtgattacgctcgatcctgtcgaagcaccaatggctaaaaggatacacaccgactatctcgctggaatccccattcttgatatttgcgcgtggctgaaaagtatgggcgtaaaaacgatgaagggaaacgacccggggtacacttttgttactgggattctgaagaatctcgcctatgccggtgtgtatatctggggcacgaaaaaagatgacgaaggagaggtaattttggatgagcagggtcagcctgtcccactcgtttataaagaaggcggtatgcctgccatcgttgacatggagaccaagctggcatgtatcaaaaggctcggccttaagaagcatagtagaacaaaggccaacttcatgctgtctggcaaactgtattgttcttcttgcggaaacccgctgcacggagaaacagctactggcaagagtgggacagagtacttcaggtacgcatgccaaaaaaaacgaaagacctgtttcggcactctgcccaaaggcgaggccgaggccgacgtggtcagaaacgttcgggccctcttgcgcgatgtcaagcttctggagtggctcatcgactgccacatcgagcataagaaggctcacaaaagtgaagtgagcatcaaggcaaccaagaaagaactgcgggaactcgggagacagcgaaaaaatctcctggatgccgtggctgatggccttgaataccggcatgtcaaggacagaatggctgccctggatgcccaggaagagggattgaagaacaggatagagaaattggagagggactccggggaggtggaccgcgaagacatgctgcggttcttcagcgctttgagcgagggcgagatggaagatgaggacatcctgcgagtatttgtgaacaagatatggctgtacgaggggtctgctgtggcggtgatgaattttgattcacgagagtcctcccagtatgagattgaatacgcccttaatcagcatgagcaccccgttcagaggtgctcatgtaacgtcgatatggtgcctccacggggattggagccacccacccacgggctgggtaatagaagatccatccgc

SEQ ID NO: 1164 - DNA, 1077 bp, unidentified
  source 1..1077: mol_type = unassigned DNA; note = Bacteriophage uvig_568903 from the Index of /pub/databases/metagenomics/genome_sets/gut_phage_database (ebi.ac.uk)
atggtgatcactaaagatctgtctagactcggaagagactatatcaaaacaggattctacattgagagctactttcccgaacgaaatattcgctacatcgcgctgcttgataacctcgacactttcgaagagaattctagcgcttcagatattacgcccttcaaagccgtgctcaatgatatgtatgcaaaggacatttccaaaaaaattcggagtgtttgtaggcagaagagggaaaatgggcaatacataagtgcataccctccctatggatatatcaaggacacatcaaatgaactcgcccatttgatcgtggacgattacgcctcacagatcgtcaagcgaatttttgacatgtacatcaacgggatgaccacctgtaaaatatgtgacgctctgaacgctgagaatatagaaccaccggccgtctaccttaagatgaatctggtgcacaggagcgaggattattataagtggcgcccaagctctgtgcaaaaaattcttaagaatgaagtgtacctggggaagctgctgcagggtaaaaccaaaaagctctcctacaagtccaagaaaaagatcgacttgcctcgggaagtgtggattgtcgaagagaacgcacataagcctctcattgatgaggaaaccttcgaaaaggtgcagcagatactgcagcggaagtacaacacccgaaaccgcaatagggagtaccttctgaagggcataacttattgccacaactgtggcaacaagctgaactttgttactaaaacggagaaatacaaggataagaaatacgagagaaggtatgttgtatgcggtacagccaataagggcaaatgcatcaaacagtataataactatgacaagttggagaaggagatcttggactacattagaaaagtctgcatcctgaacaccaactctgagacatataagaaagtcatcttgaagaagaagaacgacaatacagaggtagttaacgactatctgagtcacattaaagtgctcgaagagaaaatcgcttccctcaacaagaaagtggagcaaatctacgatgatcgccttaatcggtgcaat

SEQ ID NO: 1165 - DNA, 1677 bp, unidentified
  source 1..1677: mol_type = unassigned DNA; note = Bacteriophage uvig_199869 from the Index of /pub/databases/metagenomics/genome_sets/gut_phage_database (ebi.ac.uk)
atggctaggaagtctcggaaaaaccgaaacgtagagtccaacatccagacagtggtaaagaaagagaatctgctggacacagccgcttacatcaggctgtccgtcgagaacggcggcaacgaaactgacgaaactcttgtcgtgcagcagatgcttgtggaaaggttcatcgaagagcaccccgatctccgccttgaagaggtgtacatcgacaacggctttacgggcaccaatttcgagagacccgggttcatgaggctgatggaggatgtcaggtccggaaaagtccagtgtattgtggtaaaagatctcagcagatttggtagggactacttggaaaccggttattatctggaaactatactgcctaagcttaatgttaggttcattgcaatcaccgacgattatgactcctcacgcaaggaggaccgagagaacatctctgtacccattaaaaacatggtgaatgccatgtacgctaaggacatgtccaagaagatcttggctgccaaggaggcccaaaagaggaatggaaatattaccctgtcaaaggtcgcttttggttatgtgaggagcgaggataagacgcgacaggttgtggatgagactgtcgcccctgttgtccggatgatcttccagtggaccttgttgggagtgagtaaacgggaaattgctgacagactcaacttgctgggcatcgcgaccccggggcagaaggaaaagcgcaagattgcaagggttccattggaggagactaagtggaacggaggcaccgtccggaaaattctggaaaaccctacatacacaggggatattgtgacaggtaagctcaaacaatctctgtataagggcgtgaaacaatatagaacagttccagaggaatgggacgtccagaaagatatgcacacaccactggtggcacgggatgattatgaggaactccaagaatcacgcgaagaaatccataaagtgaccaaaaaacgccagagcagatgtatgaaagacagagaaaagtaccaagacagtttccccggtatggtgagatgcggggagtgcgggaatgttatgtactttcggcggtacacacacaattacactaccaatgagaaaatggggagcgattactattgcggcaatgagcagtgttctagaaatctgatagagggaaatctgctcaagattctcgtcatggatcagattcagatactcatcaaaagtatgtgcgatagaaagctgcttctccagaagatgaaatcagccaccaaggagaacaacattttctacaaggccgcagctaaagtgcgaactcttgagcgaaagatcgcccagacggaagagcgcaacacccgcttgtacgaagactacgtggccggcattgtggataaagacgatttcgatatgatgaaggaacgatatatcggagagctgcaaaatctgcgcgaggagctgcaggtgcaagagcagaatcagcggatattggagaaaaaagcaaatcggtatatggacatggtgaaccatatggagaaatatttggacaagagagaatacaacgaggcgctggtccaggaactggttgagtacatcgaggtgtatgccgacggcagcatccatgtatgctttaagtgtaaggacgaatttcagcagatcgcggaggaaatggaaggggttcaaatagga

SEQ ID NO: 1166 - DNA, 1305 bp, unidentified
  source 1..1305: mol_type = unassigned DNA; note = Bacteriophage uvig_181597 from the Index of /pub/databases/metagenomics/genome_sets/gut_phage_database (ebi.ac.uk)
atgacaatcgcctgggcctactgtcggttctcctccgaccaccaacgggaagagagcatagatgctcagatccgggccattcgcgactattgcgggaggaataggattaccctcgagaaaatctaccgagacgaagcccgctcagcaactactgatgatcgaccatctttccaacagatgttcagtgatattaaggagtacccttgtgatcttgtcatagtgcataaactggatcggtttagcagagatcggtatgatagtgcattttacaagcgaaagctcaaagagcgaggaatcaggctggtgagcgtgcttgaaaatatagacggctctcctgagtcaataatccttgagtctgtactggagggtatgtcagaatattatagtcgcaacctcgctagagaggtgcaaaaaggtaagaaggaaaccgcgtataagtgcctgcataatggaggtgtgccacccattggctaccaggttgatggatccggcaagtaccatgttgaccccatcgagtccaagtggattattaaagcctatgagatgaaagcaagcggccgaagctatatggagatcgcagcctacctgaatgggattggggcccgcacaagacgcgggcaggggttcacgaagaatagtttccacgacctgtttaagaacgagaagtacaagggggtctatgtttacaatagagcagccccgaaaacatccggaaaaagaaacaaccacttgaataagagtgccgaggatattataaggatcgaaggcgggataccccgcattgtatcagacgagctctggaacgaggtcaatatgcagatgaaggaccggactatgaacgctaggcacaaagccaaacgcacgtatctcttgtcagggatcatctattgtggagagtgcggttcccctatgagcggcaatgccagacgggctggtaggaacaagactgaatacatcacctacgattgtaaccgcaggcacagagaaaggacctgcagagctaaaggaatcaacaagaaatacatcgaagacctcgtgatttctcatctggaaaatgagttttttacacaggaaaacgtgttgcagctgagccagcggattttcgacctgcaggaacaaaggaaaatggaagtcaccccagagctggctgcgctgaaggcggagcttgctgcaaagcagaaagagatgaacaacattatcgactctattaaaaagggcggatacaaagactggatgggcgatttgggcgacgaaatcgacgctagaatcaagtatcttgagggcaagatccagtactccgaatct

SEQ ID NO: 1167 - DNA, 1512 bp, unidentified
  source 1..1512: mol_type = unassigned DNA; note = Bacteriophage uvig_38906 from the Index of /pub/databases/metagenomics/genome_sets/gut_phage_database (ebi.ac.uk)
atggcttatgccatgtacctgagaaagtcacgcaaggatgatgacacaggcattgaggatacccttgcgagacacgagaaaatgctccaagacctcgccgaccgaatgggaatattggtctgcgaacaggatgtgtatcgagaggtcgtgagcggcgaaagtatagaggccagacctcagatgcaacgcttgctgaaacatgtagaattgggggaatacgatggggtcctgtgcgtggaactggagaggctgagcaggggtaatggggaagatcagagtcggacactcaaggcgttccaattctcagacactaagatcatcacgctcaacaagacatacgatctcgccggcgaagatgaattcgatgaggaatttttcgagttcggtctgtttatgtctaggcgagagtacaagatgattaagcgccggctcctcaggggaagaatgcagagccagcaagacggatattttatcggggcaaccccaccttttgggtatgacaaaatgaaaaatccagatggcaagggctggattctcgtgccaaatgagcagacacccattgttcagatgatcttcgagagatatgccagcggggaaagcgccgcgtctattatgcacgagttgaacagaatggggatccagccctccaaagtctatgacaccgcttggacctcccatcgagttcaggacatcatcaagaaccgggtatatctgggcgagatcaacgtgaagatcaaaaggaccgagaagcggattgaagatggtaaaattatcgaaagtcgggtgcgaaaccttaatcacggaaccgtcaaaggtaaacatgaacctatcgtgagtgtcgaaacgtttaataagtgtcaggaacttctcgcaatgcgctccactaggcaggctgtttctaaacaactgtcaaaccccctggcctcatttctgcactgttccaagtgcggaaaagtcatgaggagaactacttacacatggaagggagtgacaactgagcgcttgcagtgtagcacattcaagtgcgagacccgcaattcatccttgcccatggtagaaaatatgattctggacgccctgaaggacgaactgagccggcaactgaccgttcttgctgagtatggcggcgtggaagccgacgatacggatgagaaggcacttgagatcgtggagagtgagatcgaaaaaaaggacaagatgctcgacagggtggacgagctttacgaattgggcgactactctagagctaagtacctggatcggagccagaagctgcagtcccagaaagcttacctcctgcgccaaaaatctatgcttgaggataagattgcacagcgggagtctaagcagaaaaaagcagttccaatactcactaaggtgctggacgagtatcattccctggacactgccgacaaaaacaggctgttgaaaatgatcatagagagagtggattacaccaagaccgagtccggctctcacatagagccgcagcttgagtacacgctgcgcatt

SEQ ID NO: 1168 - DNA, 1632 bp, unidentified
  source 1..1632: mol_type = unassigned DNA; note = Bacteriophage uvig_16065 from the Index of /pub/databases/metagenomics/genome_sets/gut_phage_database (ebi.ac.uk)
atgccagacaaggtttataggaccgccatctactgcagactcagccgagaagacggtgacaaggtagaaagcaatagcatcgcttcccagcgcgctatatgtgaagattatatcgccaggcacgatgacctggagctggtatgtgagccgttcgtggatgatgggtactccggagtgtctttcaacaggcctcaattcaagaaactcgaggaggcgatacggaagggggctctggattgtatcgtggtgaaagacctttctcgattttccagaaactatattgatggtggtcggtacattgagaagatattcccgcaactgggaattaggttcattgcaatcaatgacgcctacgattctctgacgggagaccctcagagcgacagtttcgttatcccattcaagaacctcattaacgactcatattgcaaagacataagcatgaagattcgctcatccctcgaggtgaaacagaaaagcggcgagttcgtcggctcttttgccccctacggctacatgaaaagccctgaaaacaagaatcagctcattgtggacgaggccgtcagcgagtacgtgcagatgatcttttcaatgtacaaggacgggtttagtattggcagaattgcaaagcgactgaaccagatgggcgtgctttctcccatggagtacaagcatagcgcaggggttaagttcgatactgtgtttaagacatcagacaccgccaagtggacctataaagctgttcagaggatactgaccaatgaagtgtatatcggcgttctggctcagggaaaacgggggacacctaattataaggtgcgcgtcgtgaagagtaaggacgagtccgagtgggtcaaagtggagaatgcccatgaagcattggtctcttatgaggattttatggctgtgaaggtcatgatgcagagagatatgcggtgttcccccgaccaggatgaagctcacctgttttctggctttctgttctgtggagattgccagcaacccatgattagaaaaacagtcccatcaaaagccaaaaaatacatctactacgtgtgctcaacgaacaagcattccaggacatgctccccacactctattgccgccaaggaggtcgaggaaaaagtgttccgcgccattcacgaccaaatcgagcttgtgattaacctggagcacgcccttgccatgatagaaagactgccctcccagtctaggaaagcgtttaactatgaggctcaaattgcaaagatcgaagaagaaatcgaacgataccaaaagcttaaactcggcctgtatgaaaatttcatcggaggcgtgatcgataaaagtgagtatttcgagtttcgcagtagttacaccaagattatcgaagacaagcaggaggcgttgttgcgggttaaaaaagaaatgaaacagactgtaacaactgggaccactgaacgcaactgggtgactctctttaagcagtatgagaatgtcgaagagttgaatcgaagagtactcatgagcctcgtagatcggatcctgatccatgagaaccacgcaatcgaaatcgtgtttaagtaccgggatgagtaccagcagaccatcgagtacgttctgggttatgcagacgaattggatatagctgtc

SEQ ID NO: 1169 - DNA, 1467 bp, unidentified
  source 1..1467: mol_type = unassigned DNA; note = Bacteriophage uvig_453325 from the Index of /pub/databases/metagenomics/genome_sets/gut_phage_database (ebi.ac.uk)
atgctgaagaacattccagccgtggtctatgctagatatagttccagcaaccagagggaggagtctatcgaggaccagctccgcgagtgctataagttcgctgaccgcgaaggctacaacgtgattggccaatattgcgaccatgcaatctcagggcgaaccgatgaccgcccagagtttctccggatgatatgtgatgccgaaaagcagctgttcaaagctgtgatcgtctatcggctcgataggtttgcccgaaaccgattcgacagcgtcctttacaagtcacgcctcgcccaatataaagtgaacgtggtgtccgccacagagtgcatccccgaaggttctgatggagtacttattgaagctctgcatgaggccttggcccagaagtattcagacgacctttcccaaataattagacggggtctttacgggaatgctgaacactgcaagagtaatgggccgctgccattcggatacaaggcaaatccgaccacgagacttgtcgagattgatgaggagactgcccctatcgtgaagcagatctttaccatgatcgctgagggctctaattacaatcaggccttggcctattgtactcggatgggctaccccaaaaccaagaatgccctttaccacattctgaggaatgagcggtacaaaggcatctacatctacgccaacaagagaacagagggtgggattccctgtatcgtgtccgaagaactcttcgctgcggcgaacgcgacgagacaaaaacacattaataagcctaatgcaggctcttataagtacctgctgacaggaaaactgtactgtaaggattgtgaaaatctgtactcaggaggctatgggacctctagatggggaaaaaagagctactattatgtatgcagcggaaagaagagaaagcacatttgcgccgccgctaacattaatgctccaaaaatagagtccatggttgtggacgcactgtatatgtttatcttgaacgaggatatcattagcgccatcattgacgcagccttggaatgccaggagcgcaatagtccacacaagaacaacatcatggtcatcaatcggcgaattgcggaaatagaaaaaaagttgaataacctgctgaaggctatagaagcaggcgttctcactgagactacaatgagcaggatgcaggagttggaagagaaaaagaagtccctgaggaggtcactcatgaaagagaaactgaaagcacctaaaatatccaggagccagctcgaatttttcttcgaaaaattgagaggggaagatcctcatgcgcgcaagttccagaagtgcctgatcgacacctttgtaaacaggatctaccccgatgggaacaccgttaaaatggtggttaacttgggtgcacctgacgatgagacattgacttactctaaactgagtccctgttttgcaggcttcgacaaacgcaacttttggtggcgg

SEQ ID NO: 1170 - DNA, 1308 bp, unidentified
  source 1..1308: mol_type = unassigned DNA; note = Bacteriophage uvig_294132 from the Index of /pub/databases/metagenomics/genome_sets/gut_phage_database (ebi.ac.uk)
atgtctaaactcaaggccattgcatactatagggtgtcaaccgaaatgcaggaggaaaaagagtccctctctacgcagattcaagggggtgaaatcttttgccgagacaatgatattgagctcattaaagttttctctgacgtcatgagcggcggcaacagaaggaggccgggttttctggccgccaagaaattcatggaggagaacaagggaaatatagatatgtttatcgcctatgatgtaagccgcatcgccagagacgctttcacttttcttgaattgttcaattacctgaacatgatcggagtgaagctcaaactgattaacaaccctacactggattccgattcagcaatgggcaaacttatccttaccatactcgctgccatcttcgatttcttcagatttgataattcctcccgcgtgcgagacaacatggtcatccgggttaaagaggggaagcggatgaattcagctccctacggatataagatcgtagacaaaaaaatggtcatcgtggaagaggaggctgaaataatcaggtacgtgttcaatgcctacctcgaggggaaaggcttcagaacaattgcgaaggaaattaaccgcgatcatagcactatctccaattggttgaacaacaaggtgtatgctggctacaatatcttcggcaagaccaaaatgaacaagagcacctttaagctcgtgcgaaacaaggataaaagtagcattatagaagcacttggtgattgggagccaatcatcagtctggaaattttcgagaaagtgaaagccattcgggacaaaaacaaggaactgcggatcaaacccaatcacaatagtaagtttctgctgagtgggctgctgtttcattctgagtgtgacgataagttcagaggaaatactgtcctcaataactattactataggtgcttttcttgttcaaagcactttaagagcgcagaaattgaaaacatggttattgacgagcttatcaacggagacgctttgaaagcactgaataagaagatcaaaaacgaaaataagaagtacaacgagaagtccatacttgagaagactaaaaataatttggaggcgaaaaaaaagcggctgaaagattttctgatcgacgggacattggagaaagaagagtataacacacgcctgcttgaggtggaacagaaacttctggaagtgaaggaaaaggagaagaacatagaggtcgaagccataaggaagattgacacggacatcatcaaggttttcaagaagattattgagaatatcaacattgaggaccgcgaggacacc

SEQ ID NO: 1171 - DNA, 1581 bp, unidentified
  source 1..1581: mol_type = unassigned DNA; note = Bacteriophage uvig_550213 from the Index of /pub/databases/metagenomics/genome_sets/gut_phage_database (ebi.ac.uk)
atgaataccgccgtgcggactgtgaccgtgataccaccatctatcaatcccatgacccatttgacggatactccgctgtacaagcttagagtcgctgcctacgccagggttagcacagactctgacgagcagttcacctcatacgaggcgcaaatcgattactatactcaatatattcagcggaatcaagagtggacattcgttaaggtgtataccgatgaggggatatctggaaccaacacaaagcaccgcgccggattcaacgaaatgatagaggatgctctcgctgggaaaattgatctcatcgtgaccaaaagtgtctccagattcgcacggaataccgtggactccctggtaaccatcaggaagctcaaggagaagggggtgcaggtctactttgagaaggaaaacatctacacgtttgatggcaaaggtgagctgttgcttacaatcatgtccagcctggctcaggaagagagcaggagcatcagcgaaaacgtgacgtggggccagaggaagcgcttcgccgacgggaaggttaacctgccctacaaacagttcctgggctaccggaagggtgccgatggctttcctgaggtagtccccgaggaggcagtgattgtaaggaggatctacacacggtttatggaaggccttactccgggcgcaatcgccaaagaattgaccgcagatggaataccaacccccagcggaaaacaaagatggcagacatctaccgttgagtcaatcctgcagaacgaaaaatataaaggtgccgcacttctgcaaaagtgcttcacagttgactttctgacgaagaaacgaaaggtgaatgagggagaggtcccacagtactatgtggaacactcccacgagcctattattactcctgaggagttcgacaaagtgcaaaccgaactggctaggcgcaagcgcatttcaagacaatactccggaaagagtattttttcctcccgaatcgtgtgtggcgactgtggttcttacttcgggtcaaaagtctggaattctacgtcaaagtatcgacgcgtgatttggcagtgcaacggaaagttcaaaggtgaacacaagtgcgaaacacctcatctggatgaagaaactatcaaagcgagatttgtcgccgccacaaatgccataatagacagtaaggacaatattcttgaggattgtcgcctcatgcagaccaccttgacagactgtactgggattgacgctgagatcgagagcctccttgaagagatcgacgtcgtagcggaacttacaaagagatgcatcgcagagaacagtcagacagctcagaaccagaacgagtatgcagcacggtataacgggttcctggagcgatatgaaaaagctaaagcccagctcgaacagctccgagccactaaagttgctcgggaagctcaggcagaagccattggggctttcatgtttgaagtgcaggagctggacgcgttgacaaattttgatgaaaagctttggctgactgtgattgatactgtcaccgtgcatgccgacggcagaatgacctttaagtttcagggcggcactgagatcgaggcc

SEQ ID NO: 1172 - DNA, 1584 bp, unidentified
  source 1..1584: mol_type = unassigned DNA; note = Bacteriophage uvig_442559 from the Index of /pub/databases/metagenomics/genome_sets/gut_phage_database (ebi.ac.uk)
atggagcaatactgtatgtatctgcggaaatcccgagctgatagggaagcggaacagcggggcgaaatggagaccctgtcaaggcatgaagcagccctgctggcactcgccgcccgcaatcaccatcccataacaaagatctatcgggaagttgtaagcggagagactatagcagcccgaccgtgtatgcaggagctgctgagcgaggtggaggcaggaatttggacaggagtgtacgttatggaggtcgaaagattggctagaggcgatacaattgatcaaggagtcgtatctcgggcttttaggctgtcctcaaccctgattattacccctatcaaaacgtaccaccctgacaacgagtttgacgaggaatactttgagttcgggctttttatgtcccggcgcgaatatgctaccataaagagaaggctgcagcggggccgggacgccagcgttcgcgaggggaagtacattggcaaccgctccccctatgggtattatagggagaagattccccacgataaaggttttagactggtgcccgatccagatcaagccgacgtcgtgaggaacatctacaaatggtactgtaacgggatccccgctgatggagtgtctcccactaccttcggtatggccaagatccgagaccggttgaacgccctgggggttcccgccgcaaccggcggcccttggacaattagcagcattagtggaattctgcaaaaccccgtctacactggcaagataaggcataactatagacctgccgaaaaatctcttagtggcggggtgatcaccgtgcgcagacctcgaaatggttccggggatctttatgacggcctccatgaggccataatctctcaggaatcattcgatatggttcaagacttcatgaaaaaccgaaaactccctagcatcccatataagaaaaagatggctaatcccctgtccggaatagttagatgttccgtgtgcggcaaggtaatgattaggaggccttaccagagcggacggcagtgcacccttatgtgccagacagcgcactgcgccaccgtggcttcagaccttgatgatgtggaaagagaaatcctcaacggccttgctgaatggctcaaggattataagctccagtggaatattcctgactctgcagacagctcaccagcagtgtccatgttgcagactcagctcgtgcagaagcgcaaagaggaagagcgcctcaggagccagctcgataacacatacgacttgctggagcagggtatctacactaaggacgtattcttgacgagaaataagatggtcgtggaaaaactcgaggaggttcacatctcaatcgattctcttgaaaaagagatcgctctggagcagaaacgactgcaggcgaaaatcgacgtgatcccaaaggtcgagaatattcttgacgtctactggacgttgccagacgtgaagagtaagaatgacctgctgaagtctgtcttggataaggtcgtgtacacaaagagtgggcgcaatggtccgcacaagaaagtgcattacgccttcactttggacctgtatccaaaacttccaaaaagtccg

SEQ ID NO: 1173 - DNA, 1572 bp, unidentified
  source 1..1572: mol_type = unassigned DNA; note = Bacteriophage uvig_148886 from the Index of /pub/databases/metagenomics/genome_sets/gut_phage_database (ebi.ac.uk)
atggccaaagtgaccatcattccgtccaagatcaaccccattacccaccagcacctcgacgttaaagtgaagcgcagggttgcagcttacgctagagtctctacagacgatgaaatgcagctgacctcatatgaggcacaggtcgattactacacaaaactgattaaagccaacgacgagtgggagtttgtgaaagtttacgctgacgaagggattaccggcactagcctgaaaaaccggaaagaattcaatgcaatgataaaagacgcactggacgataagatcgatctgatcatcactaagagtgtctccaggttcgctagaaacaccgtggacgcccttactactattaggaagcttaaggaaaagcgcaaggagatctatttcgagaaggaaaatatctacaccttggactccaaaggtgaagtgctggtgaccatcatgagtagccttgcgcaggatgagagtcgaaacatatctgagaacgttacttggggacaaagaaaacgattttccgacggtaagtataacctggcgcgcaaaaatttcctcggatacaagaaggaccaggatggcaatattattatcgatgaaaaggaggccgtggtagtcagaaagatctaccggtattttctggacggcatgacgcctggcgggatcgctcagagtttgatggacgaaggcgtacctaccccagggggtaagacgaagtggatctactcaacgataatttcaatactgcagaacgagaagtacaagggggatgcacttttgcaaaagcggtttaccgtcaattttttggagcataaaatgaaaaaaaacgaaggcgaggtgaatcaatattacgtaaagaaggggcaccccgctattatcgaacctgttatctgggatagagtccagcttgaaattaaaaggcgcgagaacagcaaaagaatctattccgccaaagacgccttctcttctaaacttgtgtgcgccgactgtggaagctattttggcaaaaagatttggcatagcaacgacccatacaggaaagttatctggcggtgtaaccataagtatgatggagacaaaaagtgcgacacacccacactcgaggaggacacaatcaagaatgcgttccttctggcctacactaatctttgcgtggataaggatatcattatagagacaacaaaggagctggtagattctctgtgtgatttcgaggaattggatcagaagattattaaggagtcagaggacctggacataatagcagacaaggtgcacaagatggtgatggagaatgctaacaccgcccaagatcaggaagagtatcagaaacgctacgattatctctctgggaaatataatgagggtaaagtgaaacttaacgccctccaggaggagcgagcaaggcgggctactcaaaaggaaatactggagttgaagatcaatgaactcgaagacgcctacgtgctcgaggaatggaatgagagcatcttcaagatgagcgtcgatgaaattctggtgtccaagtatgaactgacgtttaagttctacatcggagaggaaatcaaaattaaactc

SEQ ID NO: 1174 - DNA, 1626 bp, unidentified
  source 1..1626: mol_type = unassigned DNA; note = Bacteriophage ivig_4396 from the Index of /pub/databases/metagenomics/genome_sets/gut_phage_database (ebi.ac.uk)
atggctgaaagagtgtactgcctttatcgggtttccacaaataagcaggtggatcacgatgagaacaatcaggcagacatacccatgcaacgaaaagcctgtcatgactttgctgccaaaatggggtgggtcatagtgggcgaggagcaggagaccggcgtctctgggtataaagtttccgccgatgatcgcgacaagcttcagttgatcaagaagtatgctgagcaggggaaatttgatattcttctggtgtttatgttcgaccgactgggtcgcaaatccgatgagactccttttgtggtcgaatggtttacgaagaagggcgttagagtctggagtgtgcaggaaggtgagcagcgctttgagtcacacacggaccgactgactaactatatcagattctggcaggccgatggggaatcacagaaaaccagcatgagaaccaaaacagcattgggacagatggttgaggagggacggtttagagggggtaatgcaccgtacggttataggctcgaaaagtctggaatcttgaataagcgcaagcatgaggtctatatgctggtaattgatgaggacgaggcgagggtagtgaggatgatgttcgacctgtgcattagtagcggctacggcaggtggcggctggcaaacttcctgaatgaccacggcattaaaaaccgaaaaggccagaattggcatgatgcctccgtgggaggaattctccacaacccactgtataaaggaatcctgcgctccggcgaaacgtacgcaggaccattcgaagcccttcagattatcgctcccgaccagttcgaccttgcccaaaaactcatgctggaacgcactaacgagcgcaaggagagaaggaccgttcctcttaataccactggacaaagcctgctgtctggcaatatcttctgcgggcattgtggtggccgactggtgctgaccactaacggaaccaccacgcgcctggcagacgggacccccgtccataagaagaggattaggtacgtatgttacaataagactaggcggagacaagagtgcacagggcagactgggtatacaatgcacatcctcgacggtattgtcacagaggtgttgcaccaagttttcgataaaatgcagggcgccagcaacgatatgatagtggggtctgctgtgcaaaaacagatggccatgatcaggtctgagctgcagcgggccagagcggaaaatacaaaggctaacaaggagtacgaaagcttgaaagctgaagttctcaaggctattcagggaaaaagtgcattgccacaagacgtattgaccgaaatgttggaggacacacggcaaaaggtgctttctacatcagaacggatcaccactctcaccgaagaactcaatgatggcaactcaaaaatcgaggaaatgaaggccgagttcaaccgcatagtgagctggagcaagatctttgatgaatcacccatggaggtcaagaagatgatatgcggctacatcatcaagaaggtctccgtgttcagagactaccgggtgaaaattgagttcaatatcaacgtggaacagtttctgaacggcatcgacagtattaacgagtgtgcgacatacgagctccctatggcccag

SEQ ID NO: 1175 - DNA, 1569 bp, unidentified
  source 1..1569: mol_type = unassigned DNA; note = Bacteriophage uvig_284398 from the Index of /pub/databases/metagenomics/genome_sets/gut_phage_database (ebi.ac.uk)
atgccaaacacaaaaagttttaccgtaaacgaggttctcgtgtacctcagaaagtctcgctcagattctcccgatatgtctgtcgaggaagttctgaggaagcacgaagaaatgatacagcagtacgcaagcactcatttccatagcccaatcccggaaaagaatatctttagggaagtggtctctggggaaacgattgactcccgccctcagatgaaaaacctgctcaaaatgattgagagcgagcagttcaaggcagtgttggttgtggaaccacagcgcctgtccaggggcgacctggaagattgtgggaggctcattaatattctgagatacactaacaccacagtattgactctgacccactcattcaacctccaggaagaatatgagaggaagtttttcgagatggaaataacacggggcaatgactatctggagtatacaaagagaatactgaaacgcggaagggaagctagtgtggctaagggcaactacatcggaagcgtcgatccatacgggtataagaaaaccgtcattaaaaaggatggaatcacctgccacacgcttgaaatcattcccgaggaggccgatacagttaaacttatacacgagctgtacgcctacacccctgagggcataggttttaccaacatcgcacataagcttgacgccatgcacattaaacctaagaaagcggcccactggacccccgctattataagctctatcttgtgcaatcccctttatctgggcatggtgaggtggaataaccgaaaagtggtgaagtatatcaatgaaggacagttggccaaggcacgccctcagaacactgaagccaagtactacaaaggcttgcatgaaccgatcatcacgcaaaaactctatgatgcctgcatggctagacgaggcaccaatccatctctgcggcgaaataaggaactgtgtaatcctttcgctggtcttctgtactgcgggacatgtggacatgccatgtccttgaagatctacaagaaccacaacagcgtgtcacaaatgatgttgtgcaaccaccaagcctattgccacactaaaagtgtgctttactccgcctttcttcggagattcatcagttccatggaggatactttgaatgacttcgagctggctcagaagtcagacgacggccgaacccaggcgattagcaagactatcgtgattaacctggagaataagctgaaaaagctcaatgagaaagacgctcgccaaaaagacgcgtatgaggacggtatctactccaaggaggagttcctgaaacggaatgtcagaacacaacaggacatcgcatccacaataattgctctcgaggatgcccgggcaaagaaggctgatatcatcgattatgaggagaaaatcaggcggtttaaggattgtctgcatgcactgaacgaccccgagttgagcgcggccgagaaaaatagattcctcaagagttgtgtcgacaagattctctactacaacaacatggagtctaaagccggtatcgggcggtatattgaaaatgtattttcacttgagattcagtataaa

SEQ ID NO: 1176 - DNA, 1524 bp, unidentified
  source 1..1524: mol_type = unassigned DNA; note = Bacteriophage uvig_517692 from the Index of /pub/databases/metagenomics/genome_sets/gut_phage_database (ebi.ac.uk)
atgtccgtgcaggtcattaaaagcaagaatactcgaaaagggcggatccgcgtagccgcctactgtcgagtgtctaccgaaacagagatacaggaaggatcaatcgagaatcagatcgagcattacgaagagctcattaagagcaaccctgattatgagtttgtgaacgtttactatgacttcggcattagcggatataaagagaaacggcctgggttccaagagatgatgaaggacgccagatctggcaaaatcgacctgatcattaccaagagtatcacaagattcgccaggaataccaacacccttcttaaagctaccagggagctcaaaagccttggaattggcgtatttttcgaattgcagaacatgaataccctgaatgaaggtggcgaactcctcctgaccgtgtatgcagcctttgctcagggcgaatcagagacataccgcgagcttgcacagatgacttttaaacgaaagttcagcgaaggcagacccgaatatcaacttagaaagactctgggatttgatatgactgagaataacgagattcagattgtgccaaaagaggccgaaggggtaaagcagatcttccagtgggtgaaagaaaactactccacgcagaccatcgttaaaatggctgccgctaaagggatcaccttgaaaagtggcaagccttttactgctcaatgggtctataagactgttcgaaatgtggcgtataagggagattatattatgcagcggacatacacagatagcgagcgcaaggtgcacgtcaatcagactctggtgccttccttctacatagaaaacgatcacgatgccatcgtgtcaaaacggctttggaatgcagccaacaaggttattgacgatagggctaaggagcgcaccacccatctcgagatgaaacccctgacggaggagaattacccgtatatccacaaactgcattgcgcgaagtgtggaggggtgctccatggacaaaagacaaaaagtggggcgcagtactccttctcttgtgggcggaggaacagacagggaaagggtttttgctctggcgtctcagtgccgcagaaggtaatagagtcttggggagaaatagacggcaatatctacattagctttgaccccgataaaccactgcacaaacaacactcatacgtcaaggagtccacatggaaaaagaaccacacgaagaagaagctgccacctctgcccgcatataacgtggagaactacccctattatagaagggtctactgcgcagagtgcgggcacctcctgacaaggtccagaaggtatgacggtttggttgaattcatctgtaacggtatggcttctcgcggtaagagttattgtaagggtgtgcgggttccagtggaggtcctgaatcggttgcccgaatgggacggcttctactggataaaggaggacaaggaaaacggcgagaaacattacagttacacttgcaaggaggaaaaaccacaacgcaaggaatactccgccgggggcagagaagac

SEQ ID NO: 1177 - DNA, 1572 bp, unidentified
  source 1..1572: mol_type = unassigned DNA; note = Bacteriophage ivig_1929 from the Index of /pub/databases/metagenomics/genome_sets/gut_phage_database (ebi.ac.uk)
atgcagtgcgactttatctttgcctacctgagactgagccgcgacgacaaagagaagatggaggaaagtaactccatcaagaaccagcggcttctgatccaacactttgttgaaaaccagccagagtttgctggggcaaaactgttcttcttcgtcgacgacggctatagcggaactacatttgacagaccagagttcaaacggatgatgggtctcatcacgcgccgcaagaggatttgtatcattgtgaaggatcttagccgcctggggcgggacaccatagagactcagaattacattgagaagatcttccccttcctgggggtcaggtttatctctattaatgatttttacgattcaagccaaaagccctctgagcgaaaggacacggagatcaagttcaagaaccttattaatgggatctatccccagatttgttctgacaacatcaaaaaggtaatgaggaagcaggcagaaatgggccagtatcatggatccattcctacctacggttactgcttccacgatggtgtacacactaagctccacctcgataccgaggccgcctctatcgttagaggaatcttcgatcaacgcttggcaggcatgagttatgccgatatcgcgaggaatctcaacgagaaggaattggaaacacccaccgtgtacctgcaacggaagggatgggccccggaggctaaaaaatcagtaaagttttgggacggcaatctggtgaaactcattttgtttaacccagtttatgccgggctgacagtcagaggcaagactgaaacccgggtgcctagcaaacgggaatacagatacattagccgagaggattggatctgtgttaaagggggacatgaagctatagtgacagagcaggaactccagaaagtgcaggatatggctgagaaacgaaggaaatactatggtagaactcctagttccgagaatatattttctggcctgatacgctgcggccattgcggaaggaagatgaggatacgagtcacatataaggaaaagccaatctactgtggctccacaactaccgcccccaacgcctcctgttatcctaaaaagtataaacagaaagacctggaggagcttgtgctggtgatgattaagcagcaggcggccttggctgaagatacgatcaaacaacttaaaagggccaatcagacacttaatattcctaagctgagataccgcaaaaagcagtacgagaagaaactggctatatgcaagcaagaaaaaatggagctttacgagcagtatgctgaggagcagatctcattgaaagattatcttgcacggaaacagacctgcatggaaaagaccgcggcataccaacagaagattcaagaaattgaggccaaaatccttaaaggagaggaagagaagcagaaagaaaagtcagaggggctgcagctcttcgtgaagtataagggcttggaggagctgagttacgaagtgctgcatgagctcatcgaggtgataaacttctatgacccggaacacattgaaattgtctggaagtacagagacgaattcctcgaagcagtcggc

SEQ ID NO: 1178 - DNA, 1596 bp, unidentified
  source 1..1596: mol_type = unassigned DNA; note = Bacteriophage uvig_35057 from the Index of /pub/databases/metagenomics/genome_sets/gut_phage_database (ebi.ac.uk)
atggccaaacggaagataactgtcattccctcaacaatcaatccactgacccagacacccgttggatccgtccaaaaaagaaaggtggccgcctatgctagggtgtctacggactcagacgaacagtatacgtcctatgaaacccagaagacgtactacgagaactatatcaagagtaaaccagaatgggagttcgtacgggtttatgcagatgagggtatttccggcaccaacaccaaaaaacgggaaggctttaagagtatgatcaccgatgctctggatggtaagatagacctcatagtgactaagagtatttctagattcgctaggaacaccctggatactatcagttacattcgaaaactgaagtccgccggggtggaagtgtacttcgaaaaagaaaatctctggtctcttgacagcaagagtgagtttgtgctcacaataatggcttccatcgcacaggaggagagtcgcagcatcagcatgaatgtgaccctgggcaaacggtggcagatgcaagagggaaaagtgtccttcgcttactctaggatgttggggtttaagaagaccgaaaatgggtatgccatcgacaaggagcaggccaaaattgtcaaggagatctacactgacttcctgatctgggggatgacttccacaggaattgccaataagctgacaaagcggggagtcaaaacaccttcaggtaagagtgagtggtctaaaaacaacatagagtccatattgactaacgagaagtacaaaggcgatgctcttcttcaaaagacctatgtcgtggattatctcgagcataaagtggccatgaacaagggcgaaatcacacagtactacgttaaggacagccacgaggcgattattgacaaggccgagtgggatatggtgcaggatgaaatcaagagaagaaaggaactcggggcaacatacagcgctagctccatttttatctctaagctcgtatgtggcgattgtgggggaatctatggcaaaaaattgtggcattccaatgacgattaccgcagcgaaaggtacctgtgcaataataagtataaagacaagaataagcgctgtactacccctgccctgactgagaaaacgattattgacgcgtttatcaaggcgtataactccgtgatggtcgataagaactcactgatcgaagacgcagaggcaattaagctgctgttgtcagacaccagcaaaatcgacaacgagatggataaactcaacacagagcttcaggttatcaacggcttggtggatcaccttgtccgcgacaactctagcaggctgcagtcacaagaggagtaccagaagaaatacgatgaactggtgacaagatatcagaatgccaaaaccagatacgaggagctgagcattgagaaatctcgaaaagaattccaaagcctgaggctcgacatgttcatatctaaaatcaaagaatcaccgtctcttatcagcgaatggaatatggagatttggagtattttggtagacaaggcaattgttaactcaaattgctctatcacttttcgattccgcaatggagtagaaaagaccatcaaggttaagaaatgc

SEQ ID NO: 1179 - DNA, 1332 bp, unidentified
  source 1..1332: mol_type = unassigned DNA; note = Bacteriophage uvig_35057 from the Index of /pub/databases/metagenomics/genome_sets/gut_phage_database (ebi.ac.uk)
atggccgaaactattaagatcaattctttgcctacactgccaacacttcttaaagtcgctgcatacgctcgggtatcaaacggtaaggacgcaatgcttcatagtctgtctgagcaggtttcctactataataggtacatccaggagcacgatgggtggcagtttgccggaatctatgcggatgaggctattagtggcacgaaagagaatcgcgacgaattccaacgcatgctgatggatgcctacgaaggtaaaatcgatctcattataacgaaaagtatttcccgctttgcgagaaacacaatgactctgttggaaaccatcaaaaaacttaaaaaacacaacgtgaacgtgttcttcgaggagcagaacctctacagcatgagcggggagtgcgaaatgatcctgacaatgctggctagctttgctcaggaggaggcaagatccgtgagcgagaacatgaagtggaaaattaggaaagatttcgaagagggactgttgtggggcggtaataacgcatacggctaccgaatcgaaaatagacgctacgtcattgtgccggaagaagccagcctcgtgaagaatatattcaacctctatctggagggcatgggcatcactgccatcgccctgaaactgaacaagatgaatatccccgcctatttcggaggcaagtggaactttagttccgtacaaaacattcttaaaaatgaaacttataccggggacctcatcttgcaaaagacctttaggacagattacatttcaaagaaacgcaagatgaaccggggcgagaaggacaagtttctgatttcaaatgaccatgaggcaataatatcaaagtccgatttcaacaaggtgcaggagatgataaaatccaagagtaagcggtacaatgtccccgacaattgttatagccatcgatatccattttcaggaatgattgagtgtagcgagtgccacaagacctatattcatcggaaaaagcacgggatcgacaagtgggggtgccagtctgccgaacagtacggaagggcgtactgtaagacctctgacgccattagcaattccaccctcgaggaagttaccgccaaggtgttgaacctggacaagttcgacgagaaggtcttcaagtccgaaatcttcaaaataatctctaaacctaaccacctgctcacttttatctttaaagatgggagcgaacgggatatcacatggtcaaatccctctaggtctaaaagttggacccctgaaatgaaggaagttgctaggcagcgatccctgaagctgtataagaaaagaggcgaggacggaagatggcttaaagagaag

SEQ ID NO: 1180 - DNA, 1812 bp, unidentified
  source 1..1812: mol_type = unassigned DNA; note = Bacteriophage uvig_174247 from the Index of /pub/databases/metagenomics/genome_sets/gut_phage_database (ebi.ac.uk)
atgaaaaggaaggtcgcaatctatgcacgagtaagtaccgagcacgaagcccagattaatgcgctggagaaccagattcaatactacaataatatccttgcccagcaccctgaatgggaactcgtggggaggtatgtggatgagggcattacaggaacttccgtgaaaaagcgcaaaaactttctcaggatgatggaagacgcaaaaaacgggatgttttcacttattttgacgcgggaggtttctcggttcgctagaaatactgtcgacactctccaggagacacgcaaactgaagagctacggtgttgaagtttactttacagaagacaatattagaacctccgacgataccgacggcgagctgagactgacactgatggccaccttggcccaaaatgagtctaaaaagaccagtgtccgcgtaaaagctggccaaaaaatcagctttgaaaacggcgtgctgtatgggaacggaaatatactgggttatgatagagtgggcagggagcttgtcgtgaacccagaacaggccgagaccgtgaagatgatttttaacatgtaccacgacggcatgggttgcaagcagattgcatatgaactcgagaaacgcggcagaatcacctccacaggattgactcattggcagccgggaacaatctctcggctcttgaggaacagcttctactgtggtaagatcgtgtatcggaagcagtatgtgccagactaccttgagcagaagaagatcaataactacgacgaggtcgataagatagagattatggggaagcacgaacctatcatctctgaggaactcttcaacgactgccagcgacggctggatgctaaaactgtcaataggttgcggggaaagcacgccattaacccacctaagagtgcttacgctagaattctcaagtgtcaatgcggcagcaattttgagcggagaaaatggcacaagtataaagatgggagaataaggtacggattcgaatgctataagcagaaaaaccatggatcttaccgcacgcgcttgaaaaagggccttgatacaaccggctgctgtacgactaagatgtttcccgagtggaagctgaagatcgtagcccattggctcttcaatgatctttggaaagaacgggacaagattataaacagagcaatagagatgctgaacgccactatcaaggatgagaacgtggttgattacaccgacgaagtcaaggagcttaacaagaaacgcaagaagtatgaggaaaagctgagcaatcttgttgaactgcgagttgagggtgacattagcaaggaggtgtacgaggaaaaaaagggagcttttaaaaaacagattgagtatatcgattcagaactgctcaaacgcgatgtaaaaaattccgccatcgtgagtaacgtcaaaactcagatccaactgttgaccgacctcctcgagaaaaaatatgacgtgatatcaggggacatccccgaggatatcgttgagacattcatcgatcagatcgtggtgcacgatgattacttcgagtggcgactgcggacctccaccgaacccgtgctctgtaaggtagaagggaacgcgaaagacaatacgatcatcttcctggagaatgactcccataaggtcgccacacagtacaggcaaaggctgaggattcgacagaataatctgatacatgctatcgactcaatagaactggggaacttcgtcattactaaagactacttggcgaagtataaggaaaccgatgagaacatgaagaaggtgaataagtggaacgacattaaaatcaaagtgacaatc

SEQ ID NO: 1181 - DNA, 1545 bp, unidentified
  source 1..1545: mol_type = unassigned DNA; note = Bacteriophage uvig_163358 from the Index of /pub/databases/metagenomics/genome_sets/gut_phage_database (ebi.ac.uk)
atgaaagcggtcatccttgctagagttagctctaaggaacaggaggatggctattccctggacgctcaaatctctcgcctctcagactacgcgaacaagaaaggactcgaggtaatcaaaacattcacacttaccgaaagcagcactcagggggaccgaaagaagttccaggaggtcttgaaattctgtagcagccagaaggagaccattgctctgatcgctgatgcggtggatagggtccaaaggagcttcaaagagtctacttatctggatgagttgaggaagaaagagaaaatagaactccacttttaccgggaagggatggttgtgggaaaaaacgccagctcttccgacctgctgcgctgggatttccttgtgataggagcaaagagttacgttttggcactcgcagagaatgtgaaacgcagcatcaattttaagattgaacacggggagtggtgtgggaaggcccctatcggctatcttaacaggagaaatgcccatggaaaaagtgaaatctgcctggaccccgtgcgcgcaccgattattaagaaacttttccaggaatacagtctcggtaagaccagttttaaagaactcgccaatctggccgacaagtgggatctcaagtctaactctccaaaggccagaaagttgacaagtaaaacgctttatgacactctgacaaacccattctactgcggcaaaatgaggatcaaaggtcagctgtacccccatatctacgaaccactgatttcagaggacctgtggaacaagtgtcaggaagtaagactggggtacaagaaacagcctgtgaagtacgcctcaaaggagtttctgtataggggcctcattacctgttataataccgggaagatagtgactaccgatcaaaagcggggacatattaattatctcatctgctacgataaaaccggtaagcgaatctactgccacgaagaaactatcactaagcaggtgcagcagattctggactcaattatcattccagagcccatcttgaccggcctgaatcaaatccttagagactccaaaaagaacgaggctctgttgcatgaacaggctgtcacgtcactccgcaaggatctggacataaccaaaaagcggattgagaatctggtagacatgtatctggacaaaaagatagatgacgagatctactcatccaagattaaccagctgaaaaacgagaagaccagcctcgagaataagatagcagcccactctgtgtccgacgacaagttcaacgagacaataatcaacttgttcgatattgtcaaccacgccggcaagaaatttgctaactcctccaacatcgaagtgaaacgacgaattctgaagctgatcattcggacgatgaaacttgatcgcggcaatttgggctatgagcttgcctggcccttttccgagctccctaaaagtgacgattgctacttgtggagaacactggttgataatttgcggacaaatcaccgggataagatcctgttgattggacagcaattgccttatcttctgactttt

SEQ ID NO: 1182 - DNA, 1584 bp, unidentified
  source 1..1584: mol_type = unassigned DNA; note = Bacteriophage ivig_2547 from the Index of /pub/databases/metagenomics/genome_sets/gut_phage_database (ebi.ac.uk)
atggccaaagttaggattattcctgcacaagtaaaacaggggaaccgcaaccgacagattgaagagtctgaagccaagctgaaagttgccgcctattgcagagtctcaaccctctacgaggatcaagcctcaagctacgagacccaagtggctcattacaaggaattcataaccaaaaaccccaagtgggagttggcaggaatctatgcagatgacggcattagcggcactgatactaagaagcgaaatcagttcaatcagatgatagacgatgcaaagcaggggaaaatcgaccttattgtcaccaaaagcatctccagatttgcacgaaatactatcgactgcttgcagtacattagagagctgaaggaactccacgtggccgttttctttgagaaagagaatattaacacaatggatgccaagggcgaggtcctgattaccattatggccagcctggcacagcaagagagcgaatccatctctaggaacatcaaaatcggtctgcagtatcggtaccagcgcgggcaagtcatcgtcaacaccgctcggtttctggggtacgataaagacgatgacgggaatcttgtgataaacccagaacaggctaaagtggtgaagaggatcttttacgaatgcctcacgggaaagagtgccattgagattgcgcgggaacttacgaaggaaggaatcaaaaatgggatcggtaggactcagtggcactctagtggaattatcaaaattctcaggaatgagaagtatatcggcgacgcgcttctccaaaagacttatacagtggacttcttgactaaaaagcgcgtaaagaacgacggccaggttccccagtactatgtggagaacaatcatccggctatcataagccgagctgtgttttaccaggtgcaaaaactcctggacatgcggagggagggttttacaactgagggtggccaccatcacggctataccaatgcttattgtttttccagtattgtctactgtggcagatgcaaggatatctacacccggtgtgtgtggtatcgccctaggatcggtgaggtggaaaaggtaaacgtgtggcgctgctattctcgcctgcactggaatcataagggaaaacggtgtatggggagaaccatcaccgaggcagatttggaggaagcctccctgaaggctatgaacgagttgatacagcagcaccaacttgcggataagcagatcgctgccaacattttgaaagttacaaagggcacaacaggcccatctctggatgaattggaccagcagctggaggatcagcagctgcttctcctcaatatgtcaactcataacaagaacgtggaacagctgacagaacaggtgcaagccttgcggaaacaacgggagcagctgatacagcaggagattgaccacgacatcaaaagatcaaatttgaagaatatccagtcctttttccaaacctaccagggaggactcacaaagttcgacgaaaaactggttagactgctgatcgagaagatcacgatattcaagagtaagatagacttcacgttcaaagatggggaagtcattacagtaaaaatg

SEQ ID NO: 1183 - DNA, 1296 bp, unidentified
  source 1..1296: mol_type = unassigned DNA; note = Bacteriophage uvig_13765 from the Index of /pub/databases/metagenomics/genome_sets/gut_phage_database (ebi.ac.uk)
atggaaactaagattacgaaaatagacgcactgcccaagcttgagaagaagcttagggtagctgcctatgccagggtgtcatccgagaaagacgccatgctgcagtccttgtctaatcaggtgtcatactacaataatctcatacggagcactgaaggctggtctttcgtgggagtgtacgctgacgaggccttgtcagggacaaaagatacacgagacgagtttcaaagattgatcaaagatgccgtagagggagagattgatctgatccttgtgaaaagtatttcacggtttgctaggaacacagtcacaatgctcgagaccgtcaggaagctgaaagcaatcggcgttgatgtctactttgaagagcagaatctgcactctcttagcggcgaaggagaaatggttttgacattcctcgcgtcctttgcacaggaggaggccagaagcgtgtccgaaaaccagaaatggaaagttagaaagacttttgaatccggggtacagtggagtgcaaccaaaagttacggctatcgcgtaatcaataagaagtatgtcgtggtgccagaggaagcaaaaatagtcaagtacatcttcgatctctacataaacggactggggttccaggccataagcaataagcttcaaagcgagaatatcaagcccttctacgctaaggcgtggaacaagacctccgtcaaaaacatcatctcaaacattaactacaccggcgacctgctgttgcagaaagggtattccgagaatttcctgaccaaaaaatacgttgccaataagggtgctaaagaccagttcctcgtggaggatgatcacgaggctatcatttctaaagagattttcaacaaggcgatggatctgaaacgcgggcgggccaagtattttaaggctagcagggaaacacaaatccgctatgaactgtccggtaaaatcaagtgcggaatttgtggtaaaagtttcaaccatagaaccaccaagtattctcaaaagtggatttgcatcacctataacgagaaggggaagagcgtctgcccatctaagtgtgtgcctgacgccgaacttaagcgaattactgataaggtgggcctcgacaatattgattgggtggaagtgtttcctaataacgaactcaagatctacctgcgagacggcacgaacgttatcgagaaatggaacgactactctcggaagaacagttggactgacgagatgaaagccaaagctcgcgaacaggcaatcaagaagagcctcgtgaattatctgaagggcggcaacattaatgga

SEQ ID NO: 1184 - DNA, 1560 bp, unidentified
  source 1..1560: mol_type = unassigned DNA; note = Bacteriophage uvig_151707 from the Index of /pub/databases/metagenomics/genome_sets/gut_phage_database (ebi.ac.uk)
atgagcaccttcgatatgaatgaatcagagggtagtaccaaaatagacaagtacgctatctacttgcggaaaagccgagcagatgaagaagcagagaagtatggggatgaggagacattgtctcggcacaaggccatcctgaccgagttcgctgcgcgaaagggatattatattgacaagatctaccaggaggtggttagcggggagaccataaaggacaggcccgaaatacaaaagctgataaacgattgctacgtcgggaagtacaagggaattctggttgtcgagattacgcggctctcacgaggaaaccagggcgatgcacagactattatggattgtctcaaatatagcaacatgaacaatggaattctcgtggtcacaccaacgaaagtttacgacgtggcacatagtactgaagacgaggagttcatggaatttgagctgtttatgtctcgcaaagagtataagatgattaagaagagaatggacaggggcaggaagcagatggtagttgaaggtaactacatgggctcaaggaggccctatgggtacacaatcaaaaagacacacagatccagatacttggtgcctcatccagacgaagccaaaattgtgaaacaaatcttccattgggccgccaatgagaaaatgacagcaggtaaaatcatgcgcaagctgacagcaatgggcgtccccacttacactgggtcttctgaatggaacatcgctaccataaaagacatcttgcgcaatcctacatatatcggcaaagtacgctggaaccaccggatgacagtaaagaccatgcgcgatggagagcttattgctaatagaccacgcacgaaccacactgaccattacatgctttataacgggaaacacgacgccctgatcgatgaagagacgttcaaaaaagcaggcggtgagttttactccgacaagactaaacacaggcacaaactgatcaatccctttgctaccctgattacctgtgccaagtgcggcaaagttatgggatataaagccgattataccaaacctaacgtggcccctcggatccagcatgcctatagccagatttgcaaggtcaagagtgccctctacgaggacgtccagaacgcgattattcatggcttgaagatgtacattgaagatttcacaatgaagctggataacctgtcagataccaatgaggacagtgtgcacgctcaactcgagatcttgcggaaagaaaataagaagatcgagactaaactggatgacctttttgatgcttgggaagacaagatcatatctgacaatgacttcgtgaagaggaaggcgaagcacaaagcgagacaggagagcatcctcgaagaaatgatcaagcttgaagactccattccggagaaggatgagtatagagagaagattatcacccttaccgaagctctggaggtgatcaaggatgaaaccatcgatgccaacgccaaaaataagtacctcaaaacagtgatagactccatagtgttttcccgagagaataatactgaattcattctggacatcactctcaga

SEQ ID NO: 1185 - DNA, 1383 bp, unidentified
  source 1..1383: mol_type = unassigned DNA; note = Bacteriophage uvig_380829 from the Index of /pub/databases/metagenomics/genome_sets/gut_phage_database (ebi.ac.uk)
atggaaaggatcgtccggaaactcgataagaagattttggcttttgcccagagaaagcgggtcgctgcttacgcgagggtaagctccgggaaagatgcgatgcttcactctctctccgcccaggtgtcctactactcaaaaaagatacagaataacccccaatgggagtacataggtgtatatgctgacgaggccgtaacaggaacaaagggctcaagaccagagttccagcggatgctcatggactgcaaaacagggaaaatcgatctgattttgactaaaagtgtctctagatttgccaggaacactgtgaccatgctggaaattgtgcgagagctgaagtctatcggaatcgacgtttacttcgaaaaagagaacgtccatagcatgagtggggatggtgagctgatgctgaccatacttagctctttcgcccaggaagagagcctgtcagtgagcgagaattgtaagtggaggatacgcgacaagttcaaacagggcattcctaccaacaacgcaatactgggatacaagattgttgatgggacctttgaaatcatcccagacgaggccaaagtggttaaaatgattttcgaggactacctgtctggaatgggccggaatgcaatcatgaagaagttgatccgcttgaatattcccacaaagatggataagaggttcaatctcaatggcagctacgacctgaatgctggtgcggatctcggacataatgaactgctttcacgagaggcccagaatcaggccccctgttggcaagaatgtatgatctacaccattctccgaaatgagaaatatactggagacctcctgcttcagaaaagttatattatggaccatatcacgaaaaagaagcttataaacaagggacagttgccgcagttttacatcggtaacaaccacgaagccatcatcgataaggagacattcaagaaagtgcagattgaaatcgaaaagcgggaaaagaataaggggaaccctaaagagacctatccctttacgggcaaaatcatttgcggccaatgtgggaaacactacagacggaaaatctctaacgcaggcaccaagtatgctaaacctgtgtggatttgctctacttttaatagctatggcaagagtgcatgcgcctccaagcaaatacctgaggacgttttgcagcaactgattccaagtaacttcgaagaaattagagtgaccgagcgcaacaaggtcgtgatcgtgctgcaggacgggtccaagatcgaaaaaacttggcagtataagtccagatccgagagctggacaggcgagatgcgcaaaaaggcttccgagaggcgccaaaaaagagagtatagcaagaactgtgatggcgattcatgcaacgca

SEQ ID NO: 1186 - DNA, 1719 bp, unidentified
  source 1..1719: mol_type = unassigned DNA; note = Bacteriophage uvig_83213 from the Index of /pub/databases/metagenomics/genome_sets/gut_phage_database (ebi.ac.uk)
atgaagaaggcagtaatctattcccgcgtttccaccttggaacaggactatacttcacagaccgccgagctcaaaaaggaggctgagaggatgggctatgaagtgactcacatatatgaagagaaggaatccgggtttgttgatgaccgccctgaactggccaaggtgctggccttgacaaatgccgatacagacgcggtttttgtatgggagattagcagactgtctcgccgaactgttatggtgctgagcaccattgaggacatcgagaaaaagggcatattgatctacgccaagaatgaaaactacaggtcatggaacgagaaaggggttaaggacagcacaagtaaacttgtgctcaccctttacgcgagcatcgctgaagcagaggccctcaaattcaaggagcgagttaaacgggggaagcggtaccgagtcctggtagagaaaaagagttactgtaacacgtccgtgtttggatatatgaaggatgagaacggcagactcgtgatcaatgaggaggaagcagagatcgtgcgagatatttttaacaaggccttggaaggatactccgggaggcggctgaaactgtacctgaagagtaagtgggggcttgactggtctgcaaacaccctgaactacctgctgcacaataccgcttacatgggacaaaaaaaggtgggaggaaaaacgtattacaaagcggaaaagaagaagcttgaggaaggtaccaaaatcagattctttaacccagaaaccgatgtcgtagaaactcccgcgataattaatagtgagctgttcaacaaagtccagactgcaatcaccaatcggaagacccgctcctccgcaaaggaggctagaaacgccaaacccaaactgctgaagggcctcgtgctttgcgggaggtgcggcaaagtgtatacaaacactgggcggatgtacacctgtacatcaggtacaaatgagtattcagagagatgcggcagcacatctgtggccactgccagtctggactctgcagtctggaatgtcaccaaggaaatcttctcagaagccatggctaaggaattggccgcccaaaaatctgagcccattgcagctgaaatcgcgaggcttaaggaggagattgaaggttataacgaagccatttccaacctgaagaagcaagtcggcaatctcttgcggattgcttctaaagctgacgacgtcgctgatgatatcatcgagaaaatcaatatcctcaagaaggagcagcagatggcaaaagctgagatagccgatagggaagccaagattgctctgttgcaaaagagacttgatgctccggccgagatgacggagataacagatgaggacgaaaagttcgagtatctgcacaaggtcattgaggcagtgttcgtgtatggcgagcataagcataaaatcctggcaatccagtatctgaatggcatcaccgcttactgtattcgcctctggaaagattggtattggttcctggacaagggagaactcgtgattactgatgccgtggctcttcagaaaaacagccctgtggatttgaaattgaaggacagcattctcatagaggtgacagactctaataacgcctactacagcggcgaggacacggacaaagaaatctttggtcagtacacaactgaaggattctacgcagccatgatgcagaataagcagttgaaaccagttgccgtcaaaaaa

SEQ ID NO: 1187 - DNA, 1278 bp, unidentified
  source 1..1278: mol_type = unassigned DNA; note = Bacteriophage uvig_206323 from the Index of /pub/databases/metagenomics/genome_sets/gut_phage_database (ebi.ac.uk)
atgtggactttgagtctgctccagaagactttgattcttacgcccctgtgtggaagagctatgatcaatattgtcatgacatttgcacaattggaaagggaaacaatagtggaaagagtgaccgacaattactatttccgggctaataatggatattgggccggcggttatgctccatacgggtataagattaaacacataatcgggtcagacggcaaaaagcacagcatcctcgaaatagacaagggaaaatcaaaaattgtcaagcgaatctacaatatgtacatcaaccagaagattagcatgcggaaaatcgcccagcaattgaacaacgaaaatatccccaccctgaaaaatgggctctggggaattaatgcagtaagtgccattctctcccgccctatctacacaccagcaacagccaagatatacgagtacttcaccaaccttggctctaacatcacgaatgatatcgagtactttgatggaagtatgaccgctaatctctatggcaacgcgaaaaaaaacaccaaggtaaaagccctcaggaattacgacgagatgtaccttagcctgatcaattgtagccctattatctccaacgaggattggttcaaggcacagaaaattaaggggactaccaaacatctgcctcccaggactaatacctctaaaataagttttctgtgcgggcttgtgaagtgcggcaagtgcggcagaaatctggtgacacagggttgtaaaaatcgctatggcacacagtatcattacctgatttgtactaataagcggaactttggtgcctccgcttgcaacaacaagatgatcgatgtttctaagctcgaaaaaattgtgttgtcagatattaagcagtatttcaactctgactccatcattaacaaggtcaacaagtatatcaaggataatgaaagcaaggatattgagctgcttacgaaaaaggagaagctggaaaatgacattgttaaactgaatctccaaatcgacaaactgataaactctatcgccgagtccaacgagttcactctgaaatacatcaacaagaaaatcgaagagattgagatcgagaagcagaacaagttgaaggagatctcctcacttaacctgccgaataataataacgacgagctgttggactacattaagaacataaacgaaaagctgaatagcaacgattttaacgagctcaaaatactgtgcaaagcgcttatcgaaaaaatcgtggttaccgacaagaacattgatatacactataagatc

SEQ ID NO: 1188 - DNA, 1431 bp, unidentified
  source 1..1431: mol_type = unassigned DNA; note = Bacteriophage uvig_404291 from the Index of /pub/databases/metagenomics/genome_sets/gut_phage_database (ebi.ac.uk)
atggccggagtgaagaacattactgtaatccctgccaagaagcgagtaggaaatactgtgacagcagaagataaacctaagctcaaagtggtcgcttactgtagggtcgggacggattccgaagaacaagcaacttcacacgatgctcaggtgacccattacactgagttcataagaaagaatccagagtgggagtttgctggcatctacgcggacgacggaatctctgggacgaacaccaaaaagcgcgaagaattcaataggatgattgaggatacaatggcaggcaagatcgatatgataattacaaagagtatttccagattcgcacgcaacacccttgattgcttgaaatgcataaggcagctcaaggagaaaaacgtgcccgtgtttttcgagaaggagaacatcaacacaatggacagtaaaggcgaagtactgctcacaattatggcttccctggcccagcaggaatcagagagcctgtctaagaacgtgaaaatgggaatccagtttcgctaccagaacggggaagtccaggtcaatcacaactggttcctggggtatactaaagacgaaaatggccacctgattattgacgaggatcaaacaattatcgtcaggcgaatcttcagagaataccttcagggcgccagcctcaaaaccatcgccgatggactgatggccgacggtatcccaaccgccactggtaacaagaagtggaggggcgatgggatccgaaagatcctgaccaatgaaaagtatatgggggacgcactgctccaaaaaacctacacagtggatgttctgaccaagaaacgggtgagcaataacggtatcgtgccccagtattacgttgagaacaaccacgaggccattattcccagacagctgttcatgcaagtgcaggaagaactgttccgccgggctcatctgaaaactgagggcgggaaaacaaaacgggtgtatagtagcaagtatgcactttcttccatcgtatactgtggcaagtttggggacctttttagaagagttgcttggaaggccaggggagcctcctataacaagtggcgatgtgccagccggatcgaaaagggaccgaaggagggttgcgacgccgacgcaatatctgagactgagatcctcaatgccgtcgtgcgggctattaataagaccttgggaggtcgggagcagtttttggtccaactgcagcataatattgaggacgtgcttaatggcgactcaaccgccacgctcgagtatatagacaagaggatggcagaacttcaggagaaattggtcatgtgcgttaataagaacgcggagtacgatgtgattgctaatgagatagatgcgctgcgcgagaaaaaagccgctgttgttaccagagacggcgagcaggaaatgttgcgcaaacggatcgacgaaatg

SEQ ID NO: 1189 - DNA, 1548 bp, unidentified
  source 1..1548: mol_type = unassigned DNA; note = Bacteriophage ivig_756 from the Index of /pub/databases/metagenomics/genome_sets/gut_phage_database (ebi.ac.uk)
atgtcttactgcatctatctcaggaagtcacgaaaggatctcgaggctgagcagcacggcgagggcgagaccctcgcacggcatgaaagggcactgctcagcctggcgaagaagaacaacctgattatatctaatatctatcgggaggtggtgtctggggagactattgctgctcggcccgtcatgcagcagcttctccatgaagtggagcagaacctgtggcatggtgttctggtgatggaggtggaacgattggcccgcggggacaccattgatcagggagtggtacagagagcatttcagtatagcaataccctgatcatcacaccttctaagacgtatgacccagccaatgagtttgacgaagaatactttgagttcggtcttttcatgtcccgaagagagtacaagaccatcaaaagaaggatgcaaaatggacggtacgctgcaatttccgaaggcaaatggccttataattccgccccatacgggtttcgcagaacgaagctcgagaaggagaagggctggactttggctttcgacgaaaatgaggcccccgttgttcgccttatttttagcatgtttactgggccagaacgggttggcatacgcagcataaccagaacacttaatagctatggaacaaagcccaggaatagcaaactgtggagcgaatctaccgtgcgggggatactgagtaatgtggtctacgatcaatgtgtgaaaattggtgaacgaaaggtggtacgcacaatcgaaaacggagtgcttaccactgcgaggcctcggacaaacgactatactattgtttcaggacggcacccacgcttgatcgatcacgatgtattcgcagaagcccagtcctaccttggctgcggctcacctaaacctgccggctccaatatcatcaaaaacccccttgccggtattataatctgttctgagtgtaaaaaaaagatgatcagaagacctcccagcggaacagcttcaagggtcccatatgatctgatgctctgtagcacttacgattgcccaactattgggtcccctttggaccttgtcgaacgagaggtctacaacgccctgtccgattgggtcgagggctataggctttcaggtcagatgccctctaaaagtctgataccggagaaagaggtgttgctcgagagtgcgcagcagacactcgaccagctgctgaggcagaagggaaccatgtacgacctgctggaacaaggggtctacagtacggaagtgttcctggagaggtccgacagtttgcagaaccggatcagtgaggccgagtcaaacgtagctcaacttaaacttgagctggacaaggaacgccaaagagaagcaaacatcgaacagttcctgcccgcctgcgaggacctgctgtcctgctactgggatctgtctattcccgagcgcaacaggctgttgaagttgctcatcgagagcattgaatataagaaattgaccaaaaacaagcgaggccacctcaacgagccgaatttcgaacttaccatcaagccaagaattccgagaaaa

SEQ ID NO: 1190 - DNA, 1386 bp, unidentified
  source 1..1386: mol_type = unassigned DNA; note = Bacteriophage ivig_2327 from the Index of /pub/databases/metagenomics/genome_sets/gut_phage_database (ebi.ac.uk)
atgggggacgatatgaaagagaaaatcccaaggtgcgctatctacgacagggtgagtaccgatctccaggtaaaggaaggacttagcctcgaagcgcagagacaggcactgactgactatgccatctctcacgggtataagatcgttggttattacgccgacgagggcatcaccgcccggaaaaaaatgcaaaatagaaaagatttggttaggttgctgaacgatgttaagagcgataaaattgatctgatcctggtcacaaagctcgatcggtggttcagaaatgtgaaagattaccataatacgcaggctatcctggaagcacatgggtgtaattggaaaaccatctttgaagaatacgatactagtacgtccaacggacggttcgccataaacattatgctctccgtcaacgagaatgaatgtgatagggattcagataggatcaaaagtgtgttcgaatacaagaagtctcgcaaagagcatctgaacggtcgcccgggttacggatatattgcagacgagaataagaaactgattaaagaccccgctacacagcacatagtggaggacacattcaagcactacttctcaacctacagcaagaacgccaccatcgagtatattttggacaagtattccggagaccctaatgctcccaccatgtatcaggtgaaccggattcttacttgtgaaacttatgctggccgaaagtatggaattgacaattactgtgagccatacattactctcaagaaacacgaacaaataattagtgtatgtgatgctaagatcatcccacaccagaatgagccctttttgtttagcagcatgataaagtgccccatctgcggtagaaacatgtctggctttacaaaaaagcatacactcaaaaatggggagatatcaaagtacaagagatatcgctgcgaggccaagttcacagaatttcataatggcgcctgcatcactgagtctgtgatagaatcctaccttctcaacaacattatgggcgagctgaacaaggaactgttgcagattaaaacccgagagaaggagaacaagaagaagcctgcgtcaaaccctgtcaaaatccaggaggaaatcaaccgcctcaatgtcatgtatcagaagggccggatcgacgacgagtattacgacaaacaatactccaaactgaagcagaagcttagcgacgcacaacaccctcaaaaagtgacatctctggaggcctataaaccaataattcagacccttaatgacgggtggatggagatgtaccacacgcttgacattaagcacaaaaaagccttctggaagggcctcatcgaagcaatctacattgataaggagtcccgaaagctgtgcggctttaagttcctgctg

SEQ ID NO: 1191 - DNA, 1518 bp, unidentified
  source 1..1518: mol_type = unassigned DNA; note = Bacteriophage uvig_554333 from the Index of /pub/databases/metagenomics/genome_sets/gut_phage_database (ebi.ac.uk)
atgaaagccgtaatctacgcacggtattctgcgggttccggccagaccgagctgtctattgagggtcagcttagagagtgcaagaagtacattgagaaaaaagggtacgcactgggcgaagtttacgccgatagacacgtctctgggctgagcactaaaggacgggaggagttcaaaaggctcatggacgacgcaaaagcacataagtttgatgtggtcgtctgttacgacacatccaggttcgcccgggacaagtttgacgccgtagtctataagactgagctgcggaaacgcttgggcatcgcgattgagtgggcaaccatgaacgtagaaggccctgaaggcgttctcctggaggctatcatggaaggatggaatcagtatttcagcgaggagctgagccgcaagacgaaacgagggatggctgaagctgcttcaaagggacttagtcttgggtctcgcccacctctggggtacacactgaaagataggagattcgtggttaatgaagccggcgctgaagctgtacgagaagtgtttaaagcatatactggcggcgcctcctttgccgactgcgccaggatgttgaacggccaaggattcaggactgcaactggaaagctgttcaacggctccgccgtgaggtatatgctgactaacaagaagtatttgggcatccatggaggggcttctggagtggtgccagccatcgtggacccggaagtgttccaggcggctagagatcgcatcggtgagagacctcccaaaagtgtgaagcacgactttgccctggtggggaagcttacctgcggatgctgtgggtccagaatgaccggaacgagcacactcagtaagggtaggcggtactactactataagtgttccaataagtgcgcagggcaacctgtgagacaggacaaactcgacagctttgtcgccgcttgtgctcaggaggttctttcaaagcccgaaacggtcaaagaagtggccgccaggctttttgcctatcaaaagaaggaaaaccccctcgaatccaaaattgaagccctgggtaagagtctcaagagcctggatatgaagatagataatctgacaaccgcgctcgcagagcgacccgcctcaaaagcattgctgacccggttggatgacttggaagagcagagagaacaggttcaacgggctatcgaggcagagcctgagcaagagccgtgccgcatattgagtgagcaggctatcgccgacggcctcaccgggctgttggcgccactgtcagatccagaccggattcacagccaggagcgctggatcttggacagcctggtggaggccgtcgaattgactcccgatgaggtgctgattacctacgccaccgatagcattgttaaacgcgatcaggagggtcaggtgtccaagaaagtgctcatcggcacaccagattctacatttttcgaaacaatggagctctacaccgcacccggagccgtcatactgagttgttcacgatctgctgcttcattc

SEQ ID NO: 1192 - DNA, 1419 bp, unidentified
  source 1..1419: mol_type = unassigned DNA; note = Bacteriophage uvig_257872 from the Index of /pub/databases/metagenomics/genome_sets/gut_phage_database (ebi.ac.uk)
atgcgaatcggtgctgcctatatacgggttagcaccgatgaccagcttgatattagcccagagtcccaactcgatgagatccagcgatatgcaaagagtcacgatatcctgattcccgaggagtatatcttcatggaacgcacgggcagatccggtaaaagggccgataatagacctgaattccagcggatgatagctaccgccaaggaaaagcctcaacctttcgaagtgatactggtttggaaattttctcgctttgcgaggaatcaggatgagtcaactttctacaagggcatgctcagaaagaagttgaaaattgacatcgaatccgtgagcgagccgatcatggagggcatgtacggacggcttatcgaaatgataatagaatggcaggacgagttttactcttacaacctcggcgtggaagtgaaacgcgggatggcgaaaaaagccgagctgaaagggtaccaactggtaccccctctggggtacgcagctgtcggaaatggaaagccctatgtgatcagagaggacgagtacaagatcgtcgaaatgatctttcacatgtacgccgtagacaggctggatatgacagcaattgcccggcagctgaatgcatctggatatctcacacgccgggggaaccccttcgagaagaggtcaattgaccgaattatccagaacaggttttacctggggactgtggagtggaatggattcagtttcgaagggatgcatgaaaccaagccctcagtgactaaactctttgagcagtgtcaagagaggcggaaagccgaatttcgaccaatgcgccacaggaatgtgagcacgtgcaagcattggcttagtggtctgatgcgctgctctgtttgtggcgctaccctcagctataccgggagcggcgctgtgccatactttacatgctggaaatacagtaagggccttcatcctgagtcttgctccattagcgtcaagaagatggaacggatcgtccttagatcacttgacggaattctggaaagtggccatttcgagtatacaccggcagcctctgcgtccggctcacccgctaacctgtcaaacgaaatccaatcccagctcgatagacttcgccaccaggaggaacgagcccgaatcgcctatgaaaacgaggtctacaccctcgacgagtacaaagagtctaaagctcggctgaggtccgagattcagaggttgtccgacgagctgcagcgcctgttggagcagccagccgagagcgccccacctcagaaggaacttctggacagagtgcggaatgtacgagatttgcttgcatccccaagtgttggtttcgagacaaagggcaacgctttgagaagcattctgaagtgtatcgtgttcgacagaaaaactgaacacttcgattttcagtattatgca

SEQ ID NO: 1193 - DNA, 1473 bp, unidentified
  source 1..1473: mol_type = unassigned DNA; note = Bacteriophage uvig_210496 from the Index of /pub/databases/metagenomics/genome_sets/gut_phage_database (ebi.ac.uk)
atgtaccttcgaaaatctagggcggaggaggggcagagcaccgaagaggtgctcgccaagcacagggcagcccttgaagagctggcagacagacttggcttgcccgtagatggagtgtacgaggaggtggcatcaggtgagaaactgtatgctcggccagaaatgctgaaactcttggaacgcatccgggcaggggaggttgaagccgtgctttgcatggacatcgatcgacttggtaggggaggcatggccgatcaagggacaattctcgacgcgtttcgggagtccggcacactgataattacgccagagaagacctacgacttgaccaacgatgtagacattgaaatgaccgagttcaaagctttctttgcccgcgccgagtggcgcgcaatcaggaaacgcatgagacgcggactgatgcagactatcgaagcaggaggctatacagcgaatgccccgtatggttaccgaaggtgtcgaatcgggaaactccctagtctggaagtgatacccgaggaggccaggtttgttagatatatctatgaacggtatctggctggcatcggcgcccaaacaatagctcaggaactcaatgccatgggctcctgtccacggaggggcgctgagtggaaccgaaatactgtgagacacgttcttaggaaccctacattcgcagggaaagtcgcttggaaccgggttaaacactacagaccaggcgcccatggaaaggacaagcaccatgtagtgtacactcccgagggcgaatggcttatggtcgatggagtccacgaggcgattataccgtgggacacatggctggaggctcaggagcggagaaaacagaggtacatccctccatctaacactgggcagagagctaaccctttcgctggaattatccggtgttctaagtgcggcaacaatatgcagaggatgggtaccaataagggggagccctacttgctgtgcaccaccaagggatgcacggctggggccaagttcgagtacgtggaagaaagaatggtcgaactcctctatgatgagctggccagactgagactccttattgatagcggggctgcccctaatgtggatgcactggaagcggcccttgctgcggcccagagggaacaagaacgcgtgcaggcccgcattccccgactgtatgagtttctcgaggacggcacttacgaccggagtaccttccgaagcaggctggaggctgccgagaaggagcttgcagagctggccaacaagagagcagatctggagcgccatatcgacgaacgccggcggtccgacccacgaaaggccgctgccgcattggaaaatctcgtgcagttgtatcctactatgagccccgcggataagaattcagccctgaaagcattgggtgtcgaggtcacttacacgaaggaaaaaaagacaaagcccagagactttaccctggaactgcaactgcgcgatttt

SEQ ID NO: 1194 - DNA, 1461 bp, unidentified
  source 1..1461: mol_type = unassigned DNA; note = Bacteriophage uvig_151237 from the Index of /pub/databases/metagenomics/genome_sets/gut_phage_database (ebi.ac.uk)
atgaatgatatcaagagaggtgccctttacattagagtgtccaccgatgaccagacagaatacagcccagattcacagatcaagctctgctacaagtatgctaaagaacacaacatagagattttgaaggagcacatctaccaggaggatgggattagcgggacaaacgtcgaaaagcgcactagctttaagcggatgatcgcgatagcgaaaaaaaagccgaagcctttcgatgtgattctgatctactctttctctcgattcgcaaggaacagggaggacgccattatgtataagtccttgttgcgcaaaaagctgggcattgatgttgttagcattacccagcctctgtcagaaggcaaagagtcaatcttgatggaggccctttacgaagctatggacgaatactattccgtcgacctcgctgaacagtccatacgcgggaagatcgaaaaagcctctcgaggggaacatcagggaggaactccatatggttacatctacaataagaacaccaaaactttgtatcccgacaaggagaaggctgagattgttaaactcatattcaaggaatggattaaacccgaacagagcattcgcggcctttgccggatgttgaatgatatgaacatccttactactcgaggctgtaagtggtctgatagatctatgtatctgattctccaaaatcccgcttatatcggatacagtaggtttaccgtcggaggaatgaaaagaaattacaagcatccaaacacgataaccgcaaaaggcaaatgggaacccattattgatatggagacatggaatttggccaaacagaagatggatgaccacgacaaaaaatggtttaagtataagaagcattacacgaaaaacgagttttggctgaggggtattgtaaagtgcagtgactgtggcaagagtctggtgaggtgcaacgtgaaaggcaagcctgtccctttctttcaatgcacaggtttcaccaaagggcgctgtcaagattcacactacattaggcaagatcagctcgtgccggcaatcctggagcagatcaagaaggactatacctacaaactcaacatcaagataacagagggcaaggacaccccacagtatgaccagatcagcatcataaagaagaacatcgaaaagctgaaaaccaaacgggagcggatcaaagaagcctacatcaacgagatcgacaccctcgaggagtataaggaaaataagaaaaagctggacaatgaggaaaaacagctgaaggaacaactgaaagagctgaattacaaagagaagcaggaggtacggaaagagaagacatatgagctgtgtaaaacagcatatgagatcctgtccgacgaggaaactagttttgatcttaaagatgacgtggcccacagacttttcgaccatattacttataacaagaaggagaatacgctcgagatcgtgtacaaa

SEQ ID NO: 1195 - DNA, 1659 bp, unidentified
  source 1..1659: mol_type = unassigned DNA; note = Bacteriophage uvig_206100 from the Index of /pub/databases/metagenomics/genome_sets/gut_phage_database (ebi.ac.uk)
atgaagaagattgaaacaaaccagcccaccgtggaacggggagttatctacgcccgctatagttcaagcggccagcgggaggagagtattgaaggccagcttcgcgagtgtaggatctacgctgaaaagcacggaattacaatagtgggtgagtattgcgatgcagccatgacaggaacaaatgataaacggcctcagtttcagagattgattcgggacagtgctaagggacagttcaccgtcgccattctttggaagatcgatcggtttgcaaggaacaagtacgattctgcgatctacaagcataagcttaagcagaatggggtgagaatcgtgtatgcgaaagaaagtatccccgatgggcctgagggcattattttcgaatcattgatggaaggcttcgccgagtactattccgcgaatctgtctcaaaacgtgaaaagggggctttatgactcagcactgaaactgcagaccctcggtcagacggcttacggcctcagaaagggcacggacggtaagtgggaacacaaccccgcacaagccccaatcgtaaaaagaatttttgaggagtacgttgccggcaggtctatcatttccatctataagcagctgaatgccgagggatatcggaccctcaacggagggatgtttaataagaactctctccggactatcctcaagaatgagaaatactgtggggtctatcagtacgctgatatcagggtcgaagacgggataccagccataatctcaaaggagctgttcgctatggcacagcagatgattaaaaaaaaccacgaaaaaccggcagccaaaaaggaagacggtggattcctgctcagcggcaagctgttttgcggtcactgcggcgagctgatgactggggattgcggtacctccaaactgggacgaatctatcgatactatacctgtattaataggcgccagaaaaaatgtgacaaagaaagagcccgaaaagagtggatcgaggatgtgattgtccataagcttgcagaaatagctaattgcgacgatgtgattgatgagttcgcggatcgctacatggagtggcaagataaacagaagcctatgtcttccgagttggaagacaggttgaagaaggtggaagccgctctgcagaataatatgagcttggttgacagtgggttcatctccgagagcgtaaagaatcatattatgcaacttgagactgagcgcactcagcttgagcaagggattttgaaagagcgcctcaactctcccaagctcactagacagcaggtagtgtacttcctcaaatcttttcgaaaaggcgatatcaatgacatcagctggcggatctacctggtggatacctttctgcaagccgcatacctgtatgacaacggcaatctgattttgtccctgaactttagcggagacaacaacaagataacactgaacatagctgaggctgctgtggtcggaggggaacaaatgtgcagcgacttcgcccattcctgcccacctaaagaatcactggacgtcatctacgccttcgaagcatttttcttctgtataaggtacaaggacgagcttttttgtggctccagaaagcacgacaaccgcttcatcgacctgggcaagtgcagaggcagctatgttgtgtttaaacgc

SEQ ID NO: 1196 - DNA, 1566 bp, unidentified
  source 1..1566: mol_type = unassigned DNA; note = Bacteriophage uvig_134660 from the Index of /pub/databases/metagenomics/genome_sets/gut_phage_database (ebi.ac.uk)
atgaacaacacatacacccttgagaatgtcattatctatttgagaaagtcacagtccgacgaccctgccatgagtgttgaggaggtgctgaaaaagcatgaagacgtgttgcaggagttttgcgagaacgagtttggcaagaggattcccgagaaacagatctatcgagaggtggcaagcggcgagacaatcgaggaccgccctgtgattcaagccatcttgaagctgatggaaaccgactcccttaagggcgtgatcgttgtcgagccccaaagattttcccgaggggatcttcaagactgcggtaggatagttaacgctctgcgatatactaacaccctggcaattaccccacagaagacgtacaacttgaatgacgagtatgacaggaaattcttcgagatggagctgacgaagggatctgactacctggagtattacaagaagatacagaggagagggagagaggcgagcgtcaaaaagggaaattacataggcagcgtgaccccatacggatacaacaaggctacctatatggatggtaatagaacttgtcatactctcgccattaaccagatagaagcagaagccattcgcatgatggccgatctctacctgaataaggggtacggattcaccaagattgcccgcgcactcgatgagatgggatacaaacctcggaagtctgaaaagtggtctcccgctgcgattaaggacatcatggagaatcccatcataatcggaaaaatccgatggaatagacggaaaacaatcaaaaagctgtgtgatggcgaaattacgaaaagtcgacctaaagctcaggattacatcttggtggacgggaaacacgaagctattctcgacgaggagacatattataagatccttgataaacggggtaagaatccccggctgcgcaaatctaaagaattgactaatccatatgccggcctgctcttttgcggcacatgtgggcgcgctatgtcccacaaaaagtacaaacagaggaaatctaacactatcagtgagtcaatgttgtgcaacaatcaggccaattgccacactaagagtgtcatgtactcaagctttgaaaagtccgtgattgaaagccttgaaaaggccatagccgatttcgaagttaagctgcaaaacaacaatggggatatcacatcactccgcgcttcccggattaagaccctggaaagcgaactgaagacattgttggaaaaggacgagaggcagaaggacaacctcgatgacggcatctactccaaggaagaattcttgaaaaggaacgcaaaagtccaggagcagatcgaaaccactaagaaagctctgtctcaggtaaaggacagtatcctcccagagatcgattataaagagaaaattgtacggttccaagattgtctgaatgccctgaccgatccgaacgtgagcgcgccgcggaagaacatgctgttgaaaagctgtatagacaagattgtgtatcataatgattctgagtcaaaagcaggtatcggcagatacgtagacaatccttttaaactcgatatcttcctgcgactt

SEQ ID NO: 1197 - DNA, 1578 bp, unidentified
  source 1..1578: mol_type = unassigned DNA; note = Bacteriophage uvig_234005 from the Index of /pub/databases/metagenomics/genome_sets/gut_phage_database (ebi.ac.uk)
atgaacttcggcatctatggccggaagagctattttgtggacacatcagagtctactcaaatgcaatttgacgtatgcaaagaacatatcagactccacttccccgaagaggaaataagttcaatcaccctgtatgaggacgatggttacgtgaggtccgatatggatcgcccgggaatgaaccagctcaaagaggacattgcagccggtctgattgattgcgttattatctacaaaattgatcgaatatgttgcgacatgatggacttttgcgttttctactcattcctcaaggagcacgagattaagtttatcacagtcaaagatggaattgacaccacaacaccactcggggaggctatgatgtatctggccgtgatattctctgggttggaggtgcgaaccgattccctccgcataaccgacaacatgaatcacctggccgaatccggcttctggtgtgggggccggccaccaatcggctatagcatcaccactgtcgacctgggacccaagagtcacaaaactctggagtttaatcaggaggagatagattataagaacaacttggtgcggatttttctggacaacaatttctccctgcaaaacatggaaacctattgtaagaataacgggctcaccactctgaatgggaagttcctgagcaccacgcagctgtatagtatgttcacttctccccattgtgtcgaagacacagccgctatgtacgactattttgaggcaaaaggttgccaaatgaccagcccccgcgaggaatgggatggcagccacggtattattatctacggcaggacgatggaaaaaaaggtgaacggcaaaaagaagcaccagcttgccccacccgagaactggagagtgtctattggataccacctgccttacatgaaagccgaaacgtactttcagcttcaggcccagttcggacataatatcttttccaaaaagccgaagtacgatctccctctgcttaaagggtctttgagatgcaagtgcggacgcatgatgtccatgtcacgaaaaaagaaagtagacggcagcgtttccacatggtattactgccctaaacggatgcgatcaggtgtagacgcttgtgatatgggacatatcaagagtgaccttttggacgaaaaagtgctggatgtgtttagggagattaaacatgatcctgccgcaatcagaaagtacgtgaagggcatcgacaagaagcctaaagacaattctgtgacacttagaactaagatgcagcagtgtcaggacaagatcgaaaaactgaccgcggccctcgcagcaaattctgagagcgcagcggccaagtacatcgtcaatgaaatagaaaagctggactgcgaatacaataacttgaaacggaaggccgctagtcagtccgctgaagagcggcgcgcagctgttaagtataagaatgcgatggagaaaagggacgaaattatcaggcttctcgatgactttgataacttcagcgccgatgagagaaacgctattgctagggatgtcctcaaagagtgtaagtgggatggggagactttgttcatcatgctg

SEQ ID NO: 1198 - DNA, 1572 bp, unidentified
  source 1..1572: mol_type = unassigned DNA; note = Bacteriophage uvig_146622 from the Index of /pub/databases/metagenomics/genome_sets/gut_phage_database (ebi.ac.uk)
atgctcaagtacaacagcgagacaaacctggactccgacatcgactcagatatcgataagtacgctatctatctccgaaaatctagggcggatctcgaagccgaaaaaatcggagacggagaaactctggcaaggcacaagaaaatcctcaccgatctggctgctcggaagggcttgtatgtatctaaaatatatgaggaaataatcagtggggagacaatcgaggcgagacctgagatccagaaactgatacaggattgctacgacggcaagtataggggtattctcgtggtggaggtcactagactgagtagaggcaaccaaggagatgcccagaccataatggattgtctgaagtattctaattacaacaagggccttctgattgtgacacctacgaaaacgtacgatattgtgcattcccaggaggacgaggagtatatggagtttgaactgtttatgtcacgccgggagtataagatgattaaaaagaggttggaacgggggcgcatgcaagctattgtcgaaggcaattatatggcctcccaccgaccgtatggatataatatcgtcaagacgaagacaggccggacactgatccccaataaggacgaagcacccatcgtcaagctgattttcgatctcgccgccgataacgtacctctgctcacaattgcacgccatcttaaagatatgggcgttccaacttacaacggggactactattggagtagagtttcagtcaagaggattctggagaatccagtgtatattgggaaggtgagatggaataatcgcaccaccatcaaaacaatggttgacggcaaaatcgagactagacttacaacgcttaacaagaaccactacatggagtacgacgggaaacataaaaaatacgcactgaccgatgaagaaaccttcgccaaagtgaacagccggcttacagagacccggactaagtatgactacaaacttgttaatcctctggctggattgttgaggtgtaaaaagtgcggacgcgtgatgaatctcagaacctacgactccagaaagtataacgtgagcccacgatacaaccacgatgggagcccatactgcaaactttcctctgttatgtacactgatgtcatcgacaccctgattcgggcccttgaattgtatatcgaggactttaagatcgaaatcaacaatgactttcagcacgacgacaccaatatacagatgcagatccaaacccttaagagggaagaaacaaaacttaaacaaaaaattactaagctgttcgactcttgggagaatggtattctgaatgataacgagttcatcgagcgaaaggtaatcaataacgagagtcttgagaacattcagcgccagatacgggacctggagaaatcaatccccgaaaagatagattacaaggaaaaaattattctcctgagcaacgccgtggagtccttgagggacgataccgtgagcgcaaagatcaagaatgactacctcaaggagataatcagcactatcgagtactctcgcgaaaggcccggtgagttcattctggatattgaacttttg

SEQ ID NO: 1199 - DNA, 1569 bp, unidentified
  source 1..1569: mol_type = unassigned DNA; note = Bacteriophage uvig_356610 from the Index of /pub/databases/metagenomics/genome_sets/gut_phage_database (ebi.ac.uk)
atggcgaagagtgtaaccaccattccggctaccctctctcggttcactgcagcaccaatcaattctactaagaagcggagggtcgctgcttatgctcgggtatcaacagacaacgaagagcaattgacaagctatgaggcccagatagactattacaccaactatattaacggccgcgacgattgggagtttgtgggagtttaccccgacgagggcatcaccggcaccaatactaaaaaacgagaacagtttcgccagatggtcgcagacgctctggatgggaaaattgatttgataattaccaagagtgtcagccgattcgcccgcaacaccgttgattctctcacaacaattagaaagctgaaagaacacaacgtcgaggtttacttcgaaaaggaaaacatatggacgtttgactccaaaggggagctgcttctgactattatgtcatcactggcccaggaggaaagcaggtccatatccgaaaattgtacttgggggcagaggaagagatttgcagacggaaaggtgaccgtgccttttaaaaggtttctcggctatgacatggggccagatcataatctcgttgtgaaccccgagcaagctaaactggtgaagagaatctacggcatgttcctgcagggacagagccctttccaaatcgccaggaccctcacggaagagggtatccccagtcctggtggtaaagatcactggaatccgtctaatatcaagagtatcctgacaaatgagaagtacaagggggacgcccttcttcaaaaatccttcacggtggactttctgaccaagaagaagaagacaaacgagggcgaaatccctcagtactatgtaaaagacaatcatgaggcgataatcgatcccgagacttttgaaatggtgcagacacttatgacaacaagaactaagggccgaaatcggaaatctagcgtgtcaattttcagctctaaagtgaagtgtggagattgcggatcctggtacgggccaaaggtgtggcactccaatgatgcttatagaaaagtcatatggcaatgcaaccacaagtttgacggacagaaatgcgcaacccccactctgactgaggatgaaattaaagagcttttcctgcgagccgccaaccaagtgattgatcagaaggaacagttcattgcgatctatgagcaggtcctgtcacgctctctggatacaacggctctcgagagcgagctgagcgatctcgaggccgagatcaacatcgctgccgaactcattgaggagtgtatcaaggaaaacgcccacgtggcgctggaccaggacgaataccagaagcggtacgacgccctggtggcaagattcgataaagccaaagctaggcatacagaagtaaccgacctcatcgccgagaggatggcaagaaaacaccagattgagagttacctcaaggaattgcgctcccgggagccattgacggaattccgcgagaccgattggttggcaatggtcgattacatcaccgttcattccaaaaaggacattcgggtgacttttaaggacggcacagaaatcaaagcc

SEQ ID NO: 1200 - DNA, 1752 bp, unidentified
  source 1..1752: mol_type = unassigned DNA; note = Bacteriophage uvig_243310 from the Index of /pub/databases/metagenomics/genome_sets/gut_phage_database (ebi.ac.uk)
atgagcaacatctaccagttgagggaactgctccgcacccagactatctatgacctgcctctgagggtggcatattacgctagagtctctactgatcatgacgagcaaaagaccagtatcaaaaaccaggacgactatttcaaggagctgataaagagtaagcctaactggaagttcatgggcggttacattgacgaagggatttcaggcatagcagtcaagaagcgcgaagatttcctcagaatgatagatgacgcgaaaaacggcaagatcgatctgatccttacgaaagagatcagccggtttgcccggaatactctcgattcaattaagtatacacgggagttgctggcttgcggggtgtgcgtgtggttcatgaatgatggaattaatacaattgatgaagattcagagctgagactcacgattatggccgctatggctcaagatgagatccgaaaaatgagctctcggattaagtttggacaagcccagtctatcaaaaatggggttgttatgggaaacagtaggttgtacggatacgataagaaggacggcaaactgaccatcaacgaagccgaggctgagatggtgcgctttatctttgaaagctacgcctcaggaaactggaccactccacagattgaaaggtacctgtatgagaaaggttaccgcaactataacgggggcaagatcaataggggagtcataaagaatataattaagaaccctaagtacaagggatattatgccggcgggaaggtaaaggtcattgacatgttcacaaagaaacagatgtttttgcccaaagaccagtgggtgtactacaaggatgacggctccactgtaccccagattattgacgaaaaaacttgggaggatgccaattattacatgaagtctcggggtgataatattaggtcccacagaaccgtgtttaagtacggaaacgttttcaccggcaaggtgatttgtggtatcgacggggcaagctactggctccgagagcacaaaatccgaggcaaagagtccgatccccgatgggtttgttctcacaagattaagaatggcgccaattcctgtctctctgtgcccgtgcgcgagagcgaccttaaacagatggtggcttcagccataagccaggccgccgggaacagtaaagatgtgatagacagctacatgaactattatctgaaggcaatcgatgattccaaggagaaggaagaagagattgctgtgctgcgcaaaaacatcgagtccaccaaacttaagatggagaagatcctggactataatcttaatgggagcatttcagacgacgagttcctgaaacggaatgcagcgtataagaaagagattgagaatgcggaagaaaaaatactcaaactgagtaaaaaacctgaggaaccagactccatagcaagaaaaatcgagcaaatcagagaatatcttgcaaatacagaaatagtcagcgctgacgacatcacaaagcagatcgtggaaaaactgattgagaagatcgttatcctcccggaagaagagaaaggcatgaaggtaatcaaaagtgagatctacctcatcaacaaggaactttacaagtttagaaaagagatgggtaccaagacatcctgctctgacaatgtcacgttgatcatgttcccaaaacaacggatggaaattacaaacgagaacgcccattgcgtaaaccagtacaaacgattttctatcgagttctccctgtttgtcaggttc

SEQ ID NO: 1201 - DNA, 1575 bp, unidentified
  source 1..1575: mol_type = unassigned DNA; note = Bacteriophage uvig_278686 from the Index of /pub/databases/metagenomics/genome_sets/gut_phage_database (ebi.ac.uk)
atgcaagctgccaagaacatcacggtgatcccagcaacacgcatgatgcatacggggttgccacgaaacgctgctgtcagaaaaagggtggcagggtatgcaagagtgagcaccgactcagaggagcagcagacctcatatgaagcacaggtggattactataccaactacatccagagtaagccagattgggagtttgtcaccgtatacactgacgaaggaatttccgctttgaacaccaaacacagggacggctttaatgagatgatccaagatgcgttggatggcaagatcgatctgattgtgacaaaaagtgtgagtcgctttgcccgcaacacagtcgactctttgacgaccgtgaggaagcttaaggagaagggtgtggaggtttactttgaaaaggaacagatttttacacttgactctaaaggcgaattgctgattacaatcatgagcagccttgcacaggaggagagcaggtctatttcagaaaatgttacttggggacagcggaagcggttcgccgatggaaaggtctctatcccgtacggacaattcctcggctaccggaagggcgctgatggcctgcctgagattgtgccagaggaagccgagaccgttagaacgatctatcgactgtttatccagggcaaaactaccaatgctattgccgcctcactcaccagaaatggggttcctacccctgggggcaaagagaagtggcaggctaccactattgaatccatccttacaaacgaaaaatataagggaagtgcgctgctccagaaaaaattcaccaccaatttcctcacaaagaagatgaagcctaacgagggggaagtgccccagttctacgtagagaattcccacccggctattatctgccccgaagaatgggacagggttcagaacgaaatgcttcgcagaaaggcgactggaagacatcagaacagcctctcccccttctctgccaagctcatatgcggcgactgtggtggttactacgggtccaaggtatggcattctaatagcaagtatcgacggacgatttggcagtgtaacggtaagtttaaaggggtagagaagtgccgcacaccccatctgtacgaggacgacataaaagcaatgttcctgaaagcagtgagtgaattgatgattgatagggaggctttgatcgacgacggcagagtgttgcacactgccttcactgatttcaatgccatcgataaggaagtggccgagataacaagcgaaatcgatgtgctctcaggacttgttcagaaacttgtggacgagaatgcatccaccacactggaccagacagagtatcggagccggtatgatgggtacatagaccggtacgacaaggcgaaaaagcgactggccgccctgcaggaacaaaggcaactgcaagagctcaaaggagatatactgtccgggtttctgttcgagttgggtgaactgtatgacctgcccatggtcttcaaagatgagacttggaacgccctggtcgaccacgtgactgtccacaaaggaggccgcgtggtctttacctttaaaaatggcactgaggtc

SEQ ID NO: 1202 - DNA, 1659 bp, unidentified
  source 1..1659: mol_type = unassigned DNA; note = Bacteriophage uvig_441833 from the Index of /pub/databases/metagenomics/genome_sets/gut_phage_database (ebi.ac.uk)
atgcagtatgacaaagctgaccagcagaactgtccacgccgggtggtgttctacggcagagtttcaacggaacttgaggcccagatctccgctctcaagaaccaaatgaattggtacctggaactggcggagcaccaccctaactggacggttgtcggacagtacgccgacgaaggcatatccggtactggaatgaagacaagaccttcttttatgaagatgctgagagatgcccgaaagaaaaagtttgatctcattgttacaagggaggtctccaggtttgcacgaaacacggtggacaccctggtcactaccagggagctgaaacagtacggtgtggaggtgtactttgtgaatgatgatatctggaccatgcggggtgatggggaggtgcggcttaccatcatggctagcttggctcaagatgaatcccgcaagatgtccgagagaaccaaggccgggattcagacaagccagaagaaaggcacctatgttgcaggccccacccccttcggctataaacgcgacaaaaaagcccacactcttgtcgtacaggaatctcaggcggaaacagtgcgcaaaatttttgcctggtacgctgatggcattaatggaactgagattgcacagactctgactcaagagggggcacctaacaagagtgggatgccgcaatggtctgcacggcaagtactctccataaccaagaacactatctacaagggttacttgacctacaacaaatcacatattgacgacttcctgagccacaagagtattaaaaacagcgaacaggactatatcctggtaaaagggtctttcgagccaatcatatcagaggagctctgggacaagtgccagcgccgacggcacgcctggcagagctacatcgatggcaacatcacacaagcctatctctatggcaaaagtgaacatgcagacaagtgggcctgccggttgttctgtggctgtggcgcaaggatgcgcgcttttcgcgcggagaaggggattgtccgatacatttgttatcagaggagtcttagaaacgtggcccccaagtgcagtgctccaaatgtacaagcctggaagctggaactcatggcgagagagatctacaagaacgtgtggcaggatcatcgccaggatatacttgaagaatatcagcaggagcaagagaatggagcagctgacagcgagaaggtggaagaggctctgtcctggcaggaatcattcccgaacgatgaaatctctaggaaattcctggatcgcttcgtgcccagaattttttcaatcgacggtcaaaagttcatttgggagctcaatctgtttcaggagtcttgcacagttcagtgcaatgtcagaggcacctataactatcacagcataagcgccgagaagatcatgcccgggaaaacaaaagcgaaaaagggagacggagcagtcaatagaatccttgaagtggccaattccacacgattctgggtgcatacttatgacgacgatccaatctcaaggttgctttccagccggcttgctgccgacctccctgcctctattacaatcaagctgaattacgaacaggctagggcctaccggaatagtaggggatacgtcttgtggcctgggaattggaaagatctgaccgtgaaagttcttctg

SEQ ID NO: 1203 - DNA, 1608 bp, unidentified
  source 1..1608: mol_type = unassigned DNA; note = Bacteriophage uvig_584681 from the Index of /pub/databases/metagenomics/genome_sets/gut_phage_database (ebi.ac.uk)
atgaagctgactcatggcgcctatatcctcgccagattttcaacagataggcaggacgctgactccattgaagtacaagtcagtaggtgccgagagtggtgcgaccggcaacggctgcccgtccttgatgtctttgccgacgaggcagttagtggcatgaaagaaacacgcccacagttcgataggatgatgcggctgctgtcagagggcggagccgacactgtggtgatctacgaccaatctcgcatgttcaggaagatgaccgcatggttcaccctcagagaacggttggaacggttgggagtgcgcgtggtttccgtgactcagccgatgatcggaggagacctgagggatcctgcgacctttatgagcgaaggcgggatggcactcatgaaccagatgtgggtactgcagacccgccagaaggtgtgtgaaaaaatgagatggatggcagagcaggggaagtatacaggaggcgttccgccccttgggtacgtagtaattgacgggcgcatagaagtgtgtgagcctgaggcagagaccgtgcgaatcatattcggcgactatgccgccggccggtcatatagggagattatccagcgcctgaatgccgaaggtcggaggactaaaagtgggggtaccttcgggagtaactcactgcatgatctgctgaagaacgagaagtacatcggcgtgcttacctacggacgaacgcaaaagaggcctgatggcagccgaaacagccatgctgtcgctagcaccgtgatgagaatggaaggagttatacccgccatcgtcgatcgggagacgtgggatattgtccaggagaagctcatggccaacaagcgcaagcaggctggacgccctgtgcgagtcagagagtatccattgaaaggcaaggtgttttgcggggaatgcaaagccagcatgtccgtcacctgttctcagggcggctactactactatgcatgctccgagaagaagcgaaaaaaaacatgtgataacatgccaatcaaggttgacgacttggagcgcatgatcgccgaagctattaaaaatatgttgggaaaccccgagaatgtcgatggtctcatttgtatattgagagaagaacgggggaagatccaggagcagacagctatgagaatgaaggctctgttcgataggcaggcagagatcaaaaaacagcttgacgcagccatgtctgcggttcttgctggtatgcactctcagagccttattgacacggtgcacgccctggaagcagagcaggctcagaatgacagagagatgaccacacttcacaatcaagcccaaggcacaactattccagaagatagactgagagaactgctgaaggttgccgccaatgatattcctgcgctgctctctgtggtcgtgagggtagaggtgggaaaagatcgaatcagggtgtggactctcctcgacgcgaaacctgatggtactttcgactttaatacagattgggacgaccccgagattggccttataatcattcctggggtggctccacccgtgccaagaattatcatcaacgggggtctcctttgcttttccctgccccgaccgaaaaagaatcgggctgag

SEQ ID NO: 1204 - DNA, 1425 bp, unidentified
  source 1..1425: mol_type = unassigned DNA; note = Bacteriophage uvig_441567 from the Index of /pub/databases/metagenomics/genome_sets/gut_phage_database (ebi.ac.uk)
atgcaagaagaacttagtccagacgcgcagctgaggctgattagagagtactgtgatcggcacaactacatactgcccgaggagtatatctttatggacatcgggatctcaggaaaaaaagccgaaaaacgaaacgattttatgcggatgatttcccttgcaaagcagaagcagggaagcccctttgaagccatcctggtttggaagttcaacagattcgctcgaaatcaagaggagagcatcgtctataagagtatgctcaggaataagtgtaatgtggatgtgataagcattactcagaccattaccgaagacatctacgggggtttgattgaaaggatcatcgaatggactgacgagttttactctatacagctcgcagaggatgttactcgcggtatgaccgaaaacgctttgcggggaaacttccaagccagccctgcactcggctatcgagtgatccagaaaggggtcccgcccattgtcgacgaagaccaggcagcaatagttcgaacgatctttaaactctatacgagcagcactatgggcttctacgagatcgcccgccatctcaattcactggggtataagacccggaataagcgagagttcgaggctagggggattaagtatattttgcagaaccccatctacaagggctatctgagatggaattactcagattcttccaacaaggaaatcaagcctgagtccgagtggattattcgcaagggcaacattaaaccgattgtctctgaagagatctggacattggccaacgacaggatcaagaccgagtatcgacctagaggcggtaagcccataacacagaaacggcactggctctctggcctgattaagtgctcatcttgcggagctagtctgagcacctccgtgcacagagataaacgctatggacgcatctacactaattttcaatgttacagatatgtgaaagggaaatgcctggtatcacatggcatttccgagaaaaagctcgtgcctctggtgttgtctgctttggaggaagacatgaacaagagtagcatcgagtgcgaatatatcccaccagagtccgttaccaacgaccttgatatcctgaaatctcagctcaagaagcttgatgcgaaagaggaccggatcaaggaagcctaccagtccggaatcgacacattggaagagtacaaggagaacaagctgaaactcaaaaaagacagagaaaagctgagcgtggagattcagaaacaggaggaacagaagccagaagtaatcgatatgcctgataggatccggggcgtgtataatatactgacatccgaccaatgtaataaggatgagaaatacgccgccatacgcagtattgtcaaaaaaattgtgttcgacagggagaataagcttatagatatctactactacacatcagtc

SEQ ID NO: 1205 - DNA, 1731 bp, unidentified
  source 1..1731: mol_type = unassigned DNA; note = Bacteriophage uvig_3575 from the Index of /pub/databases/metagenomics/genome_sets/gut_phage_database (ebi.ac.uk)
atgccaaccagcaaaaatactgcccggaaatatgctgctggcggtggctcagataacagctgcggagttgaacccttgagggcggtcatctatgcacgctattcttccagtggacaacgggaggaaagcattgagggccaactccgagactgctatgagttcgcaaaaaaacacgggatcattgtgatcggagagtatatcgacaaggcaatgacgggtagggtggacaggaggcccgactttcagcggatgatgaaggattccgaaaaaggaaggttcaattgtgtgttgttgtggaagatggatagatttgctcgcaacaggtacgactccgcgatgtacaagtacaagctcaagaaaaatggcataagaatcttctacgcaaaggaaaccatccccgacgggcctgaggggattatcttggagtctgtcatggagggctatgctgaatactactcagagaacctggcccaaaacgtgaagcggggtaactacgactcagctctggagctgaaaactcttggcaagacctgtctggggctcaaaaccggaccagatggaagatacatgatagaccaggcagaagccgctattgtaagaaggatcttcgaggagtatgcagagggtgagagagctaaggatatctatgaacgccaaaacagtggcggctaccgaactggcaggggaggcaagttcaacaagaatagcctccggagaatcctgagtaacaagaagtatattggtgtctacgagtatgaggatatctacgttgaaaacgggataccagccattattactgacagggatctgttcgagcgcgtgcagaagatgctcaagatcaaccacgacgcccccgcacggggaaaggcccagaattttctgctgacaacaaaactgttctgtggactgtgcgggagcccaatgataggagatggcggcacctcccataccgggaaagcatacgcctattacagctgcaccaagcgcaagaggggccgatcatgtaaaaaagaatccgtgcctaaagactggattgaagatcttgtggtgggcgaacttgtgaaaattgtacataatgatgaacttatagaacagatcgcggatcgagtcatggaataccagaagagggagaaagatcagagcgggctccatgccctcgagatccgccagaaggagaatgagaaggccatttcaaacatgttggccgccatcgaagcgggaattatcactcccagtaccaaaacacggcttatggagctcgaagctgacagagccgacattgaaaaggggatagctcacgagcttctggccgaacctgagttcgagagagaccagattatctattttctggagagattccggtctggtgacattaatgatgaagcctaccgcatcatgctggtcgacacgtttctgaactctgtgtacctttacgacgatgatcacctggttcttgtgatgaattattcaggcgagaattgcaaagttgacctgaaattggtagaaggcgctgtgtccggggatgggtgcaagggatctgcctttgcaccgagctccgcgttggagacacgcaaagcttctcagatgggttgtttctttgtgtctaagcgacttaggctgctcaacccgtgggtccaggggcttctggccatcaatggttctagtgtcggaagtgttgggaagagaagcacaggcccattttccgacagcacatcccctcaccttcctcgg

SEQ ID NO: 1206 - DNA, 1560 bp, unidentified
  source 1..1560: mol_type = unassigned DNA; note = Bacteriophage uvig_195822 from the Index of /pub/databases/metagenomics/genome_sets/gut_phage_database (ebi.ac.uk)
atgctcactaattacctcatctaccttaggaagtctagggctgacaaccctgacatgaccgtggatgaggtgttggctaaacatgaaacaatcctgcaggactttgcccgatctgaattcggtgaggaaattcccgaacgattcatttttcgagaggttgtaagcggcgaaactatagcagccagaccgataatgcagcgcctgatgcagctgcttgagagctcaaatgtgaaaggcgttctggttgtcgatccccaacggctgtccaggggcgacctggaggattgtgggaaaatagtcaacgtgtttcggtataccggtactcaggtactgactccacagcgctcctataatcttgcagacgagtacgatcggaagtttttcgaaatggagcttacgcgcgggaacgattacctcgagtacactaagaagattctgtatagaggtcgaacagcctccgttaagaggggaaattatattggctcagtggctccatatggatacaagaaaatcaccgtcggaagtggcaaggacgtgcagcacacactggaagtcataccggaagaggccgaggcactgagactgatgtgtagactctaccttgatgacggaatggggtttagggccattgcacatcaactcgacgccctcggttttagaccacgcaaagctccccagtggtcacctgcggcaatcaaggacatgttggagaatcctgtgtatatcggcaaaattcgctggaattggagaaagtccgaaaaaaagatggttaatggagagatcaccctcagtcggcccaagaataaggatcagcacgattacatctacgtggacggcctccacgaacccattatcagtgaagacgtgcatagggccatccttgcaaaacgaggcaccaacccatgcgtgcggaagggttccgagttgaagaacccttttgccggcctgctgtgctgcgggagttgtgggcacgccatgtccctgaaacggtctacatacaaacgacaacctgggcgcatgacggagagctttctctgcgataaccagtctaactgtcataccaaaagtgtcttgtacgccgcgctgtatgatcgagtggtccagactctggaagcgtcaatttccgatttcgagatactgttgaagaatgacgacgatggattccaaaggagcaacctcgccattattcagacattggaatcagagatagagaagctgcacgctaaagatatgagacagaaggacgcattcgacgacgggatctattctaaagacgagtatctctctcgcaacgcgaaagtccaagaacagttggagaaggcacaccaggctctccaagaggccagactggctacaagcccaatcatcgattatcaggaaaaaattgccaggttcaccgattgtctcagcgctcttcgggaccccgacgtgagcgctgccgagaagaacaagttcttgaaaacctgcattaaaaagatcacgtaccacaaccatatggagagcaaggctggcatcggacggtacgtggagaatgtattcgatctggatatcgaattgctg

SEQ ID NO: 1207 - DNA, 1683 bp, unidentified
  source 1..1683: mol_type = unassigned DNA; note = Bacteriophage uvig_386577 from the Index of /pub/databases/metagenomics/genome_sets/gut_phage_database (ebi.ac.uk)
atgcagaagagtatcgacaaaatctactacgctgccatctatcttcggctgtccaaagaagacggagatctcagctctggtgaaaaaaaagagtccaactctatcgcaaatcaaagaaaactgattgaagactatttgagcaggaacccggagataaccctggtgcaggagttctgcgatgatggatataccggcgcaaatttcgaccgccctgacttccagcggatgatggagcaggtgaagaccggaaagattaattgcattatagtcaaagatctctcccggtttggaagagactatatagactccgggaggtacatcgaaaagattttcccatccctggggattaggttcatcgccattaacgataattacgacagcgctcaatcacagcaggtcggcaatgagataatcttgccattcaagaatctgattaatgattcttacagccgagacatctcaatcaagattagaagcaacctcgagacaaaaaggcgaaacggtgagtttgttgggtctcacgtggtgtacggatatcgcagatctgatgacgataagaataagctggtgatcgaccagacagtggcccctgtgatacagtccatcttcagcatgaaaatggatggctttagccccgcccaaattgccgacaagctcaacaaggacggggtcccttctccctatgagtataaacgccaatctggctcaaagtaccaaagcggcttcaagaagcagatccagacagactggggcgcgaaggcgatctaccgaatcctgaagaacgaaatgtatactggtaccctggtccaagggaagactactacccccaaccataaaatcaaaagtcgaactaccaaggacgaagccgactggatgcgcactgagaatgcccacgatgctattatatctccatcaatttttgatatggtgcagaagctgatgttggaagacaccagatccccctccggcgataactcagtccacctctttagtggcaaaatgttctgtgcagactgccagagcacaatgacgaggaaaaagacaaaaagtgctggcaaagagtacgtgtactttgtttgtaacgcaaataaggtggatcggaaggtatgtgacgcgcataccgtcaaggaacaggtcgtgtatgatgctgcccttgcagtgatccaggctcaggtatcactcgcattgaatttggagattgcattgggagaattgaatgggattagttgggagcggcgcgagatggagaggattgcctccaagatcgccagacaggaggaagtgatcgaacacaacaagcagatgaaagctcatgtatacgaagattttaagacggaaatgatcacaagggaggagtatttcatctttaaggccgagttcgataaaaacatccaggaagctaaagaggctatcgcccggctggttggtaataagaaccagatatcctcagggctgacggaacagcaaagttggcttgcccagttccgggagtacgaaaatattcaagagctgaacagacgcgttgttgtaaactttatcgaccggattgaaattactgaggataaaaaagtgcacgtggtgttgaacaacgctgaccagttccaggcgataatggagtttcttgaagaggagaaggcaaaagccaatgccaaaaaggtcattagttttatccgggaggttagc

SEQ ID NO: 1208 - DNA, 1566 bp, unidentified
  source 1..1566: mol_type = unassigned DNA; note = Bacteriophage uvig_381373 from the Index of /pub/databases/metagenomics/genome_sets/gut_phage_database (ebi.ac.uk)
atgttgacttctgcaaatgttattatctatttgcgaaagtcaaggagtgatgacccttccatgagcgtggatgaagtgctggcaaagcacgagtctatactgcaggagtacgctattaacaattacggaagtcccattccagaggaacaaatctatcgagaagtctgttccggtgagacaatagcggatagacccgtcatgcttcaagtgatgcgcctgattgaggctcgaatctacggcggggtgctcgtggtcgagccccagagactgtctcgcggggatctcgaggattgcggaaaaatcatcaatgcttttcgctacactgagacactcgttgtgaccccacctaagacctatgacctgctggacgattatgatcgaaaattctttgaaatggaactgatgcgcggcaatgattatctggagtatacaaaaaaaatcctgtttcgaggaaggatggctagtagcaaacaggggaactttatcggtagtattgccccttatggataccggaaggttgtggtagggtcaggtaaggacgcttaccataccctggaaatcgagcccactgagtcagaagccgtgaaaatcatgtaccacctgtaccttgacgagagctacggcttcaagaagattgccaataggctggatgaacttggcttcaaaccaagaaaagttgatcattggtcagccgctactatacagaacattcttgagaacccggtctactgcggcaaaattcaattcaatcgaaggtcaaccaaaaagaagatagtggacggagagcttgtaaagacaaggcctctcgtaaccgacccagagaaagtggtgtatgttgacggaaagcatcccgccctcattgacgaggctaggtttcaggagaccatggaacgccggggcaagaatcctcgggtccggaagtctaaggaactcactaatccctttgcgggcctgcttttctgtggtacgtgcggccacgcaatgagccacaaaaagttctaccagcattataagaagtccgtatgcgaaaacatgctttgtaacgaccaggctcgctgtcacacaaagagtgtgagctacgacgcctttgttaacagagtgacgaccagcctcgaggagacaattgccaattttgaaatgaagctgaaaaatgggaccccaagcgatgccatgatgcaccagaatcagattaggaacctggaaaacgagctgcagcatctgaagcaaagagacactcggcaaaaagacgcatacgaggacgggatctacacgaaagaagaatatgcacagagaaacgccaaacttcaggaacagatcgcgtctacaaccgcatctttgaaggcagccaaggagtcctccggaaacataatcgactatcaggagaaattgtgtagattccgggatgccctcaatgctttgaatgatccagatctgccggcctccaaaaagaacactttgctcaaggcctgcataatcaagattgtgtactataacgacatgccttcccttcccggcatcgggcggtatgtcgaaaacgtcttcaagcttgacatcttctacaaattg

SEQ ID NO: 1209 - DNA, 1587 bp, unidentified
  source 1..1587: mol_type = unassigned DNA; note = Bacteriophage uvig_100318 from the Index of /pub/databases/metagenomics/genome_sets/gut_phage_database (ebi.ac.uk)
atggccaaggtgacagtgattccttccaccatcaacccaattacaaagcttccaaacaatggactgcagaagcgaaaagtagccggctatgcgagggtgagcactatccttgatgaacagtgcagcagctatcaggcccaggtggactactacacaaacctgattaagagaaaccccgaatgggaattcgtcgaggtttatgcggacgagggtatctcaggcaccaacaccaagaggcggggaggctttaaccagatgatgcaagatgccctggatgggaaaattgacctgatcctgaccaagagtgtgtccaggtttgcccggaatacggtggattctcttactttcatccgaaaactcaaagagaaaggcgtagaagttttctttgagaaggagaacatctacacctttgacagcaaaggcgagttgttgataacaataatggcttcacttgcccaggaggaaagccgaagcatctcagaaaatgttacttggggcaaacggaaggccttttctgacggaaaggtctctatgccatacaagcattttcttgggtacaagaagggggaagacggtaggcctacaattgatgagaaggagagcctcgtcgtgaaagagatctatagtctgtttcttaagtacggatattctactacgaagatcgcaaaggagttcaacgaaagaggaatctgcactccctccggcaaggggaaatggacattgacgaccgtggagtctattctgtccaatgaaaagtataaaggcgacgccctgctccaaaagaaatacgttgttgacttcctcactcatcgctccaaacctaatgaaggggaaatccctcaatattatgtggaaaatagtcacccggccattatcgataaggtggaatgggatttggtgcaaatagaactcgagaggcgcaaaaaactttgcaagacctactcatcaaagaacattttcagctccaaactcgtgtgtgaggactgcgactccttctttggtagaaagatttggcattccaacgacgaatacaaagccatcgtataccagtgcaacgggaagttcaagaacaaagacaaacgctgtaatacacccactctgcgcgaggaggagattaagagtatgttcctggaggcgtataataagtttgtcctggacaaaaccgctctcgtgggtgattgtaaacttatgatagaaaccattgcagatgtttccttgcttgatgagcagatctctaaacagatcgagaagctggaggagctggctaagaaggtaaaggagctggtctcatctaacgcttctacacccgagctgcagattgattacatcaatgactacgataagctctgtaccatgcacagcatcgaggaaaccagatataaacttcttcttaaggagaaaagcggacggctggcaaaagcaaaaagtatggaactgtttatcgaaagtatcaaagataaagctgatgtgatagactcatggaattccgacttgtggattctcctggtcgataaagcaatagtccaccacgacaagagtattactttcgtgttcaagaatatgaaggagataacaatcgctgctaag

SEQ ID NO: 1210 - DNA, 1065 bp, unidentified
  source 1..1065: mol_type = unassigned DNA; note = Bacteriophage uvig_206650 from the Index of /pub/databases/metagenomics/genome_sets/gut_phage_database (ebi.ac.uk)
atggttcagaaggattcaaagcaaacggaaattcagaatgcctatgcccgggagaaccatgtggagcacattcctgccactttgcacctcaatgcgaaggaagacttcgccaaagctattcgagttgctccatatgtgagggtatccactgactctaccgaacagcaagcgagctacgagctccagtatcagtactaccaggaatatgtcgccaatcatccagggtggattcttagccaagtgtatgcagatgatggaatatccggcacaagtactaagcgccgagctgggttcaggcagatgatccaggattgtatagatggcaaaatcgatatgataatcacaaagagtattagtaggttcgccagaaacgttgtagactgcgtcgagacagtcaggcaactgaaagcccttgaacacccagtggccgtgtacttcgaggacattggaatcaataccctgactcagaccggagagctcttgatgatagtcatggctgcgatcgcccagggcgagagcgagacaaaaagttcatcaatcaagtggggttttcagaaaagatttgcaaaaggactgcccaagctcgccgatctgtatggctacgatcgggagaaacgcgtccttaccattaaccctctggaaagcgcagtcgttaagctgatctaccagatgattctggacgacagaaccatttctgaagttgctgatatcttgaatctccaaggtatcccttctccccgcggcgcacggtggtcctactcaacagtgcacgggatcctgacgaacgagaagtattgtggtgatgtattgatgcagaaaaccgtgaccattgacctgttttcccataagagcataagaaacgatggccgggcagaccagttttacctccaggactaccacgaccccatcgtgtccaaggacgtgtggaacgaggtccagaagatcctgaatggggagctccctagcgtgatcccatctcttgacgctgtgacagatatgcaagacgctactcccgacatcctgtctgacttttgcgtggtgaagccgcgcaaagaattcaagaaa

SEQ ID NO: 1211 - DNA, 1587 bp, unidentified
  source 1..1587: mol_type = unassigned DNA; note = Bacteriophage uvig_192865 from the Index of /pub/databases/metagenomics/genome_sets/gut_phage_database (ebi.ac.uk)
atgcccaaagctaagaacgtgactgtcatccccgcaactcttaatatacacaccaagacacccaccaccgaaagagtgcgacggagagttgctgcatacgctagagtaagcactgactccgaggagcaactcacaagctacgaggcccaggttgattactataccaagttcatccgcgagaaccctgactgggactttgtggaggtttatacagatgaaggtattagcgccgtaaacacaaagcaccgagatggattcaatagaatgataagggacgcgcttgccggaaagatcgacctgatcgtgacaaaaagtgtcagccggtttgccaggaatactgtggacagcctcactacaatccggaagcttaaggaggccgggtgcgagtgcttcttccaaaaagagaacatcatgacgttcgactctaagggtgaattgctcattacaatcatgtcatcactggcccaggaggagtctcgatctatttcagaaaacgttacccggggtcagagaaagagattttcagatggaaaggtttctataccctatgggcagttcctgggctaccgaaagggagctgatggactgccagagattgtgccagaggaggcagaagtggtaagaaggatctaccgcgagctgcttcagggcaagagtacgaacgcaattgccgctatgctgacggaggaagggataccaacccctggcaagaaaacggtgtggcagagggccaccgtggagtccattttgcggaatgaaaaatataaggggtctgcgctgctgcaaaagtccttcactgtcgactttctgaccaagaagaccaaaatcaatgagggcgaggtcccgcagtactatgtggaggacagtcatcctgcaatcatagaaccctgggaatgggaacaggtccaagccgagcttgagagaaggaaaaattcccgcactaggcatcgccagacatccccgttctctggcaaaatcttttgcgctgattgtggagaaatctttggctcaaaaacctggcacagtactgatcgctaccggaggatcgtctggcaatgcaacggcaagttcaaacgcgaacacaagtgtgaaacccctcatctgaccgaagagcgcctgaaggagttgtttttcgccgcccttggggaatacttgagcgatagaaacgctgcgattgacaggctccggtatgcacagaggatgctcacagataccgatttcatcgacgccgacatccaggcgctcgaagaagagctgacaaccatcactggcatgctccgcctgtgtattgcagagaatgcagccaacacaatgacagaagagacttatcgaacgacccatgatgagctgtgtagccgatttgaggagactgaagctaaactggccgtattgcagaaacagagagataaaatgaaagctgatgctattgcaattggtgggatgatgtttaagcttggcgagctggaatccttgccattgacctttgacgaaaaattgtggaatgggacagtggaccacgtgactgtgcacgccgacgaacgggtcgtgtttaggttcaaagacggcaaggagattgttacccggctc

SEQ ID NO: 1212 - DNA, 1488 bp, unidentified
  source 1..1488: mol_type = unassigned DNA; note = Bacteriophage uvig_416748 from the Index of /pub/databases/metagenomics/genome_sets/gut_phage_database (ebi.ac.uk)
atggcagaaaaggccgttatctatgctcgattcagttccgacaagcagagggaggagtctatcgaggaccaggtgcgcgtttgttcacagttcgccacttctaatggctttgagatcgtgaagacatatacagacgaagcccgctcaggaactaacgctgctgggagacccggtttccagaaaatggtgttggatgctcaggcacagcggtggactaaggtgatcgtgtataagaccgatcgatttgccagatccagatacgacagtgcagtgtataaggctaaactgcgcaagtgtggcgtagaaattgtcacagcggcagagagcgttccagatggacccgacggtataatactggagagcgtactggaaggtatggccgaatactacagcgcaaacctggcccaaaatgtaaaaagaggcatggaaggcaatgccattaagtgtaaacataatggggtgtctatattcggctacgacaggggcgccgatgggtactacgccatcaacgaacatgaggccgcaggagtaaggatggcttttgatatgtgcgcagcaggtgaaactaaggccgaaattatgcgcaggctcaacggcctcgggtataagaccgtcaccggacgacagtttagcaacgaggctgtcagcagactgctcaattgcgaaagatatatcggcacctacacgtggggagattttcggaaggagaacgggatgcccagcattatcaatcgcgatctgtgggattcagctcacgcccacatggcttctcgggggagaaaaaggagaggaaaaatgaacgccgattacctgttgtctgggaaaatctacgacgcaaatggtaaccaattcgagtcagattgtggctatggcgaaaacgggaaacagtatcactattaccggtgccggaaaacaaaagtgagtatgcgcagggacgaggtggaggacaaagtgatcggagcgtgtgcccgcttgctcaatgagaaccctgatttggatgagagaattgttgacatggtgctggcaaggcaggacaaggatgcggagcaagagattgcggctcgcgaggctcttaggcacagaatcacagacgtggaacgggaaatcgataacgccattgatttggcatgcaagcttggatccaccgaccgcatggccgtcaagattaatggactgcaggacgagctgaccgcattgaaagctgagctggatgaaatcaaacgcggtgcccctcttattgatagggacatgatccttttcgccctgtacaagatgaggcattccgacggaccacgggggatggtcgccgcctttgtcgaccgagtgactgtcaacgaagacggctcccttctcgttcagttcatactctgccgaccaacctgcgaaaataagaagccggagcctagcaatggcgagttcggcaagcttagttgtggctctccctaccaaattcggacgggggacctccggctggagcgagctgcgtcc

SEQ ID NO: 1213 - DNA, 1713 bp, unidentified
  source 1..1713: mol_type = unassigned DNA; note = Bacteriophage uvig_495199 from the Index of /pub/databases/metagenomics/genome_sets/gut_phage_database (ebi.ac.uk)
atgatctgcgtggatcagaacggccaagccgtggaaatttctgtggcagaccagatgtggctcgacgacgcatatttcaaggaaaagcagatgcgattggagcccaacgcccctagagcggcccttgcttacagagttagtactaaggggcaggttgaccacgacgacatccctatgcaaaagatagattgcaggaagtttgcccagaaacaggggtggagagtagtcaaagaagtcgcggagaaaggcgtgtccggctcaaaggtgtctgcgtcaaagcgcgacgccatccagcagttgaaggaggaagcagccaatggggagttcgatatccttctggtgtacatgttcgacaggctgggtagaattgagtcagaaaccccattcgttcttgagtggttcgtgcaacacgggattcagatgtggtctacccatgaagggcaacagaaaatcgagacacacggagataagctgatgaattatatccggttttggcaagctgccggcgagagcgagaagacaagcatccgcaccagggacagaattcgacagatcgtgtccagtggacattacacagggggctttgtttgctacggctatcagcttgtcgaccagggtagaagaaataagcgggataagccggtcatggatttggtcattaatgaagaggagtcaacctgggtgcgagaacttttctacaaggtgattcaggagggggcatctggatacgcactggctgagatgctgaataacagagggctccgcacaagggcaggtgccaagttccagagctccaacatcattcgaatcatcagacacgagggctacactggatatattataacaaaaaacgcacgaagtgagtacattcccgaattgcaaatcatcgatcgggagacctttgacaaggcaaatgatataattaatcgacggaaggccaaaagtgaacaggaacggaaaatcgcccacacctctcagaatcctactctgctggcaggaatagtgtactgtgcccattgtggagccaaaatgagcggttttatgcacaccgaccgctataaactggctgacggtagcatcagggaaaaagttcagcccaagtataattgcttccagcgaggacagcgcaacaagggcggcagggactgtgatggacaggccctctaccttgctgagaaggtcgatgcgatagtattgcaggctgtatctaagatcttcgagcagattcgcgacactccatattccagaatggctgaaaataggattcggcaggagagcaacctgcagaagtccaaacgcgcctccgtagaaaagaagatcaaaacggctcagcatgccctcgagcggtttgaaggcgagattctgaagtgtctggatgggacctccaactttacagaggatatgatagccaaacaaatacggcgctatcagcaggaactggatgacgcgaaagctgagtatgcagctttgcagaacgccaggctcaacgaggcagctgaaattcggaagctcaggacgtattacgacgaattccggggctgggctgaagaatttgatgccgctccactggagatcaaacgcatgatccaaagccaattgatagaaagggtcgaggtgggccgcaaataccaagtgactatcaaactgaacatggagtaccaacagtttctggagatcactgaggagcagaaactcattcccctcatttcagcc

SEQ ID NO: 1214 - DNA, 1470 bp, unidentified
  source 1..1470: mol_type = unassigned DNA; note = Bacteriophage uvig_305979 from the Index of /pub/databases/metagenomics/genome_sets/gut_phage_database (ebi.ac.uk)
atgaaaattgctgcctactgccgggttagtaccgacaaggacgagcagcttgactctttggagcatcagaaacagttttttagcgaatacgcggagaagaacggccacagactgatccggttgtacgccgacgagggtattagcgggaccagtctgaaaaaacgcaatgaattccttcggctcatgaaggacgctaaacttggcctcttcgaggctgttgtggtgaaagatataagcaggttcgccagaaacaccgtggatttcctgcaatctatcagagagcttcgcgcactgggtatcaatacacttttcatcactgcaaacatggaatccctcggcgaatctgagttcgtcctgaccatttttggagctatggcccaggaagagagcgcaaatctgagtaagcgcgtgaagtttgggaaaaaaattaatgctcagaaaggcagagtcccacagaggatcttcggttacgataggattgacaacttcaccttgaaaattaactaccaggaggcccagacggttagggaaatctatcgcctgtatttgaaggaggggctgggctgcaggactatctccctccggctgaatcagcaacagcggaagacaaagtttcattgcgactggaaccccagaggcgtaaggcgagtcctgacgaaccctatctactgtggacactacgtgaatcacaagtatgagattgaggattatctgactgggaagcagatccacatcccccaggaagaacactttcatcacgaacgacccgagtgggcaatcataacccctgaggtgttcgctaaggcccaaaagcagttggaggaacggagaactaagtatgactgtggtgaaccgtttaagggggccaggtactccacaaaacatcttttttccacactcataaagtgcgagcattgcggacggtcattttgtcgaaaagactatacctacgtgaagactagggtttactggaagtgtacaaccaacgaccaattcactgccgaacggtgtgataacaccatcaagctcgaggaagctgatctgctggccgagattagagcttatttcggagccctgattcacgataaggattcttttatcgccgggattctcgcggcagtggagcgccaggcaggcggagagaaaaatccatacgacaaagcccgcatcgagaggcgccaaggcgagctcctcgcgaagaaagaacgctatcaggagatgtacgctaatgatgtgatgacgatggcagagcttaaggagaaaactgccctgattgcggaagagctggaagagctcgattatgacctgcgccagtacgaacactcacttgaggtacggcagaacgcaggacatttcgtcgaacagtatatgcaagaaatagagagatttctggaattggaaacagtcacaaacatggatctgagacgaatcatagaccacatctcagtcaataaggatggcaatgtgcga

SEQ ID NO: 1215 - DNA, 1488 bp, unidentified
  source 1..1488: mol_type = unassigned DNA; note = Bacteriophage uvig_291363 from the Index of /pub/databases/metagenomics/genome_sets/gut_phage_database (ebi.ac.uk)
atgaaaaggctgcgggtggcagcttacgcccgcgtgagcagcgattcagaagatcagctgaattccctggccgtccaggtagattactacacacatcttatccaagaaaatcctaattgggagttcgccgggatctacacagacgaggggatcacgggaacaagcacaaaacacagagaacaattcaaccgactcatggacgactgccgggctggcttgatcgatagggtccttgtgaagagtgcttctcgcttcgcgcgcaacaccgccgacgctctgacctcagtgcgggagctcaagagcctcggcgttactgtggcctttgagaaggaaggctttgacactgagacgagtaatggagaaatgcttctgagtattatttgcgcggtcgcccaggaagagtccctctcaatctcacaaaatatgaaatggggaatccataaaagaatgagaactgggaactatattaccaacgctacccctttcggatatactcagataaaccaccagctcgtgccggagaaaaacaacgcaatgattgtgaacgacattttcaagagttacctgtccggtatgggaatcaatgagatagccgagcacctcaataccatctaccccaaggagaaccgcaagtggaatccaaggactatccacgcaatccttcgcaatgaaaagtatatcggcgattccttgtaccagaagacatatactactgacagtctccccctgaaacggtacctgaacactgggcagcgatctaagtattatgctcttgagacacacgagggtataatatccaagacagattacgaaaaggtacagaatctgttggccaagaagtcaattacaggtgagatagacaggacctgtgtctttagtaaaaaaatctactgctctatctgtggcgccatttgctcccgaaagggacctcccacaagaggctttgtttggtgttgtcggacccatcttcagtctaaagcactctgcctcttgaaaagcattagagaagacgagctgcagcaggcatttctctcaatctacaacagactgcagtgtaaccagaagaccattctggaacagctggtcgatgatctgcttgggctgaggcacctccaagagcagaagtataagaaccggctggccctgggcgaagacattcagcacttggcaaagcaaaaacataaccttacgcggattcataccctggggtatatcgaggagactcagttcattgaaaggtctgctgcaatcgagcagcaaatacgagagaagaaacagcagctcagcaggaatgatatgccaaataccagcgaaaaaattctccaaaaaacccgcctgatccagaaaaaattgagctccacaccacccctggaaagcttcgacgaatccgcgtttaaggaacttgttaagaaggtgcttatctctaataccgccatccaattcgagttgattaacggcatgaaactgtccgagtctagagccgctacg

SEQ ID NO: 1216 - DNA, 1740 bp, unidentified
  source 1..1740: mol_type = unassigned DNA; note = Bacteriophage uvig_263829 from the Index of /pub/databases/metagenomics/genome_sets/gut_phage_database (ebi.ac.uk)
atgtataatatgtcaccctattctctgtctcgcagttttcgggataaaccttgccgcgctgtgatctacggacgcgcctcaaccgaacacgaagcccaggtgaaagccttgcagaaccagatgcagtggtacgacgatgtcgccaggttccacccgcagtggaatgtgatcaatagatacattgaccagggaattactgggactcaggtgtataagcgggatgcttttatgaggatgatggaggacgccaaacagcagaagttcgaccttattgtcaccagggaggtgtgccggtttgcgaggaacaccgtggacgccctggtttgcgttcggcagctggcagccatcgggatcgaggtgtacttcgtcaatgacaacatctggaccctcgatggtgatggcgagctccgcctcaccattatggccacaatggctcaggaggaaagtcgcaaaataagcgaacgctcactggccgggcaacgcgtgtcccgagaaaagggcgttctttatggaaacggtaatatattcggatatacgcgaaataagctcacgaaacagttcgagatcgacccagaccaggcagagaccgtcaaaatgatttttgatctctatgactccggcatgggtgagactttggttgcaaaagaactcactagactgggcaggaagaacggggtcgggaaggtgaagtgggatgcaggaaaggtcagcaaaattatcaagagaaagaactaccttggctacacagtttactgccagagttactccaacaactacctggaacagaaaaggataaagagagacgaatctgaattcgtatacgtgaagggtggctttccacaaataatcagcgaggagcagtatgagcgctgcaacgcaatccgccgatcaagaacaaaacggcttacagacgagaaggggcggacacgatcatttggaattcaacaagcacagaatgtgtgggggcggaagatgcgctgtaggtgtggtagccctatgttgagacatagatggaggactaacaatgctgggaagcccatctatggctatgaatgtaaaagacaccacgatacacctcgcatcaggcttcagaacgagcaaggaaatccaactccaatctgcgaaattaagcccgtgggccagtccaaactcgaactgatggcaagcaaaatctttgagcgcgtctggggcgaccagagggagatagtactgcagacttgtaaaatgttggatgcctgctataaacctgatgctgatcggcgggccgacctcatgaaagcaaaggacgattctattcaactgctgcagcagcaactggatgacctggtggtggtaagagccagaggcgagatagagcaagacaagttcttgcagaggacgatcgaaattcagcagcagatggaagcgctccggcaaagcaaggcccagattgcgagtgaagattacaatcccggacgactcgacatggaagccattgaggcggctttgtgcgaggctgtcgagatgcatgacggactggtaagcgaggactttatcgacctgttcgtgagtcaagtgacccctctgagcgattccagattcgcttggtgtctggatttttccccacaacctaccgttgctttcctgaacctcgccggccagcgaaagtacaccacctgttctatggattctaagcttcacttcgggccgttcgctgacgaggagggccatacaatcccctttcccggctccctccggcgc

SEQ ID NO: 1217 - DNA, 1839 bp, unidentified
  source 1..1839: mol_type = unassigned DNA; note = Bacteriophage uvig_13765 from the Index of /pub/databases/metagenomics/genome_sets/gut_phage_database (ebi.ac.uk)
atgtacgttatgagcaccgaagaggagaagcagaaagtccgagaaagacagaaaggatatcggaccgacgaaatcgtggtgattaaggccgcagaacccgtctctcttcgggacaccaggactgaactccgggtgtgtgcctactgcagagtctctacagataacatcgagcagacaagttcattcgagttgcaaaagaactattacgaagaatatatcgcaaaacacgataattggaagatggtcgatatcttcgcagacgagggaatttcaggtaccagtatggccaaacgagagggctttaaacgcatgattcgcgagtgtttggctggaaaaatagacctgatagtgaccaaaagtgtttcacgattttcccgcaatgttgttgactgcattgacactatcagaaagctgaaaaccatgaaccctcctgtgcgcgtatttttcgagagcgaagggatagacactggcgattcttccagtgatgttatgctgaatattctcgctatctttgctcaagaggagtcccatactaaaagtgaaattatgcaatggtcagtagacaaccgcttcgcgagaggtaatttcctgacaccaagactgtttggctacaatatcgacccagacaaacccgataggtacatcataaacgaagaagaggcaaaggtggtgaaactggtctacagcatgtacgtaacaggctacagccccaacgagatcgctgtcactatgactaagcttaactatgtgtctaatatcaagggcgataggaagtggacggcgggagtggtgaataacattctgaataatgagaggcggtgtgggatgattattgccagaaagacctacacaccagacttcactacacacaagagtcggaagaacattaatcagagaaacaagtatcagatgaacgaccaccacgaggggatcgtcgccgtggaactgtatcgggaggccttgaggattaaggaaatgaggaagcataggaattatgatttgatcccctctctttctgtgataaaagaaggtgccctgaaaggattcgtaccggtgtctgtcaagtatagcggctttacctacaacaattatctgttcgcttccgagtttgcatacacgaaggataaaaacggcaacatcattaaggacaagattaagcctatctacaagaacgacctctccaatttcgacttgtccgacttcgaaaaagtggattcccaactgtttagcaccgtgtcccagcccatgtgttggttcaagtacaaccagatgtactttaatagggcctgcatcgacaagatgaagaatacacagtacatcgagctcctcttcgaacctaccgaaaaactgctcgccataaggagctgtaatgagtatgatgattacgctattaagtggggagtggagaaaaacgataaactctcaccaataaccaaaactagcagcggcatctctcatgtacttttcgattgcatggagtggaatgaagactatcgatataagatgattggggtccgccggacaaagaataacgactccatcgtgatctttgatctcaataatgcagaggcgatatgcagagaggagctggaaagcgagaacccggacgaggtcatttccaaaattacgtcatattacgatgaatacctgtcagaccactttgggaacaacttttatgatgatatctacacaatgcgcctttatatgatggatatcttgaagaagtggaacctgggggctgaactcgtgcctatcgaggacccaaaagagtggctgatcgaggccaaaaaatgcgttgaggagcatcttagtaagcttatggaagagcagcttgacgtt

SEQ ID NO: 1218 - DNA, 1782 bp, unidentified
  source 1..1782: mol_type = unassigned DNA; note = Bacteriophage uvig_527169 from the Index of /pub/databases/metagenomics/genome_sets/gut_phage_database (ebi.ac.uk)
atgaatattacccaaaggatgtacttcggtcagttccctctggataaggacagagaccggaggatcgttttttacggccgcgtctccacacagcacgaagctcaggttgatgcactgggcaaccagatgcagtggtatgacgaccagttgcgctaccaccccaactggcaagtaatcaaccgctacatagatgaggggattaccggcacctctgccaaaaagcggcccgcctttatgcaaatgatctccgacgccaaacgggggaagtttgatctcatcgtgacccgagaagtgtgcaggtttgcgagaaatactgtggacaccctccagttgactagagaactgcggaatttcggggtcgaggttttctttgtgagcgacaatatctggaccatggatggtgacggagagcttcgactcagtataatggcaacaatggctcaggaagagagccggaagatttctgaacgggtcctggccggacagaaaatttcaaggcaaaatggcgtgctgtatggtagcgggaacattatcggatacgacagagacaaggtgaacaggacttacgtgattaacgaagagcaggccgcaactatacgcatggtattcacactttacagccagggctatggcgagaaggcaatcgttaacgaactgtctcgacttggcaggaaggacggccacgggaacgtcagctggagctgcaccaagatctctagaattctgagaaacgccacatacatggggtatatctgctacaataagagtaaggtgaataactacttggagaaaaagcgcattaacaatctggacgaggcctcatttgtgtacgtgaaaggcaactttgaaccgattgtttccgagaacctctggcatgagtgtgagcggatccggaaatcccggatcagctcactgcggctgccagatggtgaaacgagacggaaaggtgcaagaactaccaaaaatctctgggtctctaagctcagatgtcgatgtggatcaagttatcgaatttttaattggagaaaactgaaagacggaacacccgtcttcgggtaccagtgcaacatgaggacagttaatcccaccagatcattcgtgcttgagcataatatgacgcagcaacttagctgtgatgccatttcaataccagaatggaagcttgagttgatggctaagaagatattcgaaaaggtctggggaaaccagaacaaggcaatcctgagggcgtgcaagatgatcgaatcctgtcaaaacggcaaagccaccgccaggatgtctgcggcacctatccaatccaaaatagaaaaaatcaaaaaacggaagctcaattatgccgctatgcgcgccgatggagagttgccacgagaggagtatcaggctttgtgcaagcaggccgacgatgaaatcgctcggctggagcaagagctcaaagctctgtctccagcgcctgaaccccagactgtgtccagtgatatgaaagctatctatgatttcttgagtcagaaagtggatgtccatggggcatgtttggctcctgaactgattgagcagttcgtggaagtagtgaccccaatcgcagattatagctataggtggaagctcaatacaggatgcaaaaagtccaaggaggaacgcactgatttgatggccgtgagtgagaagcctattctgacattcacaattgactttgagactgccaagcgctatcgcgaggctaataagatgccgcaccagtttaggcgcgccgcttggacggacctcacggtcgaggtatacctg

SEQ ID NO: 1219 - DNA, 1524 bp, unidentified
  source 1..1524: mol_type = unassigned DNA; note = Bacteriophage uvig_133907 from the Index of /pub/databases/metagenomics/genome_sets/gut_phage_database (ebi.ac.uk)
atgtacgccatgtatttgcggaaatctcgagcagacgacaaagacatccctctcgaaaaagtgctcaagaatcactacaacatgctgaccgagctcgcagataaactgaaaattcaaattgaggaagagaacgtctttcgcgaaatcgagaccggagactcaatctccattaggcctaaaatgcaggatctgctcgaaaaggtcagcgaaggcctgtacgagggggtgttctgcacagagctgagccgcttgtgcagaggttccaaaattgaccaggagatcgtgtcttctaccttcacagcggctgagtgtaagattattacgccctctaaaacctacgaccttgcgaacaatgaatttgacgaagagatggtggactttggacttttcatgtctaggcgagagtacaagacgataactaaacggatgcagagagggcgggagcagtcagttaaacaagggaagtacataggctccattttgccttatggctacaataaggagaaaatcgagggagagaatggcttcaagctcgtgatcaatgaggaggaatcacacatagtgagactgatcttcaagtggtttttggaagataacgtaggcgccagtattatcgccaaaaggctgaaccagaggggctatccaacccggaaaggtcaggtttggtcatacagctccgtgaaaaatatcctgactaacaacgtcgtaagcgggtatcttaagcataacaaccgaaaatataagaagtatatcgatgctaaaggcaacgtgaagaagagtcgccccgttaaccagaatgcagaatattacaaaggacttcatgaagccatcattccactcgctgattttgaaaaggtgcaaaacatactgggtactagaaaacaacacaaaagtaattttgatctgccacttagcaatcccctggccggccttatgaagtgcagcgagtgcaatagagtgatgataaagcgcaggtgtgcccagggagactttctctattgtcccacaactggatgtgaaaataagggttcctacctgcatagagttgaggaaaacatcctccaggctctgtctgatacattgtccgattacaactattaccttgataattacgaacaggaaatgataaaggagaagcgcaacgtcgacaacgatttggaaaggattgaaaaagaaatcgagaaactgaataagcagttcgagaaatgctgcacattcctggagcaagacgtctataccgtggaggtgttccaggatcggaccaagaagatcaaagacaagattaagatccttgaggagaacaagaaggtgctcgagaaggagttcaagaatgacaaggtagtcaaaattaagaaaagtatcccgaagctcgaaaacgtccttaagaactacaatacactcaacatagaggggaagaatgagctgctgaagtcaatcattaaagaagttatctattccaagaaaaagaagtgtaagaaagggagcgacgaggattactttgaactggagattactcttaatatc

SEQ ID NO: 1220 - DNA, 1725 bp, unidentified
  source 1..1725: mol_type = unassigned DNA; note = Bacteriophage uvig_8523 from the Index of /pub/databases/metagenomics/genome_sets/gut_phage_database (ebi.ac.uk)
atgagaaagaccaacggaatgacccgggagaccaccgcattcctgtacgaaaggctcagccgggacgataacctcgagggagactcatattcaatccagaaccagaaaaagcttcttaccaaggtagcgaaggagaaggggtacacacatctggtccatttttttgacgacggcatatctggcgtgactatggatcgaccaggctacaaagatatgatcgctcagttggagctcggccgggctagcgccgttttcgtgaaagacctgagcagactgggcagaaattatatcgaggttggcaaacttactgaagaatttttccctgatcatgacattaggcttgtgtctgtctctgacgccattgacaccgatgaaggagaaaacgaactggctccaattcgaaatctgtttaatgagtggtacagtcgcgatatctccaagaagagccgcatatcctataagattcgggggaatgccggaatccctatgggtcagccaccttatggttatattaagaaccctgacggttctaagagttgggtggttgatcccgaggccgcctcagtggtgaggcgcatcttcatgttgaccctggatggctatgggtccgagcaagttgctgacacccttactaaggaacaggtgctgacaccaaggttctactgggaagcacatggtatcatgcgacctgggaagccgtctagtcatgatgaataccggtggaatagtagcacaattatgggcatactctctcggcaggagtactgtggcgacttgatcaacttcaaaacatattctaaaagctacaagaacaagaagcgactgacgaacgctcccgagaaccgggctgtctttagggatgtccacgaagccatcgttccccgagaagtctgggagcgggtgcagcaaaaaagagcaggaattaggaaaagaaagacgaattcaggcgagcgcaatatgtttagcgggctgctggtgtgcgcagattgcgggagaaacatgcactaccacttcaactacaccaacccggagatcacttacttctcatgtccaaatacgaaaagtgagagaggaacatgtacgggcacccactatatccgcgtggagtttcttgaacaggtagtcctcggggagatcagaaggttgactaagttcgtaagccagtacgagacccagtttgccaagctgatgatgggttttactcagcaagcgatggccacagagcgaaaacaggtacaatttgagctgagcaaggccaaagcgcgcgacagagaactggataccttgttcgagaaactgtatgaggacaacgtggccggaaaaatttccgatgaacggttcgcacgcatgtcaaaaaaatacgaagacgaacaggctgacctcagaaattccattaaaacactccaagctgacatcgaacgaatcgatggcaaggcagccactgccgatatgttcatctccgccgtgcgcaagtacaccagggctaggaagctcacccctcggatgttgaatgagcttattgacaaaattgaggtgcaccaagcagagaaggtggatgggatttggcgacagcgccttacaatacactataattgcgtcggggccatcacactgcccgacactgccactatacaggccccacacgttactatgaatacgaggcagggagtctatgtgacatacgaacccgacacaccctcccccgcggcaggaaccgcatccgct

SEQ ID NO: 1221 - DNA, 1626 bp, unidentified
  source 1..1626: mol_type = unassigned DNA; note = Bacteriophage uvig_361885 from the Index of /pub/databases/metagenomics/genome_sets/gut_phage_database (ebi.ac.uk)
atgcctcgggcggagcgcattgtggaggtgatcccagccacatggaacccggcggacgagtcagtcagagaaatacgcaaacttagggttgccgcatactgcagggttagcactgagctcgagcaacagcagtccagctacgacatccaaatcgagtattacacgcgccacatcatgcagaatcccaactggatcttcgcgggggtgtttgcagacgacggtcgaagtgccactaatacctttaggagggatgacttcaaccagctgatgaatcagtgtatgaagggcaaggtggacatggtgattacgaaaagtatctctcgctttgctcggaacaccgtggactgtatttcatgggttaggaaattgagagagaagaacgtagcagtttacttcgagaaagaaaacctcaatacactggacgattcaacagaaatgatcctcaccatactgtcctcccaggctcaggaggagagccgcgccatatccacgaacgtgaagtggggctatgctagaaagttcgaaaagggcgagtccacaaggcagaggagttatggctttcgcaaggcccctactggggagatgtgcatcgtagaggaagaagccgcagtcatcaggaacatggcacgctggttcctggacggcgactccctggaacggatcaaacatcggctggaagatgctggaattgagacaacaactggcaaaaggacctggtctaccgggaccatctacaatatcctcaccaacgaaaaaatcatgggtgacgtgctgctccaaaagacctttacagcagattatctgaccaaaaggcgcgtcaagaatagtggacagcaaaaacagtattacgtgaagaatcaccatgaggcaatcatcccaaagaccgtttactataagattcaggaagaaatcgcaagaaggtcaagccttaagaaagccggcactcggaagggtaagacagcccagggcgtttacagttctaagtatgctctgaccgggattatggtgtgcaatgagtgcggggctcactacagacggaccacatgggccaagaacgggaagaaggtaatcgtgtggcgatgtataaaccgactggaacatggaactaaaagatgtcacgagtcccccactctcaaagaggaggtgattcaggaagccatcatgggaaaactgcattctttgtctattgatcaggaggaagagaatttcctgaacggagtcaaggaagatattctgcgagccgctaaagtcgtaggaggcgcctgcacggaggaggaaattgacaaaactatcgaggaattgagagatcagctcatggattatgtgggaatggcggcccgggagcacggtggggaaaactggtactcagatcgaatgcggaagcttggtttgcaaataagcgaacttaaaagaagacgggagagcattcgggaacaagagaagattcgcgatgaatacgagtatcttgatcaggagatcagcagaataattggcgagactggcggggctacaggcgctgagtttgacaatattttcatccgccaaattgtgcgagaaataagagtgatttctaaaaataagcttcagatccagctgcgaaccggaatggtcttggatgtcaatctt

SEQ ID NO: 1222 - DNA, 1539 bp, unidentified
  source 1..1539: mol_type = unassigned DNA; note = Bacteriophage uvig_186102 from the Index of /pub/databases/metagenomics/genome_sets/gut_phage_database (ebi.ac.uk)
atgcccgaggtgaggcttattactcctatcacaaggcagtctactaaaaagatgcaggtcgccgcttactgtagggtgtccagcaacagcgccgaccagctgaatagctacgctgcacaaattcgggcttacaagaaatacatcggggctcgcgacgattgggagctggtggatatatttgcagacgaagggctgaccggcatgaaatcagagaccagagacgaatttcagagaatgattcgaatgtgcgaactgaagcagatcgacttgatcattacgaaaagtattagcaggttcgcacgcaacaccaaggatgctctcgcttacgttaggaaactgaaactgcttggtgtaggcgtgcaattcgagaaagaagggattagcacactctcaatgggcgacgagatgttgttgaacactttttcagccctggcacaggaagagtcccaatctatctctatgaaccagcgccttagtatcgtaaagcggatggaactgggcgaatacgtcgatagtaatgccccctacgggtatagactcgtcgataaggcactggccgtgtatgagccagaagccgccgttgttcgggatgtatttgacctttatctcagaggcttctctatatctgagatcggaagagagcttaagagtaggaacatcccgaccaaggccggtaaagagtcctggcatccataccgaattgcgtatatgctgaaaaatgaacgatatatcggtgattcattttatcagaagacataccgggaaacaacggtgcccttcaatcagcacatcaacagaggacaggaagacaggttttacgctaaagggactcatccaggcattatagacactgacgtgtttaacgctgtgcaacagctcatccagaaacggaaggagactttctcccggacaaccacacagaacatctatcccctcacaagccacattcagtgtagcgaatgcggaagcttctaccgccggcgctcagtgtccggaaccgtcaagtgggtgtgtgcactgcacaaagatgactctaccgcctgcgatagccattattattcagaagagcgaatctacgatgggtttatcacgatggtcaataagcttcggttctccgaagataatatactgggtcaagtgatcagtcgcttggagatgaccctggccgcaattaaaagaaataatctggccgcaagagatctgtctaagagtattgcagagcttaatgccaagctcctcatgctcgaacagttgcgctctaagggatacttggctcctgaagtttatcaggcgcaagccaacgagattggcgcggagctcgccaggcttaaggacgtcaggcaggaaaaattcaactccaaggctgcctccatgctcgaagaggtcaagaagttcaaaatgctcatttttgagctggaggagcctctggaggcgttcgacgagaaacttttcttggaaatagtgaagagcatccagatcaacaaggaggacgagatgtccgttgagttcctgggcggactgagatttcgagagcgcata

SEQ ID NO: 1223 - DNA, 1620 bp, unidentified
  source 1..1620: mol_type = unassigned DNA; note = Bacteriophage uvig_183615 from the Index of /pub/databases/metagenomics/genome_sets/gut_phage_database (ebi.ac.uk)
atgcagcggcaggttgttaagagggaggtgcaggtgattcagccaacattgaggacgggtttgatgcactcaacactggcccctgcaatcaagcagcgagtagcagcttatgccagagtgtccactgaacatgaagagcagcagtcatcatatgaagcacaggtggattactatacgcggaagatcaaggagcggagtgactggagcttcgtggaagtctatacagacaagggaatcactggcaccaacaccaaaaaacgggagggattcaatcgaatggttaaagatgccttggacggcaagattgatttgattctgaccaagagtgtgagcagatttgcacgcaataccgtggacaccctcacgactatcaggaaactcaaggagagaggggtagctgtctacttcgaggaacagtccattaatacactggacggcaaaggtgaactcctgatcactattatgagttccattgctcaggaagagtcaaggtccatatccgacaacgtgacctggggccaacgcaaacgcttcgcggacggcaaagtatctgttgggtacaagcaattcctcggtttcgaaaagggggaagatggtcttccgaaagtggtggaagaagaggccaaagtggtgagattcatctaccgatctttcatgatggggaaaaccgggacacacatagccaagatgctgaccgaagccggaatccctacacccgggggcaagaaggagtggcagtcatcaacgataatgtccattcttcagaacgaaaagtataaaggagctgctttgctccaaaaggcttttacagtcgacttcctggagaaacgaatgaaaatcaacgagggcgaggtcccacaatactatattgagcacagccatgaggccatcattgatcccctggagcacgacagggttcagatggaaattagccgccgaaaagcactcgatagacactacagttctgcccatcttttttcttcccgcgtgatctgcggcgagtgttctggattttttggcaggaaggtctggcactctaacgacgtgtacaagacttacatatggcagtgtaatgagaagtaccgcaaaggattgaagtgcaagactccccacttccgggaggacgagctgaaacagagattcgttgacgcttttaatcagagagccgaaatcaaagaggaaactctggcagcctgtcagctggggatcgagacaatctgcgcactcgatgagctggacagtcaaattaggagcgtcaaagatgagatcagcgtccttgtagagatgtctcgccagctgattgatgaaaacgcccatagcgcccaagaccaggacgattgccagaggagacactccgctcttgtagcgaagtacgaagatgctgatacccggcttaaggccttggaaagcgagcgctcccggcgaatcgatatgaggaagagcatcgagtggttcatggaaagctttcggcaacaagacggtctcctgacagagtttgatgagggactgttttttagtgtgaccgatgtgatgaccgtctatgatgacgaaagagtcgcggtgcgattccgggacggcgttgagatagagacttttgcacattctcaggaacatatggcg

SEQ ID NO: 1224 - DNA, 1560 bp, unidentified
  source 1..1560: mol_type = unassigned DNA; note = Bacteriophage uvig_159029 from the Index of /pub/databases/metagenomics/genome_sets/gut_phage_database (ebi.ac.uk)
atggccaagaaagtgagaaagattcctgctaccctgaaccagttcactagcgaacccgtagcggtccgcaggaaaaagaaggtggctgggtacgcacgggtcagcacagacagggaggagcaagcgacctcatatgaggcccagatgacctactacaagacatacattgaaggacatgaggattgggaattcgtggggatgtatagtgacgaaggaataacagccaccaatactaaaaaacgagatggctttaaccagatggtggaggatgcattggacggaaagattgatctgatcattaccaaaagtgtgtctcgcttcgctagaaatactgttgactctctcactacgattaggaagctcaaggaaaaagggatcgaagtctacttcgagaaagaaaacatatggaccctggatgctaagggtgaacttatgattacaatcatgtctagcctcgcccaggaggagagcaggtccatcagcgaaaacaccacatggggcaaacgaaaacagtttgcagacgggaagggctctgtagcctattcatggtttttgggatacgacaaggatttcaagattaacgaggagcaggcagccactgtgaggttgatctatagacttttcatctcagggttgtcattgtacgccataactaaagagctggagtccaggggcatcaaaagtccttctggtaaggaccgctggcacatcagtacagtcaaaagtatcctgacaaatgaaaagtatcggggcgatgccctcctgcaaaagcagtataccacggacttcctccaaaagaagcgaaaaacaaataatggggagatcccccagtactacgtggaggaacaccatgaggcaatcattcccccggcccagtttgatttcgttcaggctgaacttgcccgcagagaacaaaatggccgctattccggcgtgtcaatattctccaacaagataaagtgcgggtgctgtggtggttggtacggatctaaggtctggcattccactgataagtacaggaaggttatctatcggtgtaaccgcaaatatggaaaggacaccccaccatgcaatacacctcacctgacggaggaggagattaaacagttgttcttgaaggctttgaacgccctggttgacgcgaaagaggagactatcgaaaacttgcagggcctcatcgagacagtgtgtcagactgaaagccttgacgctgagcaggagagactggagcaggagctccggattattgccgagaatctggctaatctgatccaaaaaaacgcaagcgtggctctgaatcagaccgaacaggccgaacaagaagagaaacttagaaatctctatggcgagaagcacagccggtttcaagaactggaggcactgattcaggaaaagaacgataccaaagagattctgaccaactttatcacaaagctggaagacctgacgggagagcagaccgaatttcgggaggagctctggggcgggcttgtagactacatccgaattgatgaaaaatcctccacggtcgtgtttagaggtggcatcgaaataaccata

SEQ ID NO: 1225 - DNA, 1857 bp, unidentified
  source 1..1857: mol_type = unassigned DNA; note = Bacteriophage uvig_89669 from the Index of /pub/databases/metagenomics/genome_sets/gut_phage_database (ebi.ac.uk)
atgacgaataccatcttcaagaacaacaccaagataggcaacccctacgatttccttgaccggaaccgccacagaaaaatggttttttatggccgggtttcaacagagcacgaagcccagatggcagccttggagaatcagatcgaatggtacgacgaccaggctaagcaccatccaaattgggaggtactcaataagtacatcgatgagggaatcactggcacgcaagccaaaaagcgaccagcttttttgcaaatgatcgaggacgcgaaaaaggggaagtttgatctcatcgtcactagggaggtgtgtaggttcgcccgcaacacagtggacactctcgtgaccactagggaactcaagaatataggagtggaagtttactttgtagaggataacatttggactatggatggagacggggaacttaggctgaccattatggcgaccttggcacaggaagagtcccgcaagacctccgaaagagtgaaggctgggcagcacatctctagacagcagggaatggtttatggtaggggcaacatactcggctacaatcgcaaggccaaaagtacctatactataaaccccgaacaagctgaaactgtgcgcatgatctttgacatgtaccttcagggcgagatgggagcatccaagatcgctaatgaacttacccgactgggccgcaaaaacgcctctggacttgtaaagtggagcccctgcgtcatcaccaggattgtgaataaccctacatacatgggttaccaggcttatgggaaaagttattcaaacaattatctcgagcaaaagagaattctgaacaacgactttagcacatatatgcttgtgaaaagtgactacgaaccaattattacggaggaggaatggtatagatgtcaggagatcaagcagaggcgggtcactaagacaattggggtgtccacagatggtaaaaagaagcaacccaatcatggtaaaaatgagacaaaagacctctgggccacaaaactgaaatgccggtgcggcgcaagctttcgaagaaaccggtggcacaaaaataacaacgccccatggtcatatggttacctgtgttataatcggctgaataacggctctgcacagaaacgcagggatgccgggctggatgatacggggtactgtgaccagaccgagatccccgattggaaacttgagatgatgggcaagatgattatggagcaggtctggagaaccagagctgaggacatcaaactggcctgcaagatcttgaatgagtgctataaacctgatattaaagcccctaggcaaaacaagagtgtgatgctggccaatattgagaaactgaagtccaagaaagataacttgttggacatgagaagcgatggggagataacgaaagaggagttcctgaataagaaagaagagatcgacaagaagatcagccagctgaccgcagaatacgaaaaggacgactgcccaaccgagtcagacgaagcgggattggaactgtctaagattgaggctgcccttaatgaattgattgatttttcccaaccggtgctgcctcgagagatctaccagaaattcgtaagcaaggtcacaccttattctaaaactcattaccgctggtacctgaacctggacgggaccggaacacagactgcggatgtcaaagtcaatggccgaaagtctaatgccgcagttgctttttgtgaagaaggcgaaattcccccggtgcatttcaaggagataatcttcttcaacatactcaagcaggagatcattaacaagaagtcattcttcgtggcaaccctgcatcggctcctgagccagacatccaaccctcaccggatgtac

SEQ ID NO: 1226 - DNA, 1425 bp, unidentified
  source 1..1425: mol_type = unassigned DNA; note = Bacteriophage uvig_47505 from the Index of /pub/databases/metagenomics/genome_sets/gut_phage_database (ebi.ac.uk)
atgactgagcaaaaaagcgatgatcttagaatgggtgccttgtacattagagtgtcaacccatgaacaagatgagctctcccccgatgctcaaaaaagacttctgctggattatgccaaaagtaacgggattgttgttcagaaggatgccgtgtttgtggaaagcgtgagtggtagaaatgttaaaaagcggaaggagttccagcgcatgattgcccaggcaaagagtccagagcacccctacgacgttattctcgtgtggaagttttcccgatttgctaggaatcaggaggaatcaatcgtctataagtctatgcttaaaaaggaccgcgtggacgtcataagtgtgagcgagccggtaattgatgggcctttcggaagcctgattgagcggatcatcgaatggatggacgaatactatagtatcagattgtctggcgaggtactgcgcggcatgggcgagaaggccttgaagcaggggtaccagatctccccaccactggggtatgacgcggtcggagatggcaagccatacaagattaatgagaaggaattcaagatagtgtcttacataatgagtcaatacgatgactactgtcaggatacaacagcgatcgcccgaaaatgcaacgaccttgggtatcggactaagcgcggcaacctgtttgaacggcgcaatattgactatattttgaggaaccctttttacgctggcattgtaaactggaacggccagaccttcgaaggaactcacgaagcaaggtatactacagaacagctggataaaagaatcaaacttatggatgcacggaggaggccggctaagcaccgaaacgcctccacctgtaaacattggttgagcggtctgattaagtgctctatctgtggagccactttgtcatacacagggagcggagcatgcccctatttccagtgttggaaatatgcaaaaggttttcaccccgaatcagtgtccatcacggagaaaaaactggtcaagaccgtgcttgataattttcgggagatactggacggcaaggacttcagcttccagtacataccttctgcctccccaaaaagcaatgagctctcactcctgcaggacgaactgtctaatctgaaaaggcgcgagacaagaatacggctggctttcgagaacgagatcgacacgctggaagagtatcgggaaaataaggctcgaatccaagtcgagagagagcgcattatctccgaaatcgacaagaggaaaacccctaactccatccccaccaaggaggagatgctcctcaagatccagcacgtctataacatcatctctgatcctgatgtcgactaccagtcaaaaggagtgtttatccgaagcgttctggaagacattgtgtacgacaagcagaatgacaggctcctcttccatttctactgctcc

SEQ ID NO: 1227 - DNA, 1536 bp, unidentified
  source 1..1536: mol_type = unassigned DNA; note = Bacteriophage uvig_51452 from the Index of /pub/databases/metagenomics/genome_sets/gut_phage_database (ebi.ac.uk)
atggaaattcagctgaaacgggctgggagttacgttcgggtgagcacctaccaagaatcccaggagaagtccataacagaccaagtcaggatgctgaacgaaattatcgacaaagacgagaccctcgtcaatgtgggaacgtacatcgaccaaggtgtgactgggaagtaccagacgaaacggaagcagtttctcgctctcatcaaagactgcatggagggcaagatcgatgtcgtatactgcaagcagatgtctaggtttggacgcaacgcgctggaaactatgcaggccattgagaaacttaggtctgtcggtgttgccgtgagattcgtactggacgacatcgataccattgttgacaaggattgtagccgcctcgccatgcttgcctcaatcgctgaagacgagagggataatctgcaagataccatgacgtggagctttcatcgccggttggagcaagggcattatatcttccgacctgacatgttgtatggctatggtcttgacgaaaacaagaatatggtggtgatcccagaagaagctgtggcagtgcagtacatcttcgaggaatacgcaaagggcacaatggtgaaaaagatatgtgaatggctgaacgaacacggctataagacacgaaaaggcatgcccttcaataagagttccatttctgatattaccactaatgagaagtattacggggatatgatcataggaaagtggcgcacagagggaccgaaacgagtcaagaacaacggggagtctgagatgtatcttttcgagaatcaccacgaacccattatttccagggaactgtttgaaaagtgtgccgaggtgagacgaacaagatctgaacattcaaagccagtgcagaattacgatagggctgatccttttcggcggaaggtattttgtgggcagtgcggtagtcttttcatctgccagggcagaaccaactgtacacacgactttgcaaaactggcttttgtgtgtggcaaagccactagatcaagccgccgcgagtgccgcaataagctgcagcgcatcggcactttggaagactcattcatggcagtgttcaactatcttctggaaaacagatccgtacttagcgatattgtcaccgacaatgaggaattcaacgaggttactgccaggttggacgagctccgggaatccgagaagaagtattttgagctcgaggtgaaaggactcatgaatgagcagatgaccaaaaatcacaccaggctggtcggagaaatgctccagctcgaggagaagagaaaagcctttttgacaagaaactacgagatcagcacatgcaaccagaatctgaagaaattccagaaaatactgaagaccgcaaagcccatgacaacgatggatgcggagatgtgcgatctgtttgtgaaacggatcctcgtgatggatcgaaacaacttgattttcgagctgaccagtggccataaggtcaaagtcgaagtgctggacttctacaaaactcgagatgagataagaagggtttatgttactgag

SEQ ID NO: 1228 - DNA, 1722 bp, unidentified
  source 1..1722: mol_type = unassigned DNA; note = Bacteriophage uvig_239031 from the Index of /pub/databases/metagenomics/genome_sets/gut_phage_database (ebi.ac.uk)
atggccagaaagagccgaaaggacttgattcgggcggaaaatagcggacagaccgccgccgctgtacaatcaaaaccctgtcctgagcctgctcccacctatttggccgtgggatatgctagattgagcatatttgagactagagacagggcagactcagaggctttgcaaaaccagaaggagctgctcaggcagtacattgcaaatgccccaggcctccaactggtgggaatctttgaagacaacggacagaccggaacgaacttcgacagggcagggttcgagactatgatggagacagtaagatccggaaaagccaattgcattgttgtcaaagatctgagccggtttggcagagactacgtggaggccggcaattatctggaacacatatttccattcatgggggtaaggttcattagtatcagtgatggttacgattccgctgatgccactacagccgattgccttaccgtggcccttaagaacatggtgaatcagatgtattcaaaggacatctctcgcaaatctggtagcgtcctccgggaaaagatgcggcgaggcgagttcattggggcttttgcttcttatgggtatcgaaaagatccggtagacggccacagaatcatcattgatcccgaagctgcgggcgtggtgagggaaatttttcgccgcaagctggaggggcaaggtgacaccgccattacaagatggttgaacgccacaggggtgccatctcctggctgttataggtatcagaaaggcataatccttgataagcgctttgcacggtacaaaccctggctcgtgcagagcgtcaaggacatcctcaggaacgaagtttaccttggacatatggtgcaagggagaaggcggtcagaattctacgcgggccgacccgacaagagactgccacgggacgaatggacagtcgtcgaaaatacccatgaacctatcatctctcggggcgatttcaatgctgtgcaggcaatctgtgctgagcgaaacaacgcctaccatgcacgcctggggaagtacgaccacctcggcaagcgcgagaacatattgaaaggtttggtgtactgctccgactgcggcagaactatggttcggtacaagcaagtgtcccacgggaaaaacgtgtcctactattatctgtgcccgtcatacgctgcgatgctggaaaagtccggatgttcttacaagttccttcctgaagatctgcttctcgacagtttggagcaggtcattcagaaagaaatcgaacaggccgtcgatatgactgcgctggccaaacgactgagcgcccgcgcaagcagtaaagccgatcagggagccctgatgctcaagaagcttaatgcacagctggagcgagtggagggcacacggaggaacgccatgcgggattatttgggcggacagatggcacaggctgactatgagctgctcaaagagtgttgcatgggtgaggctgaggagctgaagaaacaaatattcgatctgagagagcagcagcgctaccgctccgagactctgacggagaagaacccatggctcgccgcttttggtgggttgggtaggccctttcatctgaccaaagagctcgcagcgagtcttatcgaacgagttaccatctacggaaataatagggttgaaattcttctgcgattccacgatgagcgcgaacagctgttggccgcagtcggggaggaggacgcagtt

SEQ ID NO: 1229 - DNA, 1641 bp, unidentified
  source 1..1641: mol_type = unassigned DNA; note = Bacteriophage uvig_543352 from the Index of /pub/databases/metagenomics/genome_sets/gut_phage_database (ebi.ac.uk)
atggtgaagaaaaagttgcgggctgttttttacgcccgggtatctaccgaggaggaaaagcagcttaatgccctggagaaacagattcaggaaaaccgcgatgtgataatcagtaatggttgggaactggtggatgaatacatcgatgagggtaaaagtggcacaactaccaagcggcggagtgattataaacgaatgctcgaggatatggccgaggacaagttcgatatcgtagtgtgtaaggatcaagatcggctccagagaaatactctggactggtacctcttcgttgaccgcctcataacgaacgagatccagctgtatttttacctcgaaaataagtactttcgatctaatgaagacgctttgatcacaggcatcaaagcaatcatagcagaggagtatagtcgcaacctgagcaagaagctgaacaatagcaataagcgcaggattgaaaaggctctccagactggagaagtgagtgctatgggcaacgggaagagtctgggatataagatcgttgataaaaaatgggtgcaggtccccgaggagatcgagctctgtaagattatttgggacaagtatgaggagttcgacagcatcagaaaggtcagggattttgtgaacgatgctgggtataggaattccgtggggaagccttttacctcagaaagcatagcccgaatcatcaagaacgagaaagcgaaaggcgtgctggtgatgggacgatttcaccacgacttcgacaaaaagaagatagtcaaacgctcagatgatgaggtcttcagaattgagattcccgagctggcatacgtgtccgccgagagattcgacagggtcaacgcacatttgaagtctaagacgaatgggaaaaggggcaagcgctccgggtctgatccgctgtctggtaaaattttctgttcaaagtgcggctccgtgtactggaaacatcagtccaatggatattacaactggttttgctctcagaagtatgcaaagggcgacgttgcctgtaagggctcagggaccgtgaccaccgtaagaatacggaaaatctatgctgagctgacaaataacttggaggtgaacagggaagcggtcaaaggaagcctgttgaaatggcttcagtccctcaaaaatagcctgaccgacgaaaaagccaataacagcacacttaaggaaatcgagaggcaggaaaaacggaagaacaagctgaccgaggctttcatggacgaaattatttccaaagaggattacaaagcgaagtacgcagaacttgaaagatcactcgaagagctgaagttgaagatccaacccgtggaggagaacgaagacgtcaaagacattgagaaagttatcgccaacatcgacgaagaaattgatgcctacatcaaaagcacagggttcgaggattccaagattgacttcctgattgagcacactcaaaggattactgttaacgacaagcacctgatcatagaacttgacctccttgctggtgccatcattactggcaaagactttctgctctttgtacattcaaatatgccacaacaccatggccctaaacatctccaccccagcggaccacagacagcccctcgctgctgctttagagacagattctcttgcgaccaacca

SEQ ID NO: 1230 - DNA, 1533 bp, unidentified
  source 1..1533: mol_type = unassigned DNA; note = Bacteriophage uvig_248716 from the Index of /pub/databases/metagenomics/genome_sets/gut_phage_database (ebi.ac.uk)
atgaacgtcattgaaatcactgccgagaaggagacagtgcaggaaactattagactggcagcgtattgtcgagtaagcagcgactctgaagaccagctgcactccttcgccgcccagatccgctactacaaggattatgagagacgaaatcctcagtacaagctggtggacatctatgctgatgagggcatcaccgggacctgcatggacaaacgggacgacctccatcggctgatccgcgattgcaaaaagggactcatcgacagaattattgtgaagagtgtgagtaggtttgctaggaacacgcaggagctgcttagtaccatcaggtttctcaaagacatcggtgtgtccgtgtacttcgaggagcaaggcattgatactgataagctgaactccgagatgatcataactttccccggtatggcagcgcagcaggagagcgaagctattagcggaaatatgagatggagttacaagaagaggatggaaagcggggagttcaattgctgtgctccggcatatggcttcaatctcgttgacggttccctggttataaacgaagctgaggccgccgtggtccgacggatcttttctatgtacctgcaaggttatggaaaacagaccattgcaaataagcttaatgaggaaggcgtttctcgccgccacggggttaaaacctggtatgcattcgggattgattacatgctgaataacgagaggtacatgggggatgccctgttgcaaaagaagtacacgaccgacaccttgccttttcgccgaaaagagaataggggcgagtgcccccagtactacgtggagaacgctaacccaacaatcgtctctcgggagacatacgccgccgtccaggagttgcagaaaagccgacaaaaaaatgcagggggagaaaaagccgtgtatccactgaccggaatgcttagatgtccagattgcggcagaacatataggagacagctcgtacgggggaaagcctattggatatgttccggcaaagcctctggagcgactacgtgttcctcacggcgcatggcagaacccgatgtatacgaggcctttaacagaatgctcttcaaacttaaagaacatcaccctatgctccttgggaccttgatccgggacatcgaaactatgcagtcaaagacctcagaaaaccatgaaaagattgccgagattgacaaggagatcgctgacctggctgctagaaacctggtcattgcacggctgcacacaagcggcattttgaacggaagtgattattctgcccagtctagcgaaatcaacaatcgcatatccgctctcaggagcgaacgacgcaagaagcttgcggaggatgaaggcgatgaacagttggacaagctgaaagagttgcaaggaatactcgacgaatatgagcccacagcagccttcaatgaggatctgtttaaccaaatcgtggagacagccactgtgatgtcaaggtcagaaatcgtctttcagttgattggtggcttgaagctgacagagtccatagct

SEQ ID NO: 1231 - DNA, 1827 bp, unidentified
  source 1..1827: mol_type = unassigned DNA; note = Bacteriophage uvig_366853 from the Index of /pub/databases/metagenomics/genome_sets/gut_phage_database (ebi.ac.uk)
atgcaggacgacgggcggcgagagcagctccggcaaatctatcagagagaagatactggcgaaaagacgtttatccctgctaaaccaaaaattaatccgaacgaaaaggaccgcttctttcgagtgtgtgcatactgccgagtgtccaccgacaatgacgaacagctgtctagttttgagcttcagcaggcccactaccgccagctcgtccaggaccatccgaattgggatctgcggcacatatttgccgatcagggcatttcagggacctctctgaaaaacagagatcagttcaacgaaatgatagaagcttgcaggcggggcgagtacgatctcatcttgactaaaagtgttagcagattcgcccgcaatctcgttgattgtatttcccttattcggatgctgaaaggtctgactccccctgtcggggtgttctttgaaactgataatctctacacattgggagaaaatactgagttcatgctgagtttcctcgcgacatttgctcaggaggaatctgtcaagaaaagcgagtccatgaattggtctctccagcagagattcaaagacggaaagcttctgacacctgctccacttggctatgatcgcgagaaagacgcggccggacattatgtgaagtacgctcccctgttgttgaatgaatctgaggccagaattgtgcgattcatctacgatgcttacctttcagggtggtcccaggaaaacattgcgagctttctgaaggacattggttgtctgaccaaaaccggcagcacagactggacctcaagcgccataggctatattttgaccaatgaacgctacgttggaaatgtgctgacgtggaaaaccttcactgctgacctgtatgagcacaaacataagaagaacaagcaagatagagatcagtacctgtaccatgaccggcatcccgctatcattagcgtcgagaagttcgaggccgtacagtctctcatcgagaatcgcaagcaccatgtaaggggcgggctcccagccctccacgtcatcgatgaaggtatttttaggggatatattccaattaaccaccactgggtgaatgatgatcccaacgtttactatgatatctccaactccgtggccaaggtcctcaaggtaaagaccatcgacaagaggagcttcagcgccttcgacctttctggctatcaagtcgttaggaatcagttcacacaagtgaggtacgagggtccttccatcacgctggccgagaacagagttagttttaacctgttctgtatgcgctgcttcgagtcagtggcatatatccagctgttgttgcacccagccgaacgcaaaatcgccatcaggccgtgcagggagcgggatacccattcagtcagatggaggcctgacccagacaaacccgtgtatagtaagaccctcaactgtcaacactttggaaatgcactgttccgcattatggaatgggaccctgaatatatctaccgggtgcgcggaacatgggctaagcggggcgcagagcagataatcgtctttaacctggtgaatgcaatccccgcaatgcttgtgccatccgagaacgcagacaacactgccagaagacgaaccgaactgtgccccgcggagtggaccgacgacttcggggaggagttttacgagcacatacttgagaacggcttttactacctggcaccagacagcgagtggaggacaacagccgccagtgtgcccgctcctggcatggagcagtttgatgtgcctacggcagagcaacttcaacttactatagataacctgacacgaggtaacgaaatgccctatgacggg

SEQ ID NO: 1232 - DNA, 2301 bp, unidentified
  source 1..2301: mol_type = unassigned DNA; note = Bacteriophage uvig_203185 from the Index of /pub/databases/metagenomics/genome_sets/gut_phage_database (ebi.ac.uk)
atgaaggaagggatttctggctccatacaaaaccagagggccatccttgaaaaatttgcccaagataatcacctccctaatcccaagttcttcttcgatgatggctactcaggagtgacttttaccagacccgccttcatggagatcatggaactggctgaacagggcttggtggcaaatctggtggtgaaagaccactcacgcctgggccgcaatcggttggttgttggccaactgctcgaagaagactttgttagactgaacgtccgctatattgcgatcatggataatattgacactgccaggggtgtgagcgacatagtccctatgcaggacctctttaatgagtggcatgccaagaatactagcgataaagtgcgacgggttatgcaatccaggggatcagctggaataccccttacaactaatccgccgttcggatataggaaagccccagaggaccgcaacagatggctcgtagacgagcctgcggcagaagtagtcagacgcatctttcggatgagcgttagtgggttgggtcctacacaaatcgcaaaaaagcttcggtcagaaggcgttatgacacccagcgagtatctgcatagtacaggcgtaaagtgtcccaccaaaccccctgcctttcctcacaactggtgtagttccacagtggcggcgatccttgaccgacaggagtatacgggcgacacagtgaactttagatccttttcccggagctttaaacagaagaaacgactcaaaaggccgcaagaggagtggaaaatgttccccaatactcatccatctatcatagatagagagacattcgcactcgtgcagaaccttcggcagcatagaaggagaccaacaaaaaccgggattgtgtccatgttttccggactgctttactgcgccgactgcggctcaaaactcggctatagtgctaccaataattataagcgggagcaggcctttttcttctgctctgcctacagatctaatacacgagtctgctcagcccactttatcagggaaaacgtcgtggaggaattggtgctggaggggttgcagcgccttctgagtgctgttagcgagcagacgtcaggtgagctgaaaaacattagccagtccctgggcttcgccgtcaaacagcctgacgggaagcttaagttcacccaagctgcagatttttatcagcaatctcttgataatgccatcatgggaattgcttccggggccttcgactacaacaccattatcaaaaaggtgatatccgatatgacgaactctggcctgaggaccgtcgattacgcaactggctggtctaatagggctgacgtggctgcccgaaggagcgtgatgaccggactttctcagttgaccgcaaagatgaatgaggacaatgcaaaggaactgggaacggattacttcgaggtgacttggcactccggtgctaggcctagccatcaggagtggcaaggaaaggtgtatagtaaaaaggaattggagactatctgtggtctggggaccgttaccgggctctgtggagctaattgttatcacgattattacccattcatccccggcatctctgagcgctcttacaccgacgaagagctggcacagatgaacgcggaagaaaacaagccagtgaagtacggagataaggaatacacgaagtacgaagcccttcagagacagagaaaactggagaccgcaatgcgcgcccagcggcagaagatccacctgttggaggaagcaggagccgatgaggaggacatcataaacgctcggtgcaggtacagaggcactagccaggagtataccaggttcagcaaggccatggggctgccacagcagcgcgaaagggtgaacgctgatgggctcgggaacatcggggtaggcaagaccaagatcgacctgacacaaaaagactacagcgacattattgatatgaagggtaagatgtccgatattgacgtccggaaatggtaccggcatcacaacaagaacattccccagttgattgacaagagtaagagtattgaggagcaggctcggcaggcatgcgagctgcggaacaagtataggttccaggcgagagaactcatggaggatcagaaagccagaaaggctcttgaccaaactgatccaatcatttcttttgaggacctggtatcagataaaatggctcgaaagaacatgagccgagaagacgcagtcgccgacacactgaagactgccgtgaaaacacgccgctctgtcgataaaaggtacggtctcgaagatcgcaacgaagagatc

SEQ ID NO: 1233 - DNA, 1575 bp, unidentified
  source 1..1575: mol_type = unassigned DNA; note = Bacteriophage uvig_54187 from the Index of /pub/databases/metagenomics/genome_sets/gut_phage_database (ebi.ac.uk)
atgccgaccgtgaaggtgatccctgctacacgcgactttcacaccggaatcgagaaaaccaccactcgaaaaaagcgggtaggggcctacgcccgagtgagcacagattcagatgaccagttgtccagctacgaagctcagtgtgattactatacacggtatatcaaaagtcggcctgactgggaatttgtaggcctctatgctgatgaaggaatatcaggcacgaatactaaacatagagatcgattcaatgcaatgattgcggatgctctgaatggtaagatcgacctcattattacgaagagtgtttcccgctttgcccgaaacacagtggactctttgaccaccgtcagaaaattgaaggagaagggcgtggaggtttacttcgaaaaggaaaacatctataccctggactctaagggtgagctgctgatcacgattatgagctctctggctcaggaagagtccagaagtatttcagagaacgtgacatggggaaaacgcaagctcttcgccgacggtaaggtgaccttgccatattctagctttgtcggatacaggaaaggcgcaaacggtctgcccgaaatcgagccagagggggctaagatcgttcggcggatctacacagagttcctcaatggcaggaccgctcgccagattgcagacggattgtcagccgacggggtgcctactcctcggagagcaaaaatgtggaggtgtaccactattatatccatcctcacaaatgagaaatataagggtgcggcactcctgcaaaaatccttcactgtggacttccttactaaaaaaatgaagccaaacgaaggcgaggtcccacagtactatatcgagaacagccatcccgctattatcgaccccgttgaatttgatcttgtacaagccgaaatgcagcgccgcaggaaacttggaaagatctactctggcaacagcatatttgcctccaagatcatctgcggagattgtggggaattttacggcgagaaggtatggcacagcaatgataggttcaggaaaaccatcttccgatgcaatcacaagtacaacaatgagaaggggaagtgccaaactcccgtcatatccgagcaacagataaaagagactttcgtggtcgcatacaatgcgctgatggcagacaaggccggagtcatagcagattgtcgggccttgcagcatatgctcactgacacaacagccatggagcaggagatcgcggacttgtctaaacagcttggggatagtaccgccgaactgaggcagcacgtggaaggcaacatgagatctgctatgaaccaagagcaattttggaaacggtataatacactggaggaacagtgcaactgcctgagcgatcgacttgccaagctgcagagttcagtcaaagaaagaaagcagagagccgacgtgattggcgggtttatgtttgagattaaggagagagatggcattattgacgagttcgacgaggaactgtggacggccctgctggaatccgtgaccatcacacgcgatgggaagtggcagttcaagttcaaaaacgaaagggttattgaggtg

SEQ ID NO: 1234 - DNA, 1590 bp, unidentified
  source 1..1590: mol_type = unassigned DNA; note = Bacteriophage uvig_373913 from the Index of /pub/databases/metagenomics/genome_sets/gut_phage_database (ebi.ac.uk)
atgaccactcttcatcacggagcctatattctcgccagatacagcactgaccggcaggacgaggacagcatagaggtacaggtggttaagtgctctaggtggtgcgatgctaatgggctccccgtgctcgacgtgttcgccgacatggctgtctcaggtatgaaggacgatagacctgaatacagcagaatgatgcggcaattgagcctcggaagcgccgatacggtggttatctacgatcagtccagaatgttcaggaaaatgacagcttggttcgactttcgggaaaaggttgagaggctgggagtgcgcgtcgtttctgtgacacagccaatggtgggcggagatctgcgagatcctacgaattttctcaccgagggttctatggccctgttcaaccagatttgggtcctgcaaacaaggcaaaaggtcaccgaaaagatgagattcctcgcacagcagggtcgacacactggcggcaaacctcctctgggctataatgtggtcgatggtagatatgtagtgtgtgaagccgaggcagaaatagtgcggtccattttcaagtggtacgcctctgggaaaacttaccgggagattattagggcactgaacgaggctggatataccaccaaaagtggcaactccttcgggaccaattcccttcacgaccttctcaagaacgagaaatacatcggcgtgttgacatacgggaaagtagaaaaacgccctgacggaagtcgaaacagccacgcttccgccagtagcgtgatacgagtagaagatgctgtacctgcgattattgacagatgtacctgggagcgcgtccagcggaaactccaagaaaataagcgatcccaggccgggcgagcgccggtcgtccgctcttatccacttaagggcaaggtgttctgcggcgagtgtaaaagtgctatggtggtatcaaaggccaagggcaagtactattattacgcctgctctgccaaacagcgaaaggggaagtgcgattgtatgccaatacgggttgatgacttggaggtcagagtcctcgacactatgcgcgagctgttttgtttgcccgcaaacgtggaatacctgctggcaatcttgagggatgagagatcaaagctgcaggggtcagcaggcgagaaattgcaacagttggtgacacgcaggagcgcggtggacaagcgcatcgcggccgccgtggacgcagtgctgagtgggctgaacagcccggccctctctgctaaactcactgaactggaggcggagaaggcaaaactcgaacatgatatgctgcagctgaaggcccaggtgagcggtgcttccgtttccgaggataagcttagggagatcctgaatatgtttgctagatcacccgaaaccgacgacttgctgctgtccatcgtcgtgcgggtggaagtccatgctgactttatcaaagtttggaccctgcttgatcccacacccaggggcgattttgatttctctgatgactcagagacggtgatcaggatcgacggagttggaagtccagcaccccggatcctgattacacagtctcttctgtgtttttgcgttccacgcaaa

SEQ ID NO: 1235 - DNA, 1389 bp, unidentified
  source 1..1389: mol_type = unassigned DNA; note = Bacteriophage uvig_284738 from the Index of /pub/databases/metagenomics/genome_sets/gut_phage_database (ebi.ac.uk)
atgaaagtggtcacctatctgagggtatctactgaaatgcagaaggatagaggttccttggagactcagcgagagagtctgaacgagtattgcaagaagaataatctgaacatcatagattcctttgaagacgtcatgtccggcggcattgcagatagggatgggattctcaagattatggctatgctgcctcttaaaaaattcgaaggagtggtagtgcagaacagtgaccgcatttcaagggacttcaaggacggaacgttgttcttcaacgactttcgaaaacacaatgttagacttataagtgtgatggagggccctctggactttagggacgacaatactgatgccatggcaaaaattcggttgattttttctgaaatggaaagaaggaaaatgaggattcgcacaaaagttagtatggctgctctcgcaaacaccgatagatatcttggcggtggcctgctcccacatttcaaggtaaagattataaacaaggagaaaaagatcgttaaaaacgaggagacgtgggaccttgagcggcaaaaatatctggatatcttgaagtaccggagcttcaagaaggtggccgaactttactgcatcaactacagcacctttttggagcaggttagaaaagttgaattgataggtcaccgcatgttcggcgagttcatcaaagacccctatactctcaagaaggtgaagaataaggacccctttatcagctcagaaaaggtgcttcctgctcttctgacagacgaggagttcaatctcatcaacgcccttctgaaagacaatcggaaaaaattcaaaaacccgaaacggaagtacctgttcagcgggctgctgtattgttcatgcgggaaaaagtttgccggaaatatcgtgaacaagaaaaccaagtcctactactactaccggtgtgaagggtgcaaggtgttttacaacgtggataagctggaaatcaatatcaagaatgcgatcctgtctcacccccatctgaaactccttaatgatactacatttcgactgcaggatcttcaagataaaatcgagttggaaaataagaagctcgaggatctggtcaaacgccaaagagaaattacacagctgctgatggatggattgctggacgcctcaaccattaagccagagctcgaaaagttgaaaaaactggtcgatctgtccaagcaggaaatcaagaagtatgagaacctgattctcgaaaactctaacttcgtgatcacagaagataatatcagcgacttgaaagagttgctctttatggaaaacaccgacgagattatggaggagctccaggagatactgtgtcttatcgtcaatcgcatcataatcaagaccctcgaggacattgaggtcattttt

SEQ ID NO: 1236 - DNA, 1560 bp, unidentified
  source 1..1560: mol_type = unassigned DNA; note = Bacteriophage uvig_31017 from the Index of /pub/databases/metagenomics/genome_sets/gut_phage_database (ebi.ac.uk)
atgaaacggattaccaagatagaggagaacagagctctcagcattaagaaaaagactcgggtggtagcatattgcagagtttccacagcctcagacgagcagcttatctcattggacacccagaaggctcactacgaggattatattaaaagtaacgccgaatgggagtttgcaggtatcttctatgatgaagggatcactggaacgaagaaagagtgtagggatgggttgaactctctggtggcggcttgtgagaaggggctcgtgaacatgattataacaaaaagtatctcccggttttctagaaacaccaccgactgtctggaactggtcaggaagcttatttcactgaacgtaacagtcattttcgagaaggaaaatatcaacaccggaagtatggagagcgaacttatgctgtccatcctgagctcattggcagagtctgaaagtgtttctatcagcgagaacagcaagtggtctatacagaagcgattccaaaatggaacctacattataagctacccaccctatgggtacgaaaacgtgggaggcgaaatgattgtggtgccggaacaagccgagatcgtgaaaaagatctttgaggacacactggccggcaagagtacacacgcgatcgccaaagagctgaatgactgcggagtcacctccaaaaaaggcgggaagtggactcctggcgctatcaatgcaattatccgaaatgagaagttcactggagatgtaatctttcagaagacgtataccgatagccagttctcaaggcacacaaatgacggtgaactgaatcagtatctttgcgagaatcaccacgaacccatcgtgagtcatgaaatctttgacaaggccaacgaggtgttgaatcagcgcggtagagagaagggcaatggcgagaggactgagagataccaaaatcgctatgggttctccggcagaattaagtgcggagaatgcggcggcgtgtttaaacgcaggatccattacaaaccttccggttcatacattgcctggtgctgtactcaccatatcgaagatcgccactcatgtagcatgaaatatattactgacgacggcatcaagacagccttccttacaatgatgaacaagcttgtttttgctcatcagtccgtcctgaaacccttgctccacagcctccaagggttcgatgacaaagatcgcctcctccaaatacaggagtacgagaccaagcttgagaagaatatggaaaagcggcaggtgctgactagtctgatggcgggagggctgctcgagccagccctgttctccaaagagaacaacgctctcattctcgaagaaaaacatttgcaggaggaaaagaaacagatgataaacagcgtttctggcgacaggaccaagatcgaggccctggagaccctgattaagtttgcatccggttctgaaatgcttacagaatactctgatgagatcttcctttcctacgtcgagggcattacggtgctcagccgaaaagagatagtttttgaactgaaatgtgggcttaagctgaaagaacggttggtcgga

SEQ ID NO: 1237 - DNA, 1128 bp, unidentified
  source 1..1128: mol_type = unassigned DNA; note = Bacteriophage uvig_51541 from the Index of /pub/databases/metagenomics/genome_sets/gut_phage_database (ebi.ac.uk)
atggaagaaaagagaacgtccttggtcagcaggaaacctggtaaaaccggggtgggccagcgcaaccgggaaaagatccgggaggcctatgctaatgccaaccccaacctcgaggtaattccagttaaagagaccgtgcaggaagccggggagccaagaaaattgcgagtctgtggatactgcagagtttctacagagtccgacaaccaacaaggaagctttgaacttcaggtgcaagaccaggagagagtgattagggaaaacccaagctgggaatttgcaggtatctacgccgacgaagggatcagtgctacatccgtcgaaaagcgcaaagagttcctgcgcatgatcgaggattgcgaggctggcaaaattgatctgatcattacaaaaagtgttagccgcttcgctcgaaatcttgtggactgcatctcttacattcggcgcctcaaggccttgaagcctcccgttggtatctatttccagaacgatcacctgaatactctggaccagtcatcagagatgatgatagcgtttatgagctgcatggcccaggaagagagtgcaaaaaaatccgaggccgtcaagtatggtattcgaaagaaatttgcggtgggcattcctctttgtccgagagtgctcggatatgataaggaccgcgacgacaagtattttatcgtagaggaggaggcaagaattgtccggctgatctacggattctacatcgaggggtattccactcccgctatagctaacgcactgacgagggcgggagtgcctacaattaccggccagaatactgtttggaattctaattcagtgctgtatatcctgcggaacgaaaaatactgtggcgatgtggccatgcagaagacatacattgaggattaccttacccacaaggctgtcaagaacactggcaaagtacaggcatatctcctgcacaatcatcatgtgccaattataccgaaggatgagtgggagcaggtgcaagaactccttgccaattggaaaacccggaggaaaaagaagactttcatccagaagaaagtgatcaccgtcaagaggggcaggttcgccgggtacatcataatagacccctcttggaagaacaagaattacatggaa

SEQ ID NO: 1238 - DNA, 1578 bp, unidentified
  source 1..1578: mol_type = unassigned DNA; note = Bacteriophage uvig_525361 from the Index of /pub/databases/metagenomics/genome_sets/gut_phage_database (ebi.ac.uk)
atggccacagtcttgaaaattccagctaagttccatcctatcacacatcttccagagataaaagttcaaaaacggagagttgcagcctatgcaagggtgagcacggactcagaagaacagcaaacctcttatgcggctcaggtcgattgttacaccaagtacatccaggaacgggccgactgggaattcgtagctgtgtacaccgacgagggcatctccgctctcaacacgaaacacagagatgggtttaacagaatggtcgccgacgctctggacggtaagatcgacttgatcgtgacgaagagtgtgagcaggtttgcgcgcaacaccgtcgattcactcaccacagtccgaaagctcaaggagaaaggagtagaggtgttctttgagaaagaaaatatctacactctggactccaagggggaactgttgattactattatgtcttctctggcccaggaggagtcacggtccatttctgaaaatgtgacctggggacaaaggaagaggatggcagatggaaaagtttccttgccttacaagcacttccttgggtatcgcaaaggggcagatggtttgccagagatagtgcctgaggaagcggaaatagtgaggaacatctatcgatggtttatggaggggaagacaccgactggcatagcccggacacttaccgagcagggcgttcccacccctgctggcaaagaacagtggtgcagctctacagttaaaagtatccttattaacgagaaatataaaggttccgcactgctgcagaagcggttcaccgtggatttcctgacaaagaaatcaaaagtgaatgagggcgaggtcccccagtattacatcgaggaaagccatccagcaatcattgtgcccgaagagttcgaacttgtgcaagctgagctgctcagaaggcaaaatctgagaagacagtacaacggcaagagtgtgtttgccgctcgcttggtatgtggagactgcggcaatttttttggagcaaaggtgtggcactctaatagcaagtaccgacaggtaatttggcagtgcaaccacaagttccaaggagtgtgtaagtgccaaactccccacttgcaggagtccgtcattcagcaaaggtttcaggccgccgtccaggagctgcttcagaagcgcaaagccatcctggagaattgccaggtcatgcttgaactgcttactgactgtactgatctggagtatcagctgcaggaactcgagacccagaaaatgaggatcagcgaacaggtgcaagggtacgtgagagagaacagtgaaattgtacaagatcaagagaagtacgaggagcgctatcaggcccttgtcggccagtacgaaccgctccagaagcaggagacagccctccaggagcagcgggctgaacggctggctcgccgcgagcagattcaggggttccagcgagccctgagcggccaaaatggaatgttgcccgagtttgatacccagctctggctcgcagccgttgaaaaggcggtggtgcatagagacggcaagatagttttcgtgctgaaggacggtactgaactggttcagaaaatc

SEQ ID NO: 1239 - DNA, 1890 bp, unidentified
  source 1..1890: mol_type = unassigned DNA; note = Bacteriophage uvig_520815 from the Index of /pub/databases/metagenomics/genome_sets/gut_phage_database (ebi.ac.uk)
atgagtaaaagtgcgaaaaaggcagctgaccaggccgaacgggagaaagtgcacaaaagatacagcaataggcgcgagcccgacgtcatctaccccgcaaagaagcaggtagatttctacgacgccgacatccaccagcgagtggccgtttacgtgcgcgtttccactgacaacctggggcaggagactagttacgaactccagaagaactattatgaggagtttgtgctgaagcacccaaactggaagttggtcaagatctatgccgataaaggcatatcaggcacgtccactaaacatagagtcgagttgaatcaaatgcttgctgactcatccgcgggaaaaattgaccttatcataaccaaaagtgtgtccagactggctcggaatacagtggattgtataaccatggtgaggaacctggcagagttgagaaaccccgtgggggtgttcttcgagtccgagtgcattttctccctgaatgaggacaccaatatgcctctgagcttcttggcctcaattgccgagaacgaaagccgcattaggtctcgctccatggaagtgtctctggctcagagattgaacggcgggttgcctctgacgccgaagctcctggggtactcccatgatacagatggtaagctcgtgatcaatccagacgaggcccccacagtaaagcttatattctacatgtatctctctggatactctagttcacacatcgccaaaaccctggaggcactggggaagcggactttcctcggaaatagcaagtggacatcaggaaccgtaattcaggtgcttcgcaacgaaagacattgcggcgatgttctgacccggaagaccttcacaccagacgtcatcagccacaagagtaagaagaaccggggcgaacgacaacaaagcctttacaaaggtgagcatgaagccatagtctcacgggatgattacatcgcagtacagcacatgattaacaacgcaaagtatggcggaaagagtattctgcctgaactgagggtgatcgaaagcggtgtgttgaagggtttcgtcacgatctctcccaagtgggcggggttcaaagccgccgattacctgcaggcctcaatgtccgtctacaccgacgacacatattacggccagccggcggagggagacgccacctttgaagtggctgccggggactttgatcttcgcgggtttgaggtgacaaatgcatctcttttcgacgcgaacaagcggccatatgtcttgttccagtccaagcagatcaagttttctactgactgcgttaggcagttcggcaaagataataaggtggaactgcttatccacccgggacttagaaaactggccgttcgccgagcttccaaagattctaggcagtgtgttcagtggtcaagacctgacgacggaaagtattatgccaaagagattccctgtaccgcttttggcggcacactcttcgagctcctggactgggaaactgattttaagtttagggcatatggtcgactgctgcaaaatgagggtgacgcagtgttcctttttgatctgtctgaacctgagatttttatccaaagctatctcatgactggaaccgactccccaatttctggggatggagaactttctcctctgagtgtaagcggcaaacgcgttagagcagtcccaaaaaaactggctgataggtttggcagcgatttttacagccatcgactcacaagtagcagccccgagctccaatcagaagatgcttggaagctttggctcgaggggcaactttttgaaacgggcgaaaaattgagggtcactcagttcgatgagatgcagcggtttatcgccgagcagctcgctcctattaaacagatggaagaggtggacttcaatgct

SEQ ID NO: 1240 - DNA, 1803 bp, unidentified
  source 1..1803: mol_type = unassigned DNA; note = Bacteriophage uvig_92124 from the Index of /pub/databases/metagenomics/genome_sets/gut_phage_database (ebi.ac.uk)
atgaaagacgttgaagtcattaaggcacgcaatactttgtctccacgagctaggaccaactttgaaaaaagactgagggtggccgcatactgtagagtttcaacagacacagaagatcaactgaacagttataagtcccaggttgagtattacactgagctcattaagagtaaacctgagtggagtctggccggcatctatgccgatgaagccattacaggtacccaggtgaagaagcgggaagatttccagcggctgatcaatgactgcatgaacggcgacgtggacatggtgataaccaaaagtatatccaggtttgcccgaaataccctggacaccctcaaatacgtgaggatgctcaaagacaagggagtcgccgtgttttttgaagaggagaatattaacaccctgactatggacggtgagctgctgctcgtaattctcagtagcgtggcccaacaggaggtggagaatatctccgccaacgtgaagaaaggacttaaaatgaagatgcagcggggcgagctggtcgggtttcagggctgccttggctatgattataacccagaggataaaactttgacagttaacgaagaggaggctgctgtcgtgaggtacatcttccagaggtataccgagggcgcagggggttccgtcatcgctaaggagctggagaatttggggtacaagacgaaacgcggttcaccaaagtgggcggactcaacagttattgggataatcaagaacgagaaatacaagggcgatatcctgttgggaaagacgtttactgtcgaccctatctccaagcgaaggctttataattttggagaagaggatcagttttacattcgcgagcatcatgaaccgattatcagtgaagaggtgttcgaggccgcacaagaaatattgcgccggagagctaaacccagatccttgaatgtggacgggaaacgggaaaaattttctcgcaaatatgcgttcagctgtatgatagagtgcggattctgcggcggtaccctgacacggagaagctggcattcatcatcccagtacaataaggccatctggcagtgcgtggtgtctaccaaaaaggggaagaaattttgtcccgagagcaaaggagttgacgagagaactatcgagagggcgttcgtagagagctaccgcctgttgtgtcaaaataacaaggatgtcttggatgagttcatgaagagaaccgaggaagcattgtcagaaagcaatgctggcaaaaggctggcaaaagcggagaaggacattcacgcactggaagtgaagaagaacaagctggtggacatgagacttgaagacacaattgacaaagagacctatgatcgcaaatatcttgatctgtctagccagatcgagcagctccagaaggaatgcgagagtctgcaagacgccgccgaaactgaatccacgatgcgaaagcgggttgctaccttccgacagactctcgaacagaacgaggtactcgacacattcgatcggcatatatttgagagcatcgttgagaaggtcattgtaggcggctacgattctaacgggaacaaggacccttacatgatcgtgttcgtctacaagacggggttcaagaactctgtggatggtaaaaacttcaaacccctccggaagaattccaaggaaaatcactctcccgctgtgttgtgcagccacgcttcaaatgaagccgaatccatgtgcagcgattctagcgatgacacatgtggagtccaccacggaatctgtcctcacgaatctcttatttttgatgtgttcaaagta

SEQ ID NO: 1241 - DNA, 1503 bp, unidentified
  source 1..1503: mol_type = unassigned DNA; note = Bacteriophage uvig_588507 from the Index of /pub/databases/metagenomics/genome_sets/gut_phage_database (ebi.ac.uk)
atgcggattgccgcttactgtagagtgtccaccggcaaagaggatcagctcgattccctggaacaccagaaagagttttttatcgaatacgcgaaaaaaaatgggcacacattggtgcaggtgtacgccgatgaaggcatctctgggatgtctttgaagcaccgcgccgagttcaatcgccttatgaaggacgctgaactgcacttgttcgatatgttggttgtcaaggacatcagtagatttgcccggaacactgtggatttcctccaaagtatacgaaccctcaagaaattcggcataaacaccttgtttctcacggccaatatggagagcctcggagaaagtgagtttgttctgaccgtgttctctgctcttgcccaggaggagagcgtcaacctgagcaaacgggtgaagttcggaaagcagattaacacaaagatgggacgagtccctcacaaaatctttggctatgacagggtggacaactttcaccttcggatcaatgacaacgaggcagccatcgtgcggaaaattttcgagctgtatctgagtggcatgggagggacctgcattgctcaggcactgaatgcgaatgggtgcacaactaagactgggctgcaatggaagggttatacagtgagacggatcctgagaaactcaatctactgtggccaatacgtcaacaataagtatgagattgctgactgtctcgagcacaccagaacaatcaaggatgagaatcagtggctggtacatgatagaccagaatgggcaattatctcccgcgacatctttgaccaggcacaaaaacagatggctcatcgcaggcaggagtataattcaaaaacacagaaaggaatcagcaggtactcctacaaacacatcttcagcatgcttattaagtgcgactgctgtggcaggtcattcacgaggaaacattataagaacaatggtaaaagaggagccgaaattgaccggtactgttggaaatgcattacttacgacgcttattccgccaaaggcccgtgtcataacagggtaaccattaacgagactgacctgatcgaacacatccgagagtatctcaagtctcttattgaggatcctaagactttcgttcagcaaattatcgatgaagcgcaatcatactgcaagagtaccccaaacgaagacgtcgttcagctgaagcagaaaaaagcctccatgcaggcaaggcgcaagaagtatcaggaaatgtatgcagccgatctgatgacaattgacgaactgaagatagaaatcaataagatcagcgatgagatggagatgattgactacaagatcaagagctccgagatgcccttggatcccaatgattctaacgggatcattgaccagtaccgcaaggaaatagagtcatttctgaacctggaaacgataacctctatggacatacgaaagataatagatcatatcgatgccaaagctgacggtgagatcattattcatctcaagcatcttgca

SEQ ID NO: 1242 - DNA, 1806 bp, unidentified
  source 1..1806: mol_type = unassigned DNA; note = Bacteriophage uvig_129895 from the Index of /pub/databases/metagenomics/genome_sets/gut_phage_database (ebi.ac.uk)
atgaagcagagcgataacacaaagatcactgccctttatgaaaggttgagtagggacgatgagcttaacggggagtctaactccattgtcaaccagaaaaagatgttggaaaagtatgcgctcgagcagggctttactaacctgcgacattatagcgatgatgggtggtccgggacaaactttgagcgccctgactggaagcgactgctggatgatatcgaaaatgggttggttggaacggttatcgtgaaagacatgagcaggatagggagaaattaccttcaagttggattctacactgacgtgttctttcgcgagaagggagtcagattcattgcgatttccaacggtgtggacaacactaggagtgactcaaacgagttcgccccttttctcaacatcatgaatgaatggtatgtgcgggatacgagtagaaaaatcaaggaagtcatacatgcaaaaggcatggacggtaagcacctcacatcaaccgccatctacggatacaagaaagaccctgaggacagcaaccattggattatcgacgaggaggccgctaatgtagtgagaaggatctttaacttggtgctggaaggcaaaggccccatgcaaatcgccaggatactgtataatgataaagtggaacggccatcctactatctggctatgcgaggactgggcacttgtcggggaagctgcgacatgaacgagccctacacctggaccgcttctacaatttcagacctgcttcgcaaaccggagtacatgggccacacggtaaactttcggaactacaaggactcctataaagacaaaaattctaagcgcgccgataagaaggactgggtcatctttgaaaatacacaggaagcaatagtcgatgagaatacatggaatatcgtccagaaaatccgcgaaaccaagcatagacccaccgtaaagggggatttttcaccactcacaggtctggtgatttgctctgactgtggtaggccactctatcaccatcagacttggggatatgagaaaaaggacaaggatgggaatcccaccggcaagtggaccaacgcacaagactattatagatgctctacatatggcttgagctccggcaagtttgcaacaaagtgtagcgggcactacattagaactgcagtgctgaatgaactcattctggacaccattaagtacacctgcaagtacgccaaggagaataaggaggagttcgccaagaaagtcgaagatagtttcaatctgcggcgggtttccagcctgaaaggtattaaaagtaacattacgaaaaaagagaaaagatccatggagctcaataacctgataaagaagatctacgaagacaacgtcaatggcaaactttctgataaacggttccagatgatgctgtcagattacgaaaaagagcaggatgaagtagataatgcaatactcgcccttaatgaggagcttgagaaataccaaaccgactcaatgcgcactgagaacttcatggagcttgtgcacaagtacactgatttcaccgaactgaccgccccaatgatctatgagttcgttgataagattattgtgcacgaagccgacaagagtaccggcgaaaggatccagcaggtggacgtgtatctgaaatacatcggaaagcttgatgtgcctatgcccgagttgacaccggaggaacgcaaagaacaggagaggctgcgcaagaaacgggctcagtctcgaaattaccgacagagacaaaagctcaagaaacaggcggaaaaagaagctcgagagaaggctaacagcgaggct

SEQ ID NO: 1243 - DNA, 1431 bp, unidentified
  source 1..1431: mol_type = unassigned DNA; note = Bacteriophage uvig_74804 from the Index of /pub/databases/metagenomics/genome_sets/gut_phage_database (ebi.ac.uk)
atgcagcaggctgccgcttacgtgagggtgtcaacagatgatcagaccgagtacagtcctgaatctcaactgaaagagttgaaggattacgcagcccggcatgatcttatgattgacccagaacacatctacattgacgccgggatatctgggcgaaaagctgccaaaagaccacagtttcaaaagatgatcgcagcagctaaagcaaaaccttccgctttcggcactattctcgtgtggaaattttcccgcttcgcccgaaatcaggaggagtccatcctgtataagtcccttctccgaagagagtgcgatgttgaggtgatttcagtcaccgaggagaccggggatagcatgttcggaagcctgattgaaaggattattgagtggatggatgagttctacagtatccggttgggccaggaggtaagaagtaagatgaccttcgtggcggagaaggggctgcctcagactgtggctcccttcggctatagtaaaaagccggacgaggcaataatgattgttcaaaaggaggcggactgggtcagattcatggccgaaaatttgctgaggggcagaagcctccgctggatctccaaccagctgaacgatcacggaatccggacccacagaggaaataagtttgaacctcgcacaatcgaatatatcctgaggaacgtaacaaatgccggtgcggtgcattggaccccaaatcaggacgaccatgacaaccggataccctactctgaaaacactattatagtgcgggatgtttgtccggcaatctacagctatgagtactacgaaagccttgtggccgagctcgatcggagagctaaaacacacaaaaaacaccagaagagcgatactgtgaagcgacattggctgtcaggatttttgaagtgctcaaattgcggtagctctatggtgtatcagcgcgcgaacaacggttttcagtgttataagtatggcaagagcttgtgtaatgtttcacacttcatcagtgcccccaagatcgagaacgcaatcattgatgcaatatctcatgtcacaatcacggacgactttatccgcagcataaccaggcccgtgacttctaaaaattccaattacaagaaagatatcaagcggctcgagaagatgctggacagggccaaactggcctacgtcgaaggcattgacacagtagaggaatacgctgaaaacaagaagcgaattatttctgagatcgagatcctgaaatccaaagagaaagaacaagctgaagccatcacctataagacgaaagaggaagtctgccgccaattcaaatcagctcaggaacttatcgccagcgacgccgacaacgacactaagagggccgcatttggctccattgtggaaaaggttgtctatagtaagccagacgactccgtctctatatttttctatctc

SEQ ID NO: 1244 - DNA, 1311 bp, unidentified
  source 1..1311: mol_type = unassigned DNA; note = Bacteriophage uvig_9192 from the Index of /pub/databases/metagenomics/genome_sets/gut_phage_database (ebi.ac.uk)
atggagcgactgattcagaaaatagaaccaagtgtggatatttctcataagcttcaaaacgtcgccgcctacgccagagtgtcttctggcaaggatgcaatgctgcacagcctgtccgcgcaggtgggttactacagcgaactcatccagtctaatcctgagtggcggttctgtggcgtattcgccgacgaagcgatcacagggactaaagagtctcgacccgagtttcaaaaaatgctggccgaatgtagaaagggcaaaattgacctgatcataactaaaagtatcagccggtttgcccgcaacaccataaccgtcttggagacagtgcgcgaacttaagatgctgggaatcgacgtgtacttccaggaacagaacattcactctatcagcgccgacggcgagctgatgctgtccatcctctcctcatatgctcaagaagagagcttctccgccagcgagaatcagaagtggcggattagaaaagatttcgagcaagggaagatttgtaatatacgcatgttgggatatcgccgcacaacaaatggtagcctggagatcgtcgaatccgaagctgaaatcgtgcggtttatctttctgaactacctctccggcaatgggaaactgctcatcagtaataagctcaatgagatgggaatcgctaccattaatggatgcgaatggactaccgcagatattcacaggatccttcagaatgagaagtacgcagggaacatgctgctccagaagcggtttagagagaatcatctgaccaaaaggatgattaggaacgatggccaattgcccaagtactttgtcgaggagagccatcctgctattatagagaagtcaatctttgacgcagtgcaaaaaaagcttgaggaacagcgccagcgattcagttcatctaaaagtgtggtttcctatcccttcacggggaagattcagtgtacctgttgcggcaaaaattatcggcacaaaatcactgctaccggaaacgtgtggatctgcgctacatataacaccagaggtaagaagtattgcccaactgccaaacagatccctgaatcaaccttgatttcagtctgctgcgaaatcctgagtataaccgagttcgacgcgaacatattcgaaaaccaggttgaaaagattcttgtacccgttccgaacaaactcatctttcagttgacaaacggcaagtgcattaacacaacttggaaagatcgatcaaggtctgagtcctggacggaggagaagagagcagcagctgccgagtccagcaagacgaggaggtggaggaagtgtcagaag

SEQ ID NO: 1245 - DNA, 1329 bp, unidentified
  source 1..1329: mol_type = unassigned DNA; note = Bacteriophage uvig_190248 from the Index of /pub/databases/metagenomics/genome_sets/gut_phage_database (ebi.ac.uk)
atgtatactctggatcggtttgcgagaaataggtatgattctgctatctacaaggcaaagcttaaaaagaacggggtacgcgtctactacgccaaacagcccatgccagacacccctgaaggaattattttggagagcgtgctggagggttatgcagagtattacagcgagaatctgagccgcaacataaaaagggggatacgagagaacgcactgcaaggactggctacaggcggagccaatctgctcttgggttatacagtcggcgaggaccgcaagtacgctatcgatccaactggagctaagattgtgcaggaaatctttcagctctacgcagacggcatgagcgctactcaaattattgcttactgtaacgaacggggctataagacagccaggggcaacgcattcaataagaatagtcttcggaccatcctcagaaacgagaagtacattggcacttacaagctcatggacattgttatacccgatggcatgcctgccattattgacaaagtgctcttcgaaaaggtgcaggctatgctcaagcacaacggtaaggcaagagcgaaagctaaagcccatgagaattaccttctgaccaccaaacttttctgtggacactgcggctctcctatggttggggagtcaggtactagtaaaaccggccaagtgcattattactacaagtgtactaaagccaagcgggaacacgcatgcaagaaaaagtcagaacgaaaagattggatcgagaagctggttgtcagatatactgtccagaatgtgctgaccgatgaaaacatagccctgatcgcaaagcgggctatggaaataatcgagaaagagagcgccgatacaacatatctggatgaccttaatgccgaacttaaagatgtgcagaagaagattaaaaacctggttagcgccatcgaacaggggataatcacctcagccacaaaggaccgattggacgagctggagcaggaaaagtcagatatcgaggggagaattgcgagagaagagatgaagaaacccttgctgaacgagtccaggattaggtattggcttaccagttttaaaagtggcaatgtggacaacgaggactatcagcgcagggtaatcgacaccttggtgaactccgtgtacgtatatgacgatgaggacggaggtaaacgcatcatgttgacgttcaatctctctggaaacaatacggccacacttacgtcttccgacatcgggtgctacgccccacccaactccgccaatccgaactccgtctttttcatcaaacataccttcgggtttgtgtacaagatcgaaaatgcggat

SEQ ID NO: 1246 - DNA, 1587 bp, unidentified
  source 1..1587: mol_type = unassigned DNA; note = Bacteriophage uvig_41106 from the Index of /pub/databases/metagenomics/genome_sets/gut_phage_database (ebi.ac.uk)
atggcaaaagttcgcgtcattcccagcaccctgaacccactgactcagagtccgatttcagaaacgaagaagaagaaagtggctgcttatgcgcgggtgtccacagactccgacgaacagtacacttcctacgagatgcaggtgaagtattacaagaagttcatccaggagcatgatggctggatctacgtaaacgtatatgcagacgagggtataaccggtacgaataccaaaaaacgggactccttcaaccagatgatcaatgatgctctggacgggaaaatcgatctgatcattacaaaaagtatttcacgcttcgccaggaacacgctggataccatctcaattaccaggaagcttaaagtttctggcgtggaagtgttttttgagaaggagggactctggacatttgacagcaaaagtgaactgatattgaccattatggcttctatcgcccaggaagagtcccggagcatatctgccaacgttacaatgggtaagaggtggggaatgcaggaaggaaaggtgtccttcgcgtataagaattttcttgggtacaagaaggagaacggcaagattgtcatcgacgaggaacaggccgtgatcgtacgccggatctattctatgtttttgaaagagggcaaaacatgctcaggaatcgcagtacagctcaaaaaagaaggcatcctgactccttctggaaattcaagcaactggcaaaagaacacggtgctctcaattctgaccaacgagaagtacaagggcgatgcattgttgcagaaaaccttcacagccaattttctggaacacaacgtgaaaaggaacaatgggcagctcccccagtactacgtcgagaattcccatcctgctattatcaatagatacgagtgggagcaggtccagaccgaactcgcccgacgccaagagatcggcagaaattattctggcgccggggcatttgccagcaaacttgtctgtgaggactgcgggggtttctatggaatgaaggtttggcactccaatagcaagttcaaaaagatgatacttcagtgcaataacaagttcaagaaaggcaaaagtagatgtcagacaccacaccttacagaggatgaagtgaaagaaatgtttatccgaacctacaacgaaaccatgaaggacaagaccaaggtgatcgatgatactgaagccgtgattgccatgctgactaatacagatgaaattgataagagaatagcctctttgacttctgagatagaaatcgtgagtgagctcgtcaagaaactgattcgagagaacagctccgctgctcaatcccaggatgactaccagactaagtataacgagttgagctcaagatatgacaaaaccaaaaaggccctcgagaaggctatgcaggataaagcgcacaaacaagggcaacggattaagctccagagcttcctggagagcctgaaacaaaaggagtgtatcatcgaccaatgggacgaggaattgtggatgattatggttgaaaaggcaatcgtccatagggacaagagtattacattcaagttttacaatgggaaagagataactctgactagtgca

SEQ ID NO: 1247 - DNA, 1725 bp, unidentified
  source 1..1725: mol_type = unassigned DNA; note = Bacteriophage uvig_453452 from the Index of /pub/databases/metagenomics/genome_sets/gut_phage_database (ebi.ac.uk)
atggagaactttgaattgaagggctttgccaaaggcaagaaacaacagaaagaacaggtgggagggaacgctatcatctacacgagagtgagtagctctgagcaggtggatggccaaagcttggaggtgcagatcgacaagtgcagggagtatgccaatatgcactcatataacatagtcggtgaattcggcgggacatatgaatctgctaaaagtgataaggagaggaaagagtttagtcgaatgcttaccttcatcaaacagtcaaacaagaagggtagcaaccagatcgtaaaaacagtaatagtcttttcaaccagccgcttttcacggactgggtctactactatcatcgaggaggtagaagcccgaggtgcctacgtggtctccgcaacatctaattatgatccccggacacccgtgggaaagtacatgcagctgatggaactggccaacgcacgcttccagaatgatgaaaaaagagccaccactgtcgaaaattctgtcaaagcacttctgaagggcaggtggattggtaaagcccctcggggctacgaccagaagacaaccaaaaaagagcaaatcattacgattaatgaagagggtaagttgatccgcaaagccttcctctggaaggcaaataataagctttccaacgaagagattagacatcggctggctgctgaaggatttcacatatgcaagcaaaagctttccgaggttttcaagaatccattctactgtggctatatggcccacaagtttctccagggcgatattgtgcagggaaatcatccacccttgatacccaaggagatctttttgaaagtgaatggggaactttccaagaaccacagcgggtacgagcagaagatcgataaggaatatgcgccactgctgggatcaattaagtgtccctgttgcggaaacaatctctcagcctctatttccaccaagatgaggaaaaaattcggaagaacagacattgggtattacgtctgtagccgcaaggggtgcaagtataattcatctaccaaaaacgttcatgaggcattcgaggaggaagcgaacaagtatgtactgtctgacaaagttagcgagctcctgaaactccagctgactattacctttgaaaatatgaacaaggaaaacaaggagagggcccagtctattaagagtaacataaaggcgaaagagaaggagctggagcaagtggaaacaaactacgtgctctgttccgacacgaaaaaacaggagatctgcgttaaagtgatgactcgattggaagaagagatccgcggcctgcaggcagagtacagtaaagtgaacacaaagatactcaacctcgacaagttcatcgattacgctttcgccatgaggtccaatctgtttaatctttgggagctccaggggcttgagggacgaaggcggctgcagaaattggtgttccctgacggctttatctacgacaagaacaacgaacatattgagccgaagaccgtgaatcagttctttctgctgaattacagttttcccaccaacaatggcgataagaagcgcgagaccaattccgagaaccacagatccagcctgcaagttctggaggctggcttggaacctgctcagcctcaatggccaaaagacttcaagagtttcgtctccactattccacctttcgaacacccgttcaaagaaagcgggaaacgggacagcaacagcagacct

SEQ ID NO: 1248 - DNA, 1533 bp, unidentified
  source 1..1533: mol_type = unassigned DNA; note = Bacteriophage uvig_244564 from the Index of /pub/databases/metagenomics/genome_sets/gut_phage_database (ebi.ac.uk)
atgaattacttgatgtatctgcgcaaatccagagccgatggcgataatgaaaccatcgaggaagtgctcttcaaacacgaaagggacctgcaaaatttttctattagaatgttcggcagtaagatcccagaagagaacatcttccgggaggttgtcagcggggagacaattgaggacagaccagaagtgcaaaaagtcttgagtcttatcgaatcagatgacattaaaggggtgctcgttattgatccccagcggctgtctaggggcgactgggaggatggaggtaaaatcctctccacttttaagtatagcaatacactgatcttgaccccgccgaagacgtatgaccttaacaacaagtttgactataagtttttcaagatggagctgagccagggaaacgagtacctcgagtatattaaggaaatcctgatgagggggagagtgtcatctattaatgccggaaactatatcggcagtgtcgctccctatggctacgacaaaaccttcgtcgaaaaatctcccactctgaaacctaacgaaagagaggccgaggcaatcaatattgccattaagaaactcgtatacgatggattgggctggactcagatctgcagagacctggaatccatgggctataaaccacgaaaaggggaacattgggccccctatactctgcgcgatatctgcattaatcccgtcaatatagggaaaattaagtggaatacccggaagatcgtcaaagtatttgaagatggaaaactcaagaagaagcgccctaggaacaagaacgatgttatctacgtggacggcaaacacccagcaatcgttgatgtggaactgtttaacaagcttatagagaaagtgggcaaaaatacacgcgagaagtctagctctgaactggtgaatccatttgccggactgatcttctgtggtacctgtgggcgggccatggcttacaggacatacaagaataaggacggttccttccgatcctcacctcgactcttgtgcacaaatcaggtctactgtaaaacgaagagtgctaccttttccgagatctacaacagcgtggtggctattctggaggacatcgttaaggacttcgaggtgaaaatcgataacgacgactacaaggcctacaatattcagacacgcatgttgaaggaggcggaggaggagcttaaaaaactggacgaaaagcaggaggagctttacgatttcctcgaagacaaaatctatagcaaggaagtgtttcttgatagatcagctaaactgaacgcaaaacgggaggaagtggaaaagcgcatagagttcctcaagttgaacaccatagagcccatagactacaagcagaagatactgatgttcagtgacgtaattgatgcactgaaaaacgatgacgtacctgcgaagtacaagaacaacctcctgaagaatataattagccggatcgattattaccgagagtcagagaataggactaagtgggacacctccgaacctaggttggagattcatctgaacgatttt

SEQ ID NO: 1249 - DNA, 1590 bp, unidentified
  source 1..1590: mol_type = unassigned DNA; note = Bacteriophage uvig_563601 from the Index of /pub/databases/metagenomics/genome_sets/gut_phage_database (ebi.ac.uk)
atgagttacaacgacaacataaagaacctgaagccggacgaaatcataatctacctgcgaaagtccagggccgataatcccgctgaaagcgttgaggaagtcctcgagaagcatgagaccattttgcaggattttgccagacaaacatggacctatcaaattcccgagagcaatatctaccgcgaggtggtaagcggggagaccatcgaagctcggcccatgatgcaagccattatttcattgatagaactgcctcagtataaagcaatactggcagtggagccacagaggctgacgcggggcgatctggtcgactgtgggactatcatcaactccctccgctacaccaatacactgatgataacccctgccttttcttacgatctgaacaataagcaggacagaaagtttttcgagtccgaattgatgcgcgggaatgactatcttgaatacacaaaggagattatgtctcgcggtcgaattgcagctgcacggcggggatgtttcatcggcaacgttgccccttatgggtatcagaaacatgtaatcgggaaagaccacactcttgctccagatcctgatgaagctcctgtgctgaagcagatctacgagtggtacgtgtatgatgatgtaggagccgacactatcgctaaaagactggataagctgaatatatcacccaggaacggtggccgcaactggaatagcgcagccattaaggatatgctccacaaccccgtctataatggcaaaatcaggtggggctatagagctaccaagaaaatcatggtggacggtcagctcatttctacacgacctcaggcctctgacgacgactatatcattgtggacggattgcacgatgctattgttccgcacgacctctggctggccgcgcaggagaaaaagggcagaaccacgcggaagaaagcctcaactaaagttaggaatcccctcgccggattggtcgtctgcccctgtggtagaatgatgagcctgcggacatacagaaagaatggaattgagcgcagtgcaccaaggcttctctgcgacaaccagtccaattgccataccaggtccgttctgtatcaagacatgattagcgcaatcatcgacattctgactaagtacgtgaacgatttccaggtgaagcttgacagctcaagtgctgcgagtcatgatttttacgagaaacggatagagtctatgcagtccgagattaataagcttgaggaaaaatcagaaaggcagaaggatctcctcgaggacggaatctacaccaaaacagaatacgtgaaaagaaactctgaagtgcgcaagcggatccaagccctgctcctcagcattgaaaaactccagaaggagacaccgccaaacatcgattatcaacagaaaattcacgcgctttccaaagccatctcaatgctcaagaaggacaacagtaatccagaagagttgaataagctcctgaaatccataatcgaaaagatcgagtacaggagcgaggtggatactatccgattttctggcgaaaaattgaagggcgggtggaaaccacagaagttcaacatcgatgtctacctgaaattc

SEQ ID NO: 1250 - DNA, 1599 bp, unidentified
  source 1..1599: mol_type = unassigned DNA; note = Bacteriophage uvig_203635 from the Index of /pub/databases/metagenomics/genome_sets/gut_phage_database (ebi.ac.uk)
atgtctattggaaccgaattgcgcgccgtgttctacgctagggtgtccaccgaggaggagaagcagctgaacgcactcgaaaagcagattcacgaaaacaaggatgtcatcagggaccacgggtggcggttggtcggagagtacatcgatgagggcaaaaccgggactactacaaaacgaagaaacgattacaaacgcctgctgaaagatatgaccgagaacaagttcgatatcgtggtttgtaaggaccaggatcgccttcaaaggaacacactcgactggtaccttttcgtggacaacctggtgacaaataacctgaagcttttcatgtatctggacaataagttcttcaagcccagtgaggacgccctcataaccggggtgaaagcaatcatagcggaggagtattcccgaaacctgagtaaaaagctcaataattccaataagagaagaattgaacgagctctgaatggtgaggaggtgagcgccatgggcaatggtaaaagtctggccttcaagattgtcaacggcaagtgggtaaaggatgaggaggaggcaaaacttgggaagaaaatatttgaactttacctggagtacgactcaatcagaaaagtccgggattgggtgaacgagcacggctataccaactcagtcggaaaaccctttaccagtgaaagcatttctcggatcctgaaaaatgaaaaagccaaaggtgttatcgttatgggaaagtaccatcatgacttcgacaagaagaagattgtacggagatccgaagaggagcttgttaggattccagcacccgagctggcttatgtgagcgaagaggtctttgacaaggtgcaggagcgcctgcgcgcgaaaacgggcaacggccgaggggttaacgcctattctgatcctctgtccgggaaaatctattgcggctcttgcggcaggaagttgtggaagcacgcctcaaatggatacgttaactggatgtgcgcttcccaggtggctaaaggcgacgtagagtgtaatggcacacggattactaccgtggctatcaggaacatatacaagaagattacagataatttggaagtgaacaagggtgtagtgaagcaggacatcgtgaagtggctgaatgagctcaaagccacgttgagcgattcaagcgtcaatgaaaaaatccaaaaggacttggataagcttgagaggaaacgcactaaacttctcgaggcgtatctcgaggattttatctctaaagacgactacaaagctaagtacgaagccattgagggacagattgaagaaaagaagaagctgctggtcccggttgaagagaatgaagacatcaaagtgatagaatctgtccttcagaatattgacgacgaaatcgatgcctatgtgaagacgctcgatatggaagaaagcaaggtggattttcttatcgaacacacaaagcggataactgtcctggagaacagagatatcatcatcgagctggacttggtagcaggtgccattattgcaggaaaagactttctcttgtatgtgcatgacacaatgccccagcatcatggccctaaacacctccaccctagcgggccacaaact

SEQ ID NO: 1251 - DNA, 1686 bp, unidentified
  source 1..1686: mol_type = unassigned DNA; note = Bacteriophage uvig_311594 from the Index of /pub/databases/metagenomics/genome_sets/gut_phage_database (ebi.ac.uk)
atgaagcgggtgaactgcctctaccgggttagcagtaaacagcagctccatggggacgacatccccgtgcaaagagaagagtgcatggcttacctgggcgagcatactgactgggaattcaatagagagtatgtggagaaagcggtcagtggattcaagacctccgttaaagaccgagatattctccaggaaatcctgactgatgcgcgagagaagacttttgacgtcctgcttgtgtttatgtcagatagaattggccgaaaagaagatgaatctcctgccttcgttacaactctgaatgacctgggcattgaagtatggtctgtcaaggaaggtcaactgaaaaccgctgagcacgtggataaactcatgaattatatcagattctggcaagccgaaggagaaagcaggaagaccagcatgagggttaaagccgcccaggagacattcgtccgcgatgggaagtttgtgggcggcaaagcaccttttggctataggctcgaatactccggagccatttcaaatcacggtcgagctctcaagcacctggtgattgacaaagaaaaggcaaagattgtacagcagatctacgattacgcttattattatcactatggcgctcttaagatcgcgaagacacttaacgagcagaacatacaggcacccgtggacacatggaaggcctgcactatatcccagattttgcagaatccagtatacatggggtatatcgcttacaacagacggcagcattcaaagtgtgggggttccttcgagcggacacccatggaacaatggatcatgtcagatgagcagaatactgagcttgtaattgtgagtcgggaaaagtgggaaaaggtccaggaaattagggagagccggaagaaaaacatgaaagacgctagggacgataagcaagggaaatacgtctatactagctctggacagttggtgctgatggggctggtttactgcgggtactgtggcaaaagactgaccaacggatctaagtacgactactgggaaacgaaagaaggcgaaaggaggaaaaagtttgtgggacgctatcgctgtacccagatggccaacgggagccttacctgcagtggtaaagcctattatagagccgaagagatagaaccaatagtgtataccgttgtgacatcctacctgaacagcctcaaagaggcagatacatacgacgacattctgaaacttcaagaggagcaacgcatcttggtgaagcatgagctggagcagctccagaaagagatcaaagccataaagaaggatatcgagaccctggagcagaatatcccgtctgcattgcgcggagaaggtaatttcagtcctgtccagttgtctgcactgatggacaagaataagcagcaactgatagagcttgagcaccgactcgaaattaagaacaaggagtacaaggagatggagtgcaaaaaaaaggacatcaagaacattggaaatatgatctcaaactggggcgaactttttatggaatgttctatcccagagcgaaaagtcatgttgagcaagcttatcgagcggatagatgtgaaggagaacgatatcaaaatcaagttcaagatctccctggaggagtacattggcgagaaagacggacgcaagggcattgggtcccccaccacgctgtacacgccttgttccgcc

SEQ ID NO: 1252 - DNA, 1584 bp, unidentified
  source 1..1584: mol_type = unassigned DNA; note = Bacteriophage uvig_85018 from the Index of /pub/databases/metagenomics/genome_sets/gut_phage_database (ebi.ac.uk)
atgaatactaacattaaacacacagcccttctgagcaggctgtctcgagaagatgagaacatcggtacatctgaaagcatcctgacccagaaaacgatgttgacacagtatgccaagagtcaccactttaagaacatcatccactacgtggatgacgggtacagtgggactaatttcgaacggccggattttcaaagacttatgcaggacattaaactgggcaagattggcgttgtgattaccaaggaccttagcagactgggccgggactatattaagatcggtaatctcctggaggagtatttcccaaagtatcaggtccgctacatcgcaatcaatgacgacatagacactattaatggcatccctgaatacgtaccattcaaaaatatcatcaacgagtggtacgcccgagatatatcccgcaaaattagatccgcttaccaaaccaaagctctgaacggtgagttcacggcctcttatgcaccttatggatataagaaagatgaaaataacaagcatcagttgattgttgatgaggagacctcttgggtcgtcaaggagatatttgaactgatagcgaacaagaattctctgtatcaggtggcacgaattctgaaagacaaaaaaattttgaagcccagggcccagattatgaagaaggaagggaagtactacaatgaactttgggagaaatacccctatgactggagcccccaaacaattcaccgcataattacaaatgaagagtatctcggacacctggtgtgcaaccgcaactcaaccatctcctacaagtcaaaaaagctgaaacaaaatccacgggagaaatggatcattaagaagcatacccaccaggcaatcattgaggaggaactgttctacctcgctaataaggctcttgaaggatccatcaagaagaaggttatcaaacctaggaacatgtttagtcaactgctcaggtgcgattgttgcggcaaagctttgagcctgtaccattcagatagaagggtggccagcttttgttgtgtgacctatcggagttttggaaaaaaatactgtactgcccactataccagatatgacactctttaccggtacgtccttgaagatatcagaaaacacgctaagaaggccatcaagaacaaggaagaactccttcaggaaatcatcaaccatcggacaaaaactaacgaagaggagcataaaaacaagatcaaggagaatcagcgaatcgagaaacgcctcaaggagattaaggagataatgataaagctgtacgaggataaagcactcaatcgcataaaggaggaaatgtacgaggagcttttggaatcatacgagaaagaaaaggcggagaaggtgctcaaaaggaacgagaacaacatattcatcaatgaatccaaaatcaaggagaaggaggtgaaaaagttcctggaatgcatcaacaagtacgaagacttgaaagagctgaatgaagagatccttcatcagctcatcaataagattgtcgtatatgagagagaaattatcgacgggaaaaggattcagaaaatcgagattgagtataacttcattaacgat

SEQ ID NO: 1253 - DNA, 1587 bp, unidentified
  source 1..1587: mol_type = unassigned DNA; note = Bacteriophage uvig_81090 from the Index of /pub/databases/metagenomics/genome_sets/gut_phage_database (ebi.ac.uk)
atggcgaatgcccgaaaggtgcaagtaattgaggcgactatcaaccctaaaacccatctgagcacgacttctccccgcaaaaggagggtcgctgcttatgctcgagtctctaccgatagcgacgaacaggccggaagctacgacgcccagatcgattactacacacgatacatctgcaatagacccgactgggagttcgtgaaagtttatcccgatgatggcattagcgggctctccaccaaaaagcgcgagcagttcatggctatgatcaacgacgccctcgccggaaagattgactacattatcaccaagagtataagtaggtttgcaagaaatacagtcgatactttgacatacgtgcggatgttgaaggatcacggcgtcggagtgtacttcgagaaggagaatatagacaccatggatgccaaaggcgaactgcttattacaatcatgtcctctctggcacaggaagagagccgctcaatatccgaaaacgtcatctggggtcagcgaaaaagattcgcagatggcaaagtgaccctgccgtacaagcggttcctgggttatgatagaggcgcttctaaagatgatcctccagtggtgaacgaagagcaggcggtatgggttagatacatctattccgagttcatgctgggtaaaacggcatgtgccatcgccaaggcactgacagccagcggcgtcccatccccttccgggaagccaaagtggtcacccagtacagtggagtccatcctgtcaaatgaaaaatataagggagacgcattgctccagaagactttcacagttgactttctgtccaaaaagaagaaagtgaacgagggtgagcaccctcaatattacgtcgagcattctcacgaggcaattatcgaccccagggagtggcagctggtgcaactggagatggaacggagaaaatctctcggcatgagatatagcggcaattgtgtgctggctactaggattgtttgcggagattgtggaagttactttgggccaaaggtgtggaactcaaccagcaagtacaaacgcactatttggcagtgtaataacaagtttaaaggagagaccaagtgttctacccctcatatcgaagagcaggaaattaagagtcggttcatctcagtgatcaattttctgctcccggataagcaagcactccttgaagactgccggctcatgcaagacgcccttacggattgcactaaaattgacgagcagctgaacgccttgaccgaggagcttgaagtcgtggccgccttgacacgcaaatgcatagcagaaaacgctgctgaagtgatcgaccaggtagagtataagaagcggtatgatggcttgaacgaccgctataacattacccgggagaagatcgaggcgatggaaaaaaagaaaactagccggattggcgaagccgacaagataggggcctttatgtttgaaatgcttgagagggacgaaccattggatacattcgacgacaggctctggattgctgttatcgatcacgccaccgtatttcacgacgggcggatagtttttacgttcgtgaatgggatggaggctgaaggg

SEQ ID NO: 1254 - DNA, 1560 bp, unidentified
  source 1..1560: mol_type = unassigned DNA; note = Bacteriophage uvig_81430 from the Index of /pub/databases/metagenomics/genome_sets/gut_phage_database (ebi.ac.uk)
atgtctaacctcgtaatgtacctccgactgagcctggaggatgacgtgaatgcagatgagtccaactccattacaaatcaaaggcgcattattcgggattatattagttcacacgaggacctcaggtctatgactgtgaccgagaagtgtgatgacggctactccggcacgaatatgaatagaccaggcatgcaggagttgctggcaatggtgaaggaacaaagagtcgactgcatcattgtgaaggatatgtctcgctttgccaggaactacttggagacagggaagtacatcgaacagatcttcccgttcatgggtataagattcatcgcaattaatgacaattacgacagcaaggactatgtcggaggcatcggagaaatcgacgtccagttcaaagcgttgctttacgatttttactcaaaggaccttagccaaaaggtttctacagctgttatggcgcggaaagacaagggaatgtttatcgggatctgtgcgcctttcgggtacctgaagtcaaagaataatgcttgtgaactgttggtggacgaagaagccgccgctgtagtcaagagtatattcaccctgagagccggcggggcttccattgctggaatcgtcaggacattgaatggggaggggattgatacccctgcagcctaccaccgacgaaagggtacttatgctaacatgtatacaaaaggcgatagcccattgtggactgactataaggtaaactctatcctcaacaacgaaatgtacataggcacctttgtgtatggcaaaagtagggtgaaggagataggcagccgccgcaaaaaaatgctcccaccctctgagtggaaaaggattcccaaccatcacgaagccatcgtcagcaaggaagtatatgagaaggttcaggcgatgaagggtacggttcctgaggcattcactcccgtgggaaagaaagcctccgtctatacaggacggctggtgtgcaattgctgcggtagaaacatgatctaccacaaagatagactcggaaaaagatttttcaactgtgaagtgaattaccgcaagaacaacaactgcgttcaccgggtgcttgtgacggacttggatgggataatcaaaggggagctgagcaagcagatatccgggctggccaaactgaaacttctgatggaaaaggagagggagcaacataacgagcgaatccgcggagctaaacagcggctcgcaatggccgaggatacccatcgcaggctggagctggaacttcggactgcttatgagagctatgccaagggtgtcactgaccgagagacctacttgatgcagaaacagtcctatgaagccatgattgacggcatccgggaaaaaatcgaagcccagaaggaggccatctttacccttgaaaatcagatgccctctgagaactcaggcattcagttcttggaaggcaagagtgaaatcgcagagattaccgacgagctgcttgatgtgctcctggataaggttgtggtgtacgctgataaaacaattgagctgcggtggaaattttcaaatagaagtaat

SEQ ID NO: 1255 - DNA, 1560 bp, unidentified
  source 1..1560: mol_type = unassigned DNA; note = Bacteriophage uvig_144265 from the Index of /pub/databases/metagenomics/genome_sets/gut_phage_database (ebi.ac.uk)
atgcaatatgaggagtatcttatctacttgaggaaatcccggtctgatgcctctctggaagctatgggagtcgatgttcttgagaggcatgagcagatcttgcttgacctcgccaagcggatgaacctgagcatcgggggaatctaccgagaagtcgtatctggagaatccattagtgctagaccagagatgcaaaagctgctgtcagaagtggagtctgggcgctgggagggtgtacttgtgatggaggtggagcggcttgcccggggcgacactgtggaccaggggattgtgcaaagggcgtttcagtacagtggcactaagatcataacacccacaaagacctacaatccaaacaacgagtttgacgaggaatacttcgaattcggactgtttatgagcagacgagagtacaagaccattaggcgacgcatgcgcgctggcgtgaccgcggccgttaaagaagggaagtggccctttaaccaggccccatatgggtggcagagggtgaaacttgaacatggtagagggtgggttctcgcacccgaccctgatgaagcacctgtcgtgaaactgattttcaggctgtataccggccccgacagaatcgggataactcacatatgccgctacctcgataatcgggggatcaaaccccggaatggcgatacatggctcgagtgttccgtcatgggtatactgaggaacgtggtgaacgatcagcgcgtaggtattggcagaaggaaggtcgtgaaacaggtgcaaaacggcagcgtatctaaagtcaggccccatagtgactatgacttcacggcccccgggctgcagccacggcttattgatcacgacgtttttctggaggcccaggagtatctcgctcgcaactctcataagcttcccgagagttatggcataaagaaccctctggctggaatcctggtctgtagctgctgtggcaagaaaatgcagagacgaccggctagcagagacggatcatcaggacgatgcccttatgatgtgttgatgtgtaataccagaggctgcccaactatcggctccaccctggagttggttgaaagggagttgatccaggccctgtccgattgggtggccggatatcaattggatccaactttggaggtcgaaaataaggttccggagaaagaacagctcctgagtagcgccgtgagcaatcacgatcttctgcttaagcaaaatggtaatctgtacgatttgctcgaacagggcgtctacacgacagaaatcttcctggagagatcacacgagttgcagaagcgaattaaagagtcagaagcacacatcgagatcctcaaaaaggacctggagtacgaaaaagagaaaattgcgaatattgagaacttcatcccttcttgcaaggaattgctctcctgttactgggacctcagcgcacaggaccggaacaaggcactgaaaatgctgctcgaatccgtggaatacacaaagaccaagcgcaaccgcaagggagacaaagacaatccaacctttacactgaatcttaagcctagaattcctcggatt

SEQ ID NO: 1256 - DNA, 1545 bp, unidentified
  source 1..1545: mol_type = unassigned DNA; note = Bacteriophage uvig_597427 from the Index of /pub/databases/metagenomics/genome_sets/gut_phage_database (ebi.ac.uk)
atggccttttgtatgtacctccggaaatctagggctgatatggaggccgaagcacacggcgaaggcgaaacccttgcccggcatcgcgcaaccctggagcagctgagcagacggctcaaaaagccaattgccgaggtctaccaggagatagtgagtggggagtccatcgccgatcggccccagatgcaacggcttctggcagatgtgagcgctaaaaaatgggaaggcgtgtatgtgatggaggtggagcgcctggcaagaggcgatacaatggatcaaggactggtctttcacgccttccgatactccgatactctgattattacaccaatgaggacatataacccttgtgaccccgccgacgaagagtacttcgagtttagccttttcatgtctcgcagagaatataagacgaccgctcggaggatgcaggctgggaagatcgccgccgctcgcgaaggcaaaagttttaatggtcgagctgcctatggatatcgcaccgtgaagtgcgccgacgggagaggggtcacattcgagcaagtggatgacgaggcgcctgtgttgtaccagataagagactggctgctgaacggggttgatggtgagccttgcggactcaccagaatcgcccggatgttgaacgatgcacatgtaccgactcgccagcatgcagcatggacatcagcttacctgcaccatttgatcacgaaccccgtatacgctggctacattaggatgggtgccaggaagaccgaaagggtagctacccccagcggcgtccaaaaaagacttgttaggcaagacgacccccagttgttcagaggacagcaccctccatacttctctgatgcagagtttgatgctatgagagccaagcttaggactcgatgcttccccatcagaggagatgccgagatgatcaatcctttttgtggcctcttgttctgtggtgagtgcggtagagctatgatggtgaatagggacgcggccagaaatcggacccgcattcggtgtaagactcctgggtgcgggacggtccagtccgtgttgcctccagttgaagctgcactgctggagactctgcgccagtgggttgacgatccagggtctttcgtgatcccagacgcacccccggaagagaaccccgtgctgctccagtccaccgccgacagcctgagggttgagaggggcaaggtggcccagcagattgaacgggcccaggacttgttggaacaaggcgtgtatacagtcgaacaatactcagagcgattcgcaaagcattcagctagactgcgcgagatagacgcctctcttgcggaccttcagcacagaattgacgcccgaccacagtattgcactctggatgaaatctcccccgcgatcagggctctgctggacgactacgatgcaatgtctgctctccagcgaaacggacttctcaaacagtgtatatcacggatcgtttatcacaagagtaaaagtactgcgacatccggaagcagcgcccctgcgaattttgtactcgacgtctttccgcgcctcaag

SEQ ID NO: 1257 - DNA, 1665 bp, unidentified
  source 1..1665: mol_type = unassigned DNA; note = Bacteriophage uvig_593889 from the Index of /pub/databases/metagenomics/genome_sets/gut_phage_database (ebi.ac.uk)
atgaaatccacaatctatgctagatacagcaccgataaacagcgcgagagctccattgatgatcagacaaggctgtgtaggcagcgcgctcagaccgagggcttcgaaatcactgcaatctattcagacgatggggttagtgggagcatgcccgtctctcggagatccggcggcgctaaactgatcgccgacgcgctggccgggcggttcgatgcgctgattgtggagtccctggatcggttgtctagggatcaagtggagcaggaatctataatccgaaggtttgagcatcatggcattatcatcattggagtttccgatggctatgatagcaggatggacggaaggaagatcatgagaggtgttcgaggccttattaatgagctgtacctggacgatctgcgacataaaacgcacagggggcaggagggacaggtggcccgcggcttcctcgctggtggaaaaagttacggttacaatatcatcaaaacagacaaaggatcccggccagagattaacgagcaggaggccaagcaagtgaagtggatttttacgcgctatgcagaaggttggagcgtacagaaaatagccgcggagttgaataggcagcgcattccgtctccccgcgggcggacatgggcagtatcaggaatctacggatctccagcaaagggctgcggcattcttaacaatgaaatgtacatcggacgatatgtgtggaacaggtcccagtgggtgaaggaccccgataccgggaaccgacaaagaatagacaggcctgagagtgaatggaagatcactgagatgcccgagctgagaatcattgacgacaacctgtggcaggctgtcagaaatagaatgggaaaacatggcaaaaagatcatagggaggaaggccacaactctctttggcggtctcatgacctgcccttattgcgggggatccattatcgccgtgagtagccgcctctacgggtgtaatacccggaaggatcgggggtcctcagtgtgtaaaggcatattgttctcccgagacgacgcagataagaacctccttgccattctccaagatgaaatgctgactgacgaagccattcacgaaatcgaaaatcaggtccacgcgatcctggcctctcgacagaaggaccaacgggaccagaaaaacgccgccgaaaacagactgaaggaactggatgctgaaatcaatcgcttggtcgacgcaatcgcctcaataggcctttctaatgctctgaaaagtagacttcaggccgccgagagcgagcgcgacgccttgcaggcccagcaatcagcacaaaaagctatcaacaagccaattcacaaaatggacatagtcggccgcatccgaaagaagattggagagatgaagaccgtacttacgagcgacacaaagcgggctcgaaagattatcgcggatatgcttggcgagatacggattactgagaaagcaggcaacgtcattgcagagtatgacaaagcaacccagaagttgttgttggtgtcttcaggggttagccttaacgtggttgctggtgctagataccagctcgaaaggcaaactaagattatagctacccggaaactcagccctgtgagtgtggacaaggatggtgaaaagatgaagatcatcagaagacacaaggacctg

SEQ ID NO: 1258 - DNA, 1377 bp, unidentified
  source 1..1377: mol_type = unassigned DNA; note = Bacteriophage uvig_55768 from the Index of /pub/databases/metagenomics/genome_sets/gut_phage_database (ebi.ac.uk)
atgggcaataagaaggttacgaaaatagacgccaccatcaaaattgcctccttcgatggtggcattgtgaaaaagcggagggtcgctgcctacgcccgggtctccactgccgctgaggaacaggagacctctctggccgcccagcgcgactactatgagcagtacataaaagagaacaaggagtgggaatttgtaggtatctactacgacgatggtatcagtgggctgtcttttcgcaatagagatgggttcaaccgcatgatcaaagacgcactggatggtaagatcgacctcatccttactaaaagtctctctaggttcgctcggaataccgtggatactctcaccacaatcagaaaattgaaagcggcaaatatcgaagtttactttgaaaaggagaacatttttaccctggactccaaaggagaattcctcattacaattatgagcagtatagctcaagaggagagcagatccattagtgaaaacgtgacctgggggacaaggaagcggttctcagacggaaagtaccatgtcccctacgactcctttctcggatatgaaaaaggtacagatggatcattgcagatcgtcgagaaggaagctgctattgtgcggcttatctacctgctgtatcttgcaggcaagagtccacataccatttgcgaactctttaatgccctcgagatccctaccaccaaacaacaaggaccatggaacaagacgcccgtggtgtctattctgacaaacgaaaagtacaagggggacgcgttgctccaaaagactattacaatcgactttttgaccggaaagcgaaaaattaacgagggcgaggtcactcagtattatgttagcaacgcacacgatcctatcgtatctgccgaagtttttgagatggtgcagaatgcacttaagtacaggagaggaacaagcttgaggttctcagggttctatccactgggcggacgcgtgttctgtagctcatgtggctctttcttcgggcataaaatactgcagcgaaggagaaatgggagattgacacgcaaggagatctggcgatgcaacagctattatgatgggaatgcgcatccccactcaattaaagatggccagatggtggatggcctggctgccgctttgcagactgcaattgaaagcaacatggacgtggtcgatctgtgttgggagacgatgaaagcaatccacccgagacttcagcgacctaagtacgagaaaatcattcgctccatctatgaggatgccaataggactcggaagaacatattgttcctgcactttctgatagacaaggtatccgtgagcgacggcctgcacctgaccttttgcttgaaggacggcactcagatcgaatataat

SEQ ID NO: 1259 - DNA, 1524 bp, unidentified
  source 1..1524: mol_type = unassigned DNA; note = Bacteriophage uvig_120053 from the Index of /pub/databases/metagenomics/genome_sets/gut_phage_database (ebi.ac.uk)
atggccaagacagtacgggttatcccagccagtcctaaaatctttagaagcgaggtgacggccgagccccggcggagaaggacagccgggtatgcacgcgtctctaccgatcatgaggagcaggcctcatcctatgaaatgcaaatggcccactacaagaactacattgaatcaagggcggactgggacttcgttggcatgtacagcgatgagggtatctctgggacaaacaccaagaaacgagacggattcaatcagatgatcgaggatgctttggctggtaagattgacctgatcattacaaaaagtgtgtctaggtttgcaaggaatactgtggactccctccaaaacgtgcggaagctgaaagaacacggggtggaaatctatttcgagaaggagaatatttggaccttcgattccaggggcgaattgctgataaccatcatgtcttccctcgcccaggaggaatcccgcagcatctcagagaacaccacctggggcaaaagaaaacagtttgctgagggcaaaactagcgtggggtacagcgccttccttggctacgacaaggactttaaaatcaacgaggaacaggcaaagatcgtcaggctgatctacaagctgttcgtcggcgggcggagtttttatgctattacaaaggaactcgaaaagcgctccataaagagtccttctggtaaagataagtggtacatcagtattgtgcgctccatcctcactaacgagaaataccgaggcgatgctcttatacagaaggagtacactgcagactttttggacaagacgcgaagaaagaataccggggaaattccccaatactatgtggaagagcaccatgaggcaatcatcccgccagatctttttgacttcgttcaggcagagattaaacacagggaacagaatggtaaacactcaggcgtgtctattttcgccaataagattaagtgcggatgctgcggaacttggtatggcgctaaagtgtggcacagcaccgacaagtatagacgggtaatctatcgatgtaacaagaaatatgctcacaaaggaaagccctgtggaactcgccatctcacggaagaagagattaagcagatattcgtaaaagcccttaatagcctcgtggaggtgaaggagaatgtcattgcggaattgagaagcctgattaatggggtatgtcagaccggggagctgactgaggaacacgatcgcacagagcaagaactgggcgtccttactgaaagactggagacactgatcagggagaacgcgagagtcgcccaggatcagacagcctacttgaagcaggagaacgagatacgagcccggtaccttgagaagcaagggcatctggctcgcctggatgagcagatagctgaacgagaatcaaaacggaaaaccctggaaaccatgattcaggtggtttgcggaatcaacggagagcaaacaggctttgatgaagacctgtggggcggtctccttgatcatatagtcgttaaagcagacggacag

SEQ ID NO: 1260 - DNA, 1950 bp, unidentified
  source 1..1950: mol_type = unassigned DNA; note = Bacteriophage uvig_441833 from the Index of /pub/databases/metagenomics/genome_sets/gut_phage_database (ebi.ac.uk)
atgactgattacattggcaactacaagaacagacctcgccgcgtggtgttctatggccgcgtgtctactgagcatgaagaacagctttctgccttggggaatcagatggagtggtacaccgacttggctcttcgcaatccgaactggaccgtcgtcgcccagtatatcgacgaaggaatcaccggcactcaaatgaagaaacggccaagttttatgagaatgatcgaacacgcaaaggaacatcgcttcgatcttattgtgacccgggagctttcaagatttgctagaaataccgttgacgccctcaacgccacacgagagctgaagcagtatggcgtggaagtgtactttgtcaacgatggcatttggaccatggatggggacggtgaggtaaggctgactatcatggccagtattgcccaggatgagagccgaaaaactagtgagagggtcaaggcaggccaaaagatgagccgggagaaaggggtcctctacggcagcggcaacattattggatatgaccgcgttgatggcacctacgtaattaatgaggaacaagctgccacagtgaggcgaattttcaacctttatgctgagggtcacggtgagacgactgtggctaaaatgctcatcgaggagaacaggaaagacggatgtgggggccttagctggacagcctccaaagtatctcgggttctgcgcaagcccacatacaaggggtacatgacttataacaagagtcacattgatgactttctgagccacaaccggatcaaccataatgaggaggattttgtgctggtgaaaggaaatttcgaaccgattgtgtccgaggaactctgggagacgtgtaatcagattcgatccaagcgggccgcctttgtgaaagggaaagacggacgcgcccataagttcggcgtgtcatttccacaaaataagtggacaaagattctcttttgcgattgcggcatgcggtttcagatagagggttatgacaagacagctaacggcgggaagaatatgagactgatctgtgcgagatctaaaatgttcaaaaagaaggacgctgcgagaacattgaacgggatcccctgtccagcaccatatgcctcagaatggaaactggagctcatggcccgcgaagtattccgaaccgtgtggaaagaaaatgctgaggacatcttgggactgctgaggacactggatgccaatctgaatacaactgggaccccaaatgacggaaaccagttggagaataagctgtcagcgctgaatgaagagctggatgaccttgtgagccagcgagcatccaggtcaatcaccatggatgacttcttgtcaaaaagtacggagataaacaatgaaatcatcaacgtcgaaggtttgctccagtctagcatccaggaacagagacccaaagcgagactggacatgcactccattgaggcagcactctccgatgacgcatccttccctgacggaaaaatcgagcctggtttcttggaccgctacaccaacaggatagtcaaaagtaacaacaggtacatatggatgctgcagctcatgaacgtgcagcagatcatgcccattcagtccgaacggcagccaatagccatggtgacttataagtccggcgttccctacgacatcgagcaagaacagatcggaaagcaagacaaggaaagcgctggtcctgattgcgcaaccatatgccgccctcaggattttttccttaatatgtctaggacgaagcggaaaaggaaacttgtagagtggctggagtcttgccaagagaaccaagtctctgttcttgatgaaaagatacccctgctgagctttgctgtcgacttcgtgacagcatatgagtaccagaaagccagaggaatcaagattcaccctgggctctggaaggatatgcgggttgatatcttcctggttaagaaggaaaat

SEQ ID NO: 1261 - DNA, 1818 bp, unidentified
  source 1..1818: mol_type = unassigned DNA; note = Bacteriophage uvig_210070 from the Index of /pub/databases/metagenomics/genome_sets/gut_phage_database (ebi.ac.uk)
atgaaaaggaagatcgctatctatgcccgcgtgtcaaccgagcatgaagctcagattagcgctcttgagaatcagattcagtactatgacgagatactgaagaagcaccccgagtgggaactttatgaacgctatattgacgaagggattaccgggacatctattggaaagcgcgatagctttcttcggatgatgtctgacgctaaagataagtgctttgatctgatcgtcacaagagaggtttcacggttcgcacggaatatcgttgacacactgcaacagactagaaccctgaaacaatacggagtggaggtctacttcacagacgacaacatctggacgatgaacgatgaagatggcgagctgaggctcagcatcatggcaactcttgcccagaatgaaagcaagaaaacgtcaatgagagtgaaggctggacagatgatttcttttaaaaacggggtattctatggaaacgggaacatcctcggctacgatagagagggtaaaaatctggtcatcaatcctacccaggccctgactgtgaagcggattttcgagctctatctgcaaggcaatggcatacgcaaaatccagttcataatggagcaggagaaaaggaagacttctttgggcaaaactaagtggtctgcatctaatattgcacgcatccttaaaaacccattttactgtggtcgaatcgagtaccggaagcagtatgttcccgactaccttactcaaaaaaagatcaacaaccacggagagatagagagagtgatcactaaggggacccacgacccaatcgtgagtgaagaggactttgataaagtccaggaaattttcaaaacgaaaaccaccaagaaggacaataagaaatatgggaaacccctggcgtacaacgtttgggtgagaaaactcaagtgcaagtgtggacatggcatgaaccgaaaaatcaactacgtcagcaagattacaggtgtgaaaacctattccttccaatgccacgaccagatccataccggaacaattaaaacaaggctcaaaaagggtcttagcatcaatggcatttgtgataataagagttttccagaatggaagttggaagtgcaagccgatttcatctttcgaaaactgctgctcaataagcaggagatctatgaaacagccattgagatgttggagagcagtgtggctgtagatacacacattcaggacaaaaagaagaagatcgaggactccattaagaacattgacaaactgaaggcccgaaacgacatgcttttggacatgtgtactgatggcgatatttccagagaaaccttcaagaagaagactgaactgaacaatcagaacatccatgagttggaggagaagattaaactcatcaggaagcagattgaagagaacgatgcccaggaagatctgaataagcgcatagtgttgctgtcagagttcatcaagatgaaggcattttccaagaaagagaaaataccggaaacgatcatcgagaagtacgtagagaagatcatcttctacaaagacgatttcgagtggtatcttaggcctaccataggcaatgtcgactttctgtccatagacgcgaagaatatgaaaaaagggacacacgaacttgaaaagacgatgtgtcatgtgccttcctcaaccggcagtgattgccggcgcagaaaaattgataagcggaaatacttttacttcacaactctcatagtcaccagggacgacgttaatgaatacatgaaatatcacgccgaatacaccaaggccaacaggtttaaggatattgtgtgcaaaatctacata

SEQ ID NO: 1262 - DNA, 1620 bp, unidentified
  source 1..1620: mol_type = unassigned DNA; note = Bacteriophage uvig_236827 from the Index of /pub/databases/metagenomics/genome_sets/gut_phage_database (ebi.ac.uk)
atggcaaccgccacacggcgagtggtacggactatgcctcagatgtttatcgacgtggccgacaaccagtctgagcgcctgcaggtagccgcatatgcccgagtttcaaccgagaaggaagagcaagaggactcattcgagaggcaggtggagcactataaacagctcatctactcaaagccggattggcaatttgtcgatgtgtacgcggaccctgggatcagcggaacccgggctgagaaacgaccagacttcctgagaatgatcgaggactgcagagctggaaaaatcaaaaaagtgctggtgaaaagtatatcccgctttgctcggaataccgtggatgcgctgcagtatattcgcgagcttaaggatctcgggataagtgtgtactttgagtccgaaaacatagataccctgacgccaggaggggaagtactcctgacaattctggcagcaatggccgagcaggagagcagaactattagcagcaacataaagtgggcttggcaacgcaagtttcaaaagggcgatattattctcaacactggactgatgctgggttacaggaagattgggaaagacgacgaggggcatgatgtctacgagattaacgaagaagaggccgaaatcgtccgcagaatctatcgcgagttcattgccgggtattccatcacccagatcgcaaaacggctccaggccgagggagtcaagacgaaactgggcagagagagctggcgccataacgtcattgaaagcatcctgacgaacgagaagtacaccggaaatgcattgcttggcaagacattcaagcctgacgtcttgacaaagtatcgacaaaagaacgacgggaagaaagctccaatctactacgtggaaggctcccatcccgcaatcattgagaaaggcctctttgatcttgcacagcaggaaatgcaaagacgccgggatgccaatgacaataaggttggagggggtcggtactcttctagataccccttcagtggcatgctcgtttgtggtatctgcggctctaagcttagaaggcaggtgaggacaatgggctctggaaagcgcaccgcctcctgggggtgctgcaataggatcaacaatggcagggccgtatgtgactcacaccacgtgaatgaggatgtgcttgaagccgcttacttgacagccatgcgaaggctggtggattctgccgaagaagtagtggaggcggtgagggacggcgccgagctggcgctcgaacccgaaaacaaggccgcaatggatcgcatcgatgaagagactattcagctccaggaggctgctctggcattgcacaaagccaaacagcggatggaaataggctccgttgagtatgctagtcgagtgaaagaatactcagaaagaatgaaggagctggaagctgaacggaatgaactccagggtaccgccgctaagtatgcggaggttaggctttggctggacacattcatcgagcaaactatgcagagcgacactttgaccactgttgacggtaccacaatgaaaatgcttgtcgatagaatacacgtcaggaatgacggcgttgtcgtggagttcaagtgtggagtggctattgaacaggagtatgtcaaa

SEQ ID NO: 1263 - DNA, 1575 bp, unidentified
  source 1..1575: mol_type = unassigned DNA; note = Bacteriophage uvig_393304 from the Index of /pub/databases/metagenomics/genome_sets/gut_phage_database (ebi.ac.uk)
atgaatagaaccgtaaccgctatcccagcgaccaaaaaactcggcaatcttacagcctctagtggggccccggcacgccggcgagtggctgcatacgcgagggtttcaactgaaatggaagagcagaccagctcttacgaagcccaaatcgactactacacaacctatatcagaagtaggaacgactggcaattcgccggaatgtattgcgatgaagggatctctggtacaagtatgaagcggcgggagggtttccagactatgatagatgacgctctggcaggcaagatcgacttgattctcacgaagagtgtatctcggtttgcaaggaacactgtagactccctcacaacagtcaggaagctcaaggacgcgggcgtggaggtgtacttccagaaagagaacatctacacttttgacgccaaaggcgaacttctgatcacaatcatgagctccctggcccaagaggaaagtcggagcatcagcgagaatgtcacctggggccatcgcaaaaggtttgctgatggaaaagtcatggtgccctataagtcactgttgggttacaagaaaggggcggacggcagtttggtgattgacgagacacaggcccctgctgtgcggctgatctatcaacttttcctggatggtatggcaattagcgaaattaagaccgagctcgccgccagaaaaatactgactccaagaggcaaggaagtttggtccacatcaacggtgcgaagcatactgtctaatgagaagtacaagggggacgcactgctccagaagactttcaccactgactttcttacgaagaagatgaaagtgaatgagggcgaagtaccacaatactatgtgacagggaatcatgagcccataattgagccacgcatctgggaccaagtgcagtatgaactggccactagacacggcaacatttcatccgccaaagtcggacttttttccacccggcttaagtgttcccagtgcggcgcctggtatggaagaaagacgtgggcaagcaacaccaagtataagtacacggtctggcagtgtaaccataagtacaccgatgagcacccctgttcctctgctaccgtgaaagacgaacagattaaagattcattcgttcaggccctgaaccagctcattgcatgccgacctcagcagtcccagttgcctcaggtgttgggggacatgtttgatacctctcgcctggaggaacaagcagcagcgtgccaggctaaaatcgtcgagctcaccgagcagattgaagctcttattgctgagaatcagcagagagctctggatcaagatgcctatcagaacaaatatacagagctcgatactgcataccgcaagacccttgctcgcaagacaagcctggaggccgatataaccgccaaaacagctaagcacgctgctgtgacaactgccctggatgacctcaccggagagcctgtgagcgaattccgaccctcacagtggtccgccctgatcgaccacgccattgttgatgaagatgggatcaggtttgtcttccgaactggagagcaggttaggatcgccttgaaagga

SEQ ID NO: 1264 - DNA, 1581 bp, unidentified
  source 1..1581: mol_type = unassigned DNA; note = Bacteriophage uvig_55768 from the Index of /pub/databases/metagenomics/genome_sets/gut_phage_database (ebi.ac.uk)
atggctagggaggtgagagttattccggccagcgtgcacaagttcacaacagtgccatttggatcaactgtccgcaaaaaggtggccgggtatgcacgcgtgtctacagatttggaagaacagctgacatcttacgaagcccaagtggattactacacaaagtatatccagaacaaccccgactgggatttcgtagaggtgtacactgatgagggtattagtgctacatccacaaagaggcgggatgggttcaacagaatgattcaagatgcgcttgacggcaaaatagacctgatcattacgaagagtgtgtcccgattcgctagaaataccgtggatacgcttaccacagtccggcagctcaaagaaaagggcatagaggtatacttcgagaaagaaaatatccataccctggacagtaagggcgagctgttgatcaccattatgtcaagcctcgcacaggaagaatcaagatcaatttccgaaaatgtgacatgggggcagcggaaaaggtttgcggatgggaaagtgagcatgccttacaaacagtttcttgggtacgacaaagggcccggaaagcacggaacccccgttattaatgaggagcaagccgaaatcgttcgcctgatctatcgcctgtttcttgagggaaaaactccatctggtattgctcgctatctgactgagcagcagataccaacccctggaggcaaaaccaagtggcaatctggcaccgtgcttagcatcctgactaacgagaaatataagggtgatgcaattctgcagaagtgtttcacggtggattttttgacaaagaaacagaaagtcaacgagggagaggtccctcagtactacgtagagaatagccatccagccatcattagccctgaggtttttgacatggtccaaactgaagttgagagaaggcgatccctgcccaccagacattccggcgttggcctgtttgcatctcggatcttttgtggcgactgtggtgccgccttcggggcgaaagtgtggcacagtaatgataagtatcggaaggtcatctatcagtgcaaccacaagtttaagggaaaggaaaaatgctccacccccaaactcgaggaagaacagatcaaggagctgttcgttaaggccgtgaacctcctgataaccgacgctaaagagattatcaggaattacgaagaggtcaggccgctcattttcgacaccgcctgcttcgacgccgagataactgaacttcaggaggaaatgacggtcactgccgaactgatccagaagtgtgtcgatgagaacgctcatactgctatcaatcaggacaagtataagaagaagtatgacgctctcgtgaagcggtttgagaaagcaaagaaacgactccaagaaatccacgatacaaaacgcgacagagaagcaagacggttgcagactgatcactttatgagggaacttaagaaacaggagtgcattatcacggagttcgacgaagtattgtggtatacaatggtagaccgaataaccgtgtacaacgagactgacatcaggttcaccttcaaggacggcaccgagtaccgcgtg

SEQ ID NO: 1265 - DNA, 1458 bp, unidentified
  source 1..1458: mol_type = unassigned DNA; note = Bacteriophage uvig_227545 from the Index of /pub/databases/metagenomics/genome_sets/gut_phage_database (ebi.ac.uk)
atgatcatagcagctgcctatgtcagagtatccactgatgaacagactgattacagcccaagtgctcagttggcagacatcagggagtatgcacgacagaacgggtatcatattccggatgagttcgtgtttatggacgaagggataagcggtaaaagggctgataaaagaccagcattccaatctatgattaggcaagctcggaagaagtcaaaccacattcaatacataatagttcataagttcgaccgatttgccaggaataaggaagatagcgtactgtataaagcgctgctcaagaaagatggcgtgaaagtgatctccgtgaaagaacccatcccacaggacgataagtttgccgttatctacgagtctatgcttgaggccatggcagagtactattcccttaatttggccgaagaggttaataagactatgatcaagaaggcccaggctggggagtggcaggccaccgccccatttggttacaagaacgaaaataagagtctgagcgtggtccccgaagaagccaaaatgatcaggtacattttcgagcagtacatcgctgggaccagcatgtttgctctgtctcggcagatgaatcaaatggggtataggacacaccgaggaaatgtcttcgagaacagaaccatacagtatattatcaacaaccctgtctacaagggctactcccggtggaccccgggacgcatgcatctgagagactatagcgacccagcctcaatcatctcaaagggcaactgggaacccattgtgtcagaggaaatttgggaagcagccgtgacccgattcaaggcagagaaacggacatattacaaacacaaacgccccgaaacagagggcattcattggctctcaagcatggtgaagtgtagtgcttgcggaaggagtctgattgttggaacgaagtacaagaacggtgcggtccagttccagtgcggcggatataatcatggccaatgtcatgattctcacgcaatttcctctaatagactgattcctgctctgctttctgaattggagaaaattgccgcgcaccccaacaccgagggctgtcgctatacgatccggcgcgagtttcctgcttctcacgaactggatgtgtacgtccctttgctcgccaaagcccagcagagactcaaaaaagccaaggacgcctacttgaacgacatcgacactctggaggagtaccggagtaataagactagcattgagaaagaaatcgccgagctcaaggagcacattgcagaaatcgaggaacaacagaaaatgcctttcgaccaggctgcgttttcaacaaaaatagcaagcgtgatcgagatcttgcgcgacgagtcccgctccatggaggacagacggaaggcgtttaaaagtgtgtgcgaaaaggtaatctacaataagcacacaaactccctggagcttttcctcatcgatggt

SEQ ID NO: 1266 - DNA, 1773 bp, unidentified
  source 1..1773: mol_type = unassigned DNA; note = Bacteriophage uvig_285944 from the Index of /pub/databases/metagenomics/genome_sets/gut_phage_database (ebi.ac.uk)
atgatcgacaactgcgccagggctgtgttctacgcgagggttagcacacaagaagaagagcagttgaaggctttgcctaaacaggtcgaagaatgcaaagatatcatagcttccaagggatggagactcatcgatggctatgtggacgaagggaaaagtggtacgaaaaaagacggccgcaaggcctacatcaagcttctggaagacatgcaggaggataagtttgatatcgtggtggtgaagagtcaggacaggttgcagaggaataccttcgattggtataagtttaccgatctgctgaataagaacaataagcggctctatctgtatatggacaacaagttttacgagcccagcgaagatgctctgatcactgggataaaagcgattctggccgaggaatatagcagagatctgagcaagaagcttaataatagcaacaagcgccggattgagaaagctaaagccggagaagagatctctgccatgggcaacggtcagacctacggctatagtatcgtgaatggaaagtgggtcgttgatgaatcacagagagaagtcgttcgcaggatgtacgaactgtacactgagctccactccgtgcgaaaagtccgggatgccttgaacaagcaggggtacaggaatcagcgcggcaatcttttcaccgacgagaacattggccgaattgtgaagaacgtaatgcacaaaggctgggtgatactcaataggcatcaccgcgattttgcctcaaaagaaattattgaaaaatccgaggaggagtgggtaatcgtcaagaatgaccacgaggctattgtcagtgaggagctgtgggacgcggtgaatgacgagattcaatctcatcgcaataagggtaactcaggtacaagaggaaagcgaggaggcacagacctccttagcggaaagatggtttgtagttgttgcgggcgggttctctggaagcacgcatcccaaggatcttacaagtcaaagcagggaaggaaatacacctacaaacgctacacacagtggtactgctctgggaaaatggggcggggcgagttggcttgtaccgatcccgccactatttcaggggtgaagctccagaagtatctggtagagatggccgatatgtttctggattatagcactgtggaatactcaaaaaacctcctgaaaagacggacgatttcctggcttgaggacctcaaggacaaactgacaaccccaaacgacaacggtaagatagagcaagatctgaaagcattggagggtaaacggggcaagcttattgacttgtatactgatgagcttatctccaaagaggaattcaaatcccgaagcgtggacttggatgcagaaatcgaaaagaaacgagccctcttggttcctgtcgaggaaaaccccgacatcaaagcaatcgaggatactattgctaacatcgatgccgagatagaggcattgttcgaggatgaggcaatggtagaggagaagaaggtccagttcatccaggagcatataaagaaggtctatgtgagcaagaactccgacgtgttcatcgtgctggacaacgtcgccggcgcatttctgttcatcgacaaagaggacaccagaatcgaagttgtaccggtggctgagtataattctgaagaactgtccgaggaagggattacagaaaatgactttgtgccctttgacagagaaagtatgccacaacaccatggagccgagtgtctgtgcccttctggcgggggctctgaaccagggagactgttc

SEQ ID NO: 1267 - DNA, 1662 bp, unidentified
  source 1..1662: mol_type = unassigned DNA; note = Bacteriophage uvig_224805 from the Index of /pub/databases/metagenomics/genome_sets/gut_phage_database (ebi.ac.uk)
atggctgagcgagtgtgctgctcataccagaacgtcctcagtatccagaatagggtgtgctgcctgtatagggtctctaccactaaacaggtggatcatgatgatcagaatcaagccgacattcccgtgcaaagaaaggcttgtcgcgaattcgcggagcgaatgggttggaccattgtatacgaggaacaggaaaacggcgtgagcgggttcaaggttagcgctaatgatcgggacaagatacaactcattaaagagtacgctgagcaggggaagttcgatatcctgcttgtctttatgttcgacagaatcggacggcgcgctgaggagacaccatttgtcgtcgaatggctgatcaatcacggcatccaagtctggtcagtaaacgagggggaacagagaattgacacccacgtggaccgactgaccaactatatccgcttctggcaggcagatggtgaatcccaaaaaacatccatgcggacaaaagccgcattgggtcagatggtggaagagggccggtttaggggcggatctgcaccatacgggtacgacttggttcccagcggcacttacaacaagagaaaacatgaggtgtttaagctggagataaacccggacgaggcaaaggtggttcggatgatgtttgacctgtgtgtaggctcaggatacggcagattcaaaattgccaacttcctctctgaaatgggaatcaagacacgcgatggcaaaaactggcacgaagcgacggtgggtcacattctgcataatatcatgtatacaggcgttctgagatccggatgcacccagtcagaagtgttccctgacctccagatcatttcccccgagaacttcgggctcgcacaaaagctgatggccgagagagcaaatgaatgtaacgccctgcgaaccatgcctaggaatacccgcgggcagagcttgcttagtggaaatgtgttttgcgggcattgtggagggaggcttaccctcactactaatggtaccactcggatcaatgccgcgggcgagaaagtcgggcgcaaacgaattcgctacgtctgttacaacaagacacgaaagaggtctaattgtgacggacagactggttatacaatgcacatccttgacaagatggtaacggatatactccaccaagtgtttgataggatgcggtccgtcgaggagaacgagatcatctcccggacgcacagaagcgcgatggtgtctctcaaaaagagactgagtgacgccaaggccgagagtgccaaagctaccaaggagtatgagagccttaaactggaggttatcaaagctgtgcagggcgaaagcgcctttcctatggacatactttcagagctggtgaataatgcaaggacacggatgttggacgccaacgctcagctgaccgaattgaatgaagaagtagaaaagtccaatcagcgagtggaggccattaaagccgattatcgcaggatcatggaatggagcgagatgttcgatggctctgatatgaacgttaagaagatgattgccggctacattattaagagagttgatgtgtatagtgactataggctgcatatagagttcaacatgtcctttgctcagtttgagcttggacttgagactgaagtggaatacgaagcacagaacatcgtctct

SEQ ID NO: 1268 - DNA, 1758 bp, unidentified
  source 1..1758: mol_type = unassigned DNA; note = Bacteriophage uvig_395773 from the Index of /pub/databases/metagenomics/genome_sets/gut_phage_database (ebi.ac.uk)
atgatcaactctgatttcgtaaagaaaagggttgtaatctatgcaagagtttctactgaacacgaagcccagatatccgctctggagaatcagatggattggtataaacccatacttgccgcccgccctgagtggaccctcgtgggacagtatgttgatgaggggatcactggcaccagcgctgccaagcgcccgcaattcatgaaaatgatagctgatgcgaagaaaaagcagtttgatatgatcattacgagggaggtctcccggtttgccagaaataccgtggacacccttcagtatacgaggcagcttaaaagtctcggcgtggaggtcttctttatcaatgacaacattaagactttcgacggcgacggagaactcaggttgactattatggcaacactggcccaagacgagagccgaaagacgtctgtgagagtgaaaagtggacaacagacttccatgaacaacggggtcatctacgggaacggtaatatcctgggatacaagcgagtggcgaaaattgtagacgataataagaaagaggtggagtggaccgtagaccccgaacaagcaaaaaccgtcaaaatgatctacgccatgtatttggacggcatgggtctgatgcagattaaagatgaactcgagagacgcggacgcaaaacttcagctgggttggatagatggtattgtaccgttatatcacatatcctgaagaacagtttctactgcgggatcatcacctatcataaggaatatacacccgactacctgacacagaaaaaagtgaaaaactacggcgagattgaattcaccaaggtccagggctcccatgaggctctcgtttcagtggcggactatgagcgggtccaaataatcatggagtcaaagagatctaagtgtaagaatctggatacaggcaggaaggccacaggaaagcgacctaggacaaccgtctggggtaagcttttgatttgtgagtgcgggcacaagttctccatgcgggtgtgggacaggaaggatagagtggccaatgcagcctaccagtgttatagtagcgttcacactggcagctacgaaagtcgcaagaagagaggcctttcactcgacgggatctgccagacccccatgattccggagtggcggttgcagatgatggcaaattacatttttcggaattacctgacggaaaaggacaaagtgctggcactggccaactccatgctcgaggctcacataggcgatactgagagccgcgaagatcacacagagacacttcggtgcaagcgcgcagaactggagaaactgaacaccaagcttgacaacttcatcgaaatgcgggctgagggcgagattagcaaagagctgtttaagaaaaagactagcgaactggaactgacaatgcagaaattggactctgagatcaaagaactcgagtctaagcaagaaccagagattcagattgaagattatgctgaaaaactcacagtcctgcagtacgcccttgaacagtacacaaattgggatgacaaagatgtgcctgaaagcgtgatcgaggcttttgtggtgaagatcgtggcatccaaggacggcttcgactggtacctgcgattttcaggtaaccctgatgacccattgcattgcaccgttggaggtaagaggaagtccacggcgaaaatttctgtcgccggggagtgtagcccagccatccacaagggagatactggatcctaccaggggaccgctccaattaaaagt

SEQ ID NO: 1269 - DNA, 1557 bp, unidentified
  source 1..1557: mol_type = unassigned DNA; note = Bacteriophage ivig_749 from the Index of /pub/databases/metagenomics/genome_sets/gut_phage_database (ebi.ac.uk)
atgatgcgagtcaagaaaaccgacacttccaaggacagggttgcagttatatggtgcagggtgagcaccaaggagcagttcaagaataattgctctattgatgtgcagaagaaggaatgtcgggaatacgctacccagcataacatacaggtaatcggcgaatatgagggcaagggtgaatcagcgaaaacaacaaatggcagacagttccaggagatgctgaaagtggttacgtccaacaagaaggtcaacacaattctggtgcgaacctacgatcggtttagtcgaaccggaggtgagggcattgtggtgaaagagatgttgaggaaacggggcgttgaccttatcgctgtcgcccaacccgtggaaaagaatacgcaaggagaatttctcgaggatctgtatctgatattgtcaaagttcgataattcccagagaagggacaagtgtctggccggaatcaaaggatgcatggagagaggggattggtgttgtagagttcccatggggtttagccgaaagaaagtggacaagcggcacattattacagtgaacgagactggaaagatccttcgggaggctttcctctggaaagcgaacgagaatattacctctgacgagatcatgagaagactgaataggaggggcgtgtttatcaagaaatctcagctcagcgagatgttccggaataagttttactgcgggatgatccgccattggtcactgggcgaagactggattcgcgggaatcaggagatcttgatcgagccggaaattttcgacaaagtcaacagaaaaatgaacgagggccacctcgctgggtacgagaaacaggagagcaacaatttcccccttaagggtcatgtcttctgcccagattgtcaccgcccttttactgcctatactgtcaaaaagaaaaaccgcgactattacaagtgcaacacgaaagggtgctgccacaatagagcagccgatgtgatgcaccaaaaatatatcaatctgttgtcagactataggattccaaagtgtctgtttccaatccttcagagggtcttcaccaaagtattctgggagaacaaccaacgcgaaaaggaagagataaagagtttgaacatccgactcacagactgtgaggtgaaagccaaggcagtgcgcctgcggtacgggttgggtgagattgataaggaaatctatgacgacacaatgaacgtcctggaagaacagaaagatgagatcgagcagaacttggaactgtacaagaataagctgtctaatctggatagatataccactaaagtgctcaagatgtcttgtaagcttggcgacctttggcagaagggaaacgcacgcgtatgccagaaacttcaaaatctcgtgtttcctcaaggcatcgaatgggatgataaaaatgatgactacaggaccttctccgagaacgaggtctttcgcttgttccggaaaataagcactacatacaagtacgaatccaagaaaaacactcctctgagcagtgaagtttccgccctggtagaaaacaacggaaatagttttctctgg

SEQ ID NO: 1270 - DNA, 1860 bp, unidentified
  source 1..1860: mol_type = unassigned DNA; note = Bacteriophage uvig_537547 from the Index of /pub/databases/metagenomics/genome_sets/gut_phage_database (ebi.ac.uk)
atggagaagaaggtgatcgccatcatacgcacatctactacccagcaagaaatcgactcccaacgcaaagaagtgctgagcatggccatcgctgatggctactctattgatgaaattgaagtggtgggagaaaagggagctagtgcgatcaagatggacgatgcatatcttaaaaatatgaacaaggtctacgagcttatcgaggtgcagcccattgaggcagtttatgcttgggcaattgatcggatcggccggaatcgaaccatgctgaataatttcagagagacactgtgcaagaagcatatccaactcatcataaaaaaccctgaactgaggctccttaaccccgacggaagcgagaacaatggtatcggactcgcttttgccctcttctctgagatggctgtccaggaaatggagcagaagaaagctaggttcaatagggccagaaagcggaacgatgagaaagggaagtataacggcgggtatgtagcctatgggtatatggtgcaggacggatacatcgtgatcaatgaggatgaggctaaggttgtgaggctgattttcacggaacttgcgagcggaaagtattcctgtgatggtctggcaagagagctgcaagcgcgcggcatcaagttcaaagggaagaagatgctgtttagtaacgtacggggcatccttaaaaataagatctattgcggggagcaggttactacttcaggtgcaatccggaatgtccctcagattgtatctaaagagttgtatgacaaggcaagggccgccatttcagcaaataatcccaccaaaacgaactccaccaccaacagattctgtttcggattgcggctcataaagtgcccatactgtgggtgccattttagcgtggccgccaagctttaccagtgccacaaccacaacagaaattattacgactccagacaggggtttgagaagtgtcctaatggaatatcaattggggcagccaacttggataggctgctctggtatgcagccgctaccgtgcattttgcttacctgaagcaactgactggccagcgagacgaggaaatcgatgacaaaatagaggtgcttaaccagaagatccagcacttgcagaatgaaattgacagtctgatagataagcgaaagcgaattaaccttgtctttatggatggtgacatgtccgagaaggagcgggacgaacgcttggccaaacttctgaaagacaatgagaaatacgccgtgcagatacgggagtacgaggaggaaatcggcaaactgacagcgctgaaggatggcgatattggcgacgagatcctgttcgaaaacttccataatctgatgatgctcgacaacctcgaactgcagtcaaaaattgtcaggcagcacatcaaaaacattgtgctcgaaaaagccgagtacgctccgtacaagcgcgttctcaaaatcaccatacaattttacaatcaccctgagctgcagtacctgtacctggctaagagtctgggagaattttacacaattacaaacggtgaattggatcgcgatatcaaaggcaacttggttccgattccaaacctcaaagagatgggcgacattctgggcgacgaggaagaaggcgtaagcggttatcgatttgctccagagattatcgccattaaagacagcatttctgaatccaaagaactgaccgacatagtgaagcagacgtacagcctcacagatatagatattgcgtttatctctaggacagcctcacgattcttcatcgggaaggccgacgcagtcttgcaacagagaatcgggcgcttggtcgccagaaaagtggttattccactcgacaatactactatccccttg

SEQ ID NO: 1271 - DNA, 1461 bp, unidentified
  source 1..1461: mol_type = unassigned DNA; note = Bacteriophage uvig_449731 from the Index of /pub/databases/metagenomics/genome_sets/gut_phage_database (ebi.ac.uk)
atgaagaaagagaccgaataccttcagataggcgccgcatacattcgggtctctacggacgatcaaacagagcttagccccgatgcccagttgcgggtgatcagagcttcagccaaagaagacggtttttttatccctgatgaattcgtgttcatcgaaaagcgcggggtgagtggcagacgggccgacaaccgggaggagttccaacggatgatcgccactgccaagagtcagactccagccccatttcgccgcctctacttgtggaagttctcccgattcgctaggaatcaggaggagagtactttctacaaaggcattctgcgcaaaaagtgtagcgttgacatcaaaagtgtatccgagcccatcgcagagggaatgtttgggagattgatagagacaattatcgagtggttcgacgaatactatagctttaacctgtccggagaagtgctcagagggatgacagagaaagcactccgagaaggctatcagagcactccttgcctggggtatcaggcagtcggtggcggcagaccctttatcatcaacgagtccgaatacacagtggctgagtacatccatcagtcttatcatagtggcgcggatatgcgagccattgcaagatccgccaatgatcggggctatcggaccaaacgaggtaatctgtttgataaacgagctattgaaggaatactcaaaaataagttctacgttgggatagtaacgtggaatggattcacatttcagggaccccacgagtgtaggacctccataaccgctatctttgaagacaatcagatcagaatgcagagggagtataaaccgcttaaccgcagggaaaccagctcctgcctccattgggcctcaggcttgctgaagtgtggctactgtggtgcctctctggggtacaataagagtaagaacaccggacgaaatccttctttcttccaatgctggaagtatgcaaaggggattcacggagaaagctgcagcatcactgtttctaaggctgagaagtctattctcaaaagcctggacatggcagttaacgatccacacattaagtacgagtatattaggcaatcagtgcctgattccgatgctagcatttcaaaacttgaatcagcgctttctcgcctcgcggtgaaggagtcacggattagggacgcctacgagaacggaatagatacactggaagaataccgagataacagggggcggatcaagaaagaacgcgaggagctgaacgcccagctgagagagttgaaagacggcccggctaggaacgtggaggacgacagaaaggcactgcaatctcgcatccagaacaccatcgacttgctgaagaatccagaagtctgctacgaagtcaagggtaatgctttgaggggcatcgtcaaaaaaattgtgtacgacaaggagcacgggaagctgaagtgttattattatatttccatc

SEQ ID NO: 1272 - DNA, 1770 bp, unidentified
  source 1..1770: mol_type = unassigned DNA; note = Bacteriophage uvig_287167 from the Index of /pub/databases/metagenomics/genome_sets/gut_phage_database (ebi.ac.uk)
atgcggaccatcaggaaaattgagagatcaattccaaatctcaagaagcgcaaaaaagtcgccgcgtacgctcgggtgtctgtggattcagagaggatgcaccacagcctgtctgcacaggttagctactacaactccctgatccaaaagaaccctgagtgggaatatgctggggtgtacgcagactatggcatttccgggacacgcatcaaaaaaagacaagagttcttgaggatgctcgaggacgcagaagcaggtaagattgatattatcttgaccaaaagtatccaacgatttgccaggaataccgtagatctgcttcggaccgtgagacatctcaaagaacttgggatagaggtgtggttcgaaaaagaaaacattcataccatgagcggcgacggagagctcatgatgacaatcctggcttcatttgcacaggaagagagccggtccatttctgagaacgtgagatggaggatcaaaaagcaatttgagcagggtaatccaaacgggcggtttcgcgtttatggctatagatgggagggagacaagcttgtggtggtcccggaagaagccgcagtggttcgacggatattccagaactttctggatggtaagagtcgacttgaaactgagcgagagtttgctgctgagggaattacgacccggaacggttgtaggtggatggattcaaatatcaaagtggtccttacgaatattacttacacaggcaacatgctcctccagaaggaatatgtgacggatcccatactcaaaaaaagaaagaagaaccgaggagagctgccacagtactacgtggagaatacccacgagcctatcatagacaaaaagacgtttgattacgtgcagcaggaaatggccagacggaaggagcttggagccctggccaacaagagtctgaataccacatgttttactggaaaaatcaagtgtggcatctgtggcaggagctatatgcacaatctccgcaccgacaggggcttcgaggaattctgggactgcgggtcccataagctgaagggccgcaattgcggagcgaagggcagtatcccccacgctgttctgattaaggagtgcacagaagctctgggattggacaactttgacgagcaggccttcctggatcaggtggagaagatcgtcgtaccagagtaccatgtaatggttttctgcatgaagaatggccagaagttgatacgacattgggtctctaccgccaagaaagactgttggactgacgagtacaaagagagacagagagattggatgcgcaattacatggcttccggcaaaggcacaagattctccccttttaccaccagggtgagatgcgcggtatgtgggcacgcgttccgacgatgcaaacagaagaagaaacagggcattagcgttcattggaggtgcgggcagggagggaagtgctctagcctctctgtccgggaagaagagctgatgaaaatcgccgccgatgccatggggttggaagctttcgacggagatcgattccgggaggagatcgactttatggaggccggtgccgaggaacgcattacaatccacttcaaggatgggagaatacaaactgtcccctggacaaagcccaaaaaacaaggtactaggcacactgaaacatataaggaatatatgtcccagctgggcaagaaacggtggactcctgaacgcaagcagcgcatgtcagaacaaatgaaggcactcaggaaagaacgcggtgagaactggcagaggcag

SEQ ID NO: 1273 - DNA, 1632 bp, unidentified
  source 1..1632: mol_type = unassigned DNA; note = Bacteriophage uvig_189213 from the Index of /pub/databases/metagenomics/genome_sets/gut_phage_database (ebi.ac.uk)
atggaaacagccgtaaccgcaccccgccagaagacagtgacaaaaatagaggccaatcccgcccttgcaagtcgaaagaactctaaccggcctcttaatgtggcagcatactgtcgggtgtctaccgacgctgaagaccagattaacagctatagggcccaggtgagctactataccgagcacatcaaccaaaatcctaagtggaggtttgtcaatgtatacgcggatgaaggcattaccggtactatggtgaaaaaaagagatggcttcctgaagatgataagagattgcgagaaaggcaagattgacatgattttgactaagagtgtgagccgatttgcaagaaacatcgtagattctataagctacgttagaaagttgaaggctatgggaatcgggatctattttgaggagcagaatatcgactctctcaaagaagactccgaaacatatattgggatatactctgtgatggcccaatctgaaagcgagaatattagcgcaaatatatcctggggcatacgcaaacggatgcagaatgggacttatgcatgtagattcaatatgttgggatatcgcaaggaaaaaggggaaacagaaccacgcatcattcctgaagaagccgaagtggtcaggaacatttttaaaatgtacgatgagggtcactcactcgatcaaattaaggcctacctggagtccaaaagtattaagacccccaccggtaaaccggtttggtccaaggaaaacattcggaagatgctcacgaacgagaaatacgtgggagatgttatctaccagaagacctaccgcactgactgtatttcaaaacacacgaaaatcaacaggggcgagagaactaagtacctggtctcaaataaccatccagccattgtggacagagatctcttcaacgcggtgcaggccgagttggtgagacggtccagcaagcgaaaaacgtcagacaagactctcacttccttgggcaagtattctggaaagtatgctctgtctgagctgctgatttgcgctgaatgcgggtcaccctacaagcggaagacctggacccagggagacgagaaacgcatctactggcggtgtctgagcaggatcgagcatggcaagaagtactgtccatactcaaagggattggaggaaaacaagctgcatagcgctatttgccgcgctctgaaggctgccatgaatgaaaatgccgaggcgctggctctcatcaaggccaaccttgcctatgccgtcacaggggacgaggctaatctggatcttggggccatcgagaaacgaatcaaagaggctaccaaagagatggagaactatatggcatcctaccgaaacactggtggcgacaaaactaggtatctggaatgcatccagaaggtggcagacgaaatcaaaagtctgagggaccaagaagccacagctaaggcgaaactcgagaaaagcacagaggtcaattccgaaatcaaacgcctttgtgattggttggacagtcacgatacatcctttagtgagtatgacgatatggttataaggcgggtcgtcgagtgcatcaaggtgttcaaagatggaaccatcaaggttatcaccaagttcggcacggaggcgaccgagacagta

SEQ ID NO: 1274 - DNA, 1488 bp, unidentified
  source 1..1488: mol_type = unassigned DNA; note = Bacteriophage uvig_437676 from the Index of /pub/databases/metagenomics/genome_sets/gut_phage_database (ebi.ac.uk)
atgttctactatatcatgtatttgaggaaatcaagagcagatgacccaaacgaatctatcgatgaagtcctcgcaaagcatgagcgaatactccagaactacgcactgctgaattataaggacaaaataccggaggagaatatctaccgggaggtcgtgtctggcgaaactattgacgaccgcccagagataaaccacgtgtttgaacggatgcaggataaggaatgtaggggcgttctggtggtggaccctcagagattgtcacggggagatctgatcgattgcggcaccattcttagactgtttaagtatacaaacactctgattgtaactcctaggaaatcctttgaccttagcgacaagtacgacgagaagagcatcaaaaacgagcttatgcaagggtccgagtatttggattacattaaagagataatggcgcgaggtcgcgaacagagcgttctgctcgagaataattacatctggccagtacccccatacggatacaagaaagttgtggagggaaaacatcaaaaacttgttgtggatcccattgaaggaccttatgtgacctatgccttcaagcggagcgccgagggggtgggggcccgccgaattggtaatgagatcgaagctatgggcgctcggcccagaaaagccgagcatttcctgcctgactacattaaccggatcctccagaataaggtgtatcttggacacctgtgctggcaaaaaacaaagactattaagagggtggacgggaagaacttggtctccaaaaggatctgcaatcaggagtatctcgtgatagaggacacacacgaggctctcattgacgaagagacgttcaatctcgtgcaggaaaagcacagggctcccagagtcaagagttctaaagtcctgcagaacccactggccggtcttcttaagtgtaaaaagtgtggtagctctgtcgaaaggaagacaattaaaggcaagcgaccgcggtacttctgcagacgcactcaatactgcaaaaatagatcagtgtacatggatgccgtcatcaacgccgtgattaagggccttaaggaaaagctggaggactttgagattaaagtaacgagtaacgatgggtctgagatggaccagaaggttaaaatgataacatcaatcgatcttaaactggaaagtcttgaggaaaagcagaatcgcctgtatgattttctggaaaatggcatctacaccaaagatgtgttcatgaatcgcaacgagttgatcgagaaggagaaaaagaccctcatcaacgaaaaaaagaacgttgagcagataatctccagctttaagcccaccaaggaaaagatcgcctcccttcacaaagcaatcgacatgctgagcgatccttcattgcccgcggaaaacgtcaatatcttcctgaaaagtttcatcaaggtaatgtattacgaaaaggggtgtacctccgaagacattcagctggagattcttctcaaa

SEQ ID NO: 1275 - DNA, 1527 bp, unidentified
  source 1..1527: mol_type = unassigned DNA; note = Bacteriophage uvig_535546 from the Index of /pub/databases/metagenomics/genome_sets/gut_phage_database (ebi.ac.uk)
atggacaaaactatcgccctgtatatgagattgtcagatgaagacgacaatctggcagcccacgaagaatctaattctatttcccaccagcgaaaattgatgctcgaccacattcagaaactcccggaactcaaagactgcaatattatggagttctccgacgacggctattctggtgccgatttcagcaggccaaactttgtcaaaatgatggatctggttaaagcaggaaagattcaagtgatcgttaccaaggattatagcaggcttgggcgggattatctcgaggtgggcaattacatggagtgtatctttcccgtacttcaagtaaggtacatctctgtcaatgacaattatgattcagccaatagcttcggcagtacagggggcatgtccgtggctcttaagaacttggtgaacgccctgtactgcaaggatgcatcaaagaaggtacgagctgcgaaagctgtgctcgctaagcaagggaaatacatagccgccttcgctccctttgggtatcagaagtctgaagatgataagcacatgctggtgcctgatcctgtcactgctccagtggtgcagctcatctttgagttggcgataaagggaatgaagtataccgaaatcgcaaattacctgaacaacaatggttatgactcaatatttgagtactatcagaaaatcggagttaagagatgttacgagcgcgacatcggcgaacatatgtggagcgcgagcacagtcatggagattctgtacaatgaggtctacattgggagtgtgatcaacaacaagactgctgacaatatcgatacaggccatcaggtggtgcagagggataaagaagattggattattgtggaaaactgccatgaaccccttgtaagtgttgaagatttcaagcttgcacataaaatgattgcacggagagaggttacgaagcggaagccaaacggaaagtggaggaaaagctacattaggtgtggcatttgcggcaaaggcttgtataagtacggtaacaagagttcctaccggtgccacaacggacacgttagccggattagaggtgaggagcttgaagccaccctgttggatatcgcccgcaacatggccctggcgcagttgcaggagttcgagctgaaaactgatgggggaaactgtcctgacaatctggagcgcgagatagaatccctgaagaaatccaaggcccactacgccaaactgaagtttgagatctacgacgactatacaaaaacaaatattacccgcgaccaaatggctaagaaaactgccgaggtgaagcagaaaatcgctgagatcgaatccctcataaccgagaagcaggagaccctggacatgcagaaagatctcttcctggacgcaaagcaggagcaattgacgaaactttctaagctggacgaattcgacgaagaggtcatccgctatctcatcgattacgtgctggtctacgacaacgagcatatcgaaattagaatatcatttcgaatgaagatcgacaaaagactg

SEQ ID NO: 1276 - DNA, 1623 bp, unidentified
  source 1..1623: mol_type = unassigned DNA; note = Bacteriophage uvig_102394 from the Index of /pub/databases/metagenomics/genome_sets/gut_phage_database (ebi.ac.uk)
atgacagacgaaaagccgcgcgtaattataattcccccaaaacctgaattgcagcagaccgccgcagtgacaaagcagctgcgggtagccgcgtactgtagagtgagtaccaaggaggaggagcaggcatccagctacgaagcacagtgcgagtattataccgataaaattatgtccaataaggaatggaccatggcgggcatttttgcagatgaggggataactgggacctcaaccaaaaagcgaacagagttcttgcgcatgatcaggcagtgtaagcagaaaaagattgacctcatcctgaccaagagtatccagcgcttcgctcgcaatacactggattgtatcaattatacgcgcattttgcgacaactgggcattggtgtgctctttgaaaaggaaaacattaattctctccccgccgactcagagttcatgatcaccatgtacggagcgatggcacaatctgagtctgagtccatttccggaaatatccggaggggccggcagatgcacgccaaggtcggtacactgaagattccctgccactggctgtacggttacaagaaagatgccggcggtaagttttgtatcatccctgagcaggctgaggtggtcagagagatatacgaaagatataagaatggagcctcactgaggaacctgaaggactggctcgaggaaaaccagatcaagactgttctgggcacagccgactggtcaataagcgtgatcaagggaattctgacgaacgagaaatactgcggggacgtccttcttcaaaagacattctgcaccgatgtcatctcaaagaagatcgttaagaatgtgggccaaatggcacagtactacatgcctgatcatcatgaggccatcgttagcagagagcaatataacgctgtgaaggccgaaatggcgagaagatccgccttgcgcagtcccagcaaagaagccgtgactggccggtcttgctatactagtaagtacgccctctctgaccggctgttttgtggggaatgcggcactctgtatcgacgaaaaacgagaaatgttaaagggaacatctaccatgagtggaggtgcataagcaggcttgaatatgggaaaaaatattgtcacgagagccctactctgcgcgagattccactccaaaacgcaatcctggctgcgatcaactctgccatgtctgtaaagaccgccctcgtggaccagatcaaaaacgtcgtgtcccttgagttgctgccagtgcaaggccaaacaatgagcctcgttgacatcgaacgcaggctggctcagttggacgagcagtttcagaggcttctcgctgaagcaattgatgcagaaaataaggaagcctgcaacgctcagttcgccgaaattttggccgaacagactgccttgaaaaaacagaaagagacaatcctgcagggatccgcagatgctgaccgggtgagcacccggatgaaacaggctgagcaggctatcgagaacactgctcagaccataacggagtggaatgaaaacgctgtccgacagatcgtggagagggtcacagtgctttccgccgatgagatattggtaagaattaaaagtggagcagagattaaacaacgcctggaacgg

SEQ ID NO: 1277 - DNA, 1461 bp, unidentified
  source 1..1461: mol_type = unassigned DNA; note = Bacteriophage uvig_318842 from the Index of /pub/databases/metagenomics/genome_sets/gut_phage_database (ebi.ac.uk)
atgaatgccgccctttatatccgcgtctccactgatgaccagcttgaattttctcccgatgcgcagaagagagccatgattgagtatgcaaaacggaacgatatgctggtgtctgatgaacatatctacatagatgagggaatcagtggcaaacgggcaaaaaatcggccagcattccagagaatgattgcgaccgccaagagtaaacagcggccctttgatgtcatcctggtccacaagtttgacagatttgcaaggtcacgcgaagacagcgttgtgtataagagtctccttaaaagggagtgtaacgttaaagtagtcagcatcaccgaacagctcgaagacgacaagtttagcgtgatcctggaagctatgctcgaagcaatggccgaatattactctctcaacctcagcgacgaagtgatgaagggtatgaccgagaaagcacgccgggggcagctgcaatacgcctccccttttggttacaatataaagaatgggaacgtgacgattatagagcacgaggcaaatattgtaaagctgatattcgacaagtttgtaaacgaaaagatgacatacgttgaaatttgtcattaccttaacgagcacgggctgaggaatcgcaagggtaacatgttccagaccaggttcatgaagtacgtgctcgagaacccaatctactgtggcatggttagatggaattacagcacacagaagggaggcactcgacggttgaagaaagaatccgagtggattatcactaacgggaatcatgaagccattgtcgacaaagagattttcaacaaggcgcagaagcagatcagccacatcaaaagtttgtactcaacccctaacattgataggaaccaatatggacattggctgggaggactgctgcgctgctcaacctgcggcggcactcttacaatttcaaacgctaaactgaaattcggtggctattacgtgtgcaatagaaatcgaaaagggtcttgccccacagctaatagagttaggatagacatcatacaagaggagatcatcaatgctctgaagcacgatctgtatatgttggagaaagtgccgggcacgcctatttccattgagagcaaaaagatcaacgactctgagatcactcttctggaggcccaactcgaaaaggtgaaacgaaaatacgccattgccaaaaatgcttacctggctgaaatcgattccctcgaagagtataaagctaacaagaacgccattcaggaggaagagaacaatctccttgacaagctgaataagatctctaagccacagaaagacaacagcaagtatattaaaaaaaagattaaggagtccttgaacctcatcgacgattcagagacagagttgaaagtgaagaatgaaatgctgaagtccttcatcaaggagatagtggtcaataaggaggctgataccatcgatatccactatttcagt

SEQ ID NO: 1278 - DNA, 1374 bp, unidentified
  source 1..1374: mol_type = unassigned DNA; note = Bacteriophage uvig_284065 from the Index of /pub/databases/metagenomics/genome_sets/gut_phage_database (ebi.ac.uk)
atggagaataagactaacgtggaggaagtggccctctatgttagagtgtctacagatgaacaggccatcaatggggactctttgcggactcagagagacgaattgacaaagtatgccctggagaacggctttcacgtttttggcatctacgaggacgacggtttcagcgcaaccaatctggatcgaccggcattgcaacgccttctgaaggatgtcgagcaaaacaagattaacagaatccttatcacaaaactcgaccgactcagccggggtgtgagaaactactacaaagtactggatgtgttggatgagcacggagtgttttggcagaccattttcgaaaaatatgattcaagcaccgccaatggtcgcttgcatattaatattatgctgtccgtcgccgagaatgaatctgctcagacttctgagaggatcaagagtgtgtttaagacaaaactgaaaaataaggaaatcatcgcagggaaaatccccatagggctcaaaaaaaaggacaagaaactgataatcgacgaggaaaaaaaacaggtcgtcctcgacgtcttcgatgagtataagaagactacgtccgcctatcagacctttcagaacatcgatcttaagtatccagaactcaatctgaactatatgaaagtataccgcatgctgaataacaagctttacaccggcatcaaagtgactgagcgaggaaatatagaggatttctgccctgctataatcgacagcgagacatttttcaacactcagaagatgcttgagaaaaacgctaggaaaccttctagcgagaatagcggcggatatatcttccaaggaatgctcaaatgcgcggaatgtgggtataccctgggcggcaagttttacagcaaaaatccagagagttcacggtactactacatttgcaagaagcatctgctctcccacatttgtaactgttccaccaacttcaatgaacagaaaatcgagcagaagctgctgcaagagcttaagattcaactgaagaactacatcctcagttacgagtacaaacagaactctatcaaaaagatagataaaagtaaggaaatatcttccctggaaaacaagctcacgaagttgaaggacctgtatattagggacctgatacgcattgaggattacgaaaaggactacaagcaatgcgtttcccagcttgaatcactgtatcaggagcagaacaaaattgagacaaatcccatcgacaacaacttggaagctctgaagtcattcctcaagcaggacttcagtagcatctacaataagatttcaaggcttgaaaagcggaaaatctggctgtccattattgattatattaccctggacaaggattacaatatgaaa

SEQ ID NO: 1279 - DNA, 1737 bp, unidentified
  source 1..1737: mol_type = unassigned DNA; note = Bacteriophage uvig_495062 from the Index of /pub/databases/metagenomics/genome_sets/gut_phage_database (ebi.ac.uk)
atgataaacatcgacgaaaaactctccaaaaaaaaggcagctgggtatatccgagttagcaccgtttaccaggtggacaaagatagtctgcctatgcagcgcgaggatctgactaactatatcaagtatgcgctcggcattgacgagtacgaaattttcgaagacgctggctatagcgctaaaaacaccgaccggccctctttccaaaggatgatgtcccggctcaggagcggagagttttctcatctggtagtgtggaaaatcgacagaatctctcgcaacctgattgacttcacaactatgtacgaggaactgaaacggctcggtgtgactttcgtgtctaagaacgagcaatttgacacaagctctgccatgggcgaagcaatgctgaaaatcatcctcgtctttgctgagctcgaacgcaaaatgacaagcgagcgcgtctctgcagttatggtgtccagggctaacgaagggaagtataacggagggagaatcccaataggatacgattatgacaagagtacaaagaccatatcagtcaatgacgccgaagcaaaaatcgttaatttgatctacgataagtacgacgagatgcagagcatcattcaggtagtgaagtaccttaattcccagggcgtgaagactaaacgaggttatgatttcagtgccactacagtgcataaagttctgactaataagttttatgtcggggacttggtttataacaagcacgatgagaggaataccgggaactcttcaactaagagtgtgagggacgaatccgagtggattgtcatcgaagatcatcacccagctatcattgagaggtggcggcaagaaagaacaattgtggcgcttagcagccgaaactttgccaacgtctcatataagacctaccagagaaggaatacacacatttttgctgggctcattcagtgtggcatgtgcggaaaaggcatgactgccagcgtagatagggagcgatcagatggctacagaccctctatctacatttgcgattcccggcgcaagacaaaactgtgtagtaacaagtacgtgtcagatataacgctgggacctttcatctttaacctgatctctaatattgtcaaggcatacaataatgtgggtaagagtacctccgtggagatgctcgagaagaagctcctcagaggggatacgtttgataatgtctacagtatcgagtccgagggagttcggcaactgctggattccattcggaatgccagcgacgattctaccgagaacatcatacttagcaaaagcacgtccgccttctctgcctcaaccgaggaaaaagagctcctgcgatccgaaaagaaacgccacgaggccgcactgtctcgcttgcagcaacttttcctctatggcgaagatgccattacacagaccgattacttggtacagaagaccaatattgaaaagtcaatagacataattgacaagcggcttaatgagattgacagtagcatagccaacaattttgtgatgacggattccgactttttctctaaagcctcaatgttcatcatccagtcaaacttggcccaggcgagaagtgtagacttcgacaagcttatcagaaccgtggacaaacagaccctgaagatgttcatcaataaggtcgtgcagaaagtggtcgtgctggacggtaagattgctcagattagctttcaaaacggcatctccttgaagttcctgtacgcagctaaa

SEQ ID NO: 1280 - DNA, 1875 bp, unidentified
  source 1..1875: mol_type = unassigned DNA; note = Bacteriophage uvig_151327 from the Index of /pub/databases/metagenomics/genome_sets/gut_phage_database (ebi.ac.uk)
atggaatataatgaacaaaataatacggagaaaaagaacgttgcagggatctacatccgggttagtacagaagatcaggtgcgggaaggctttagcctgggcgaacagaaggaaaagctcgaggccctttgcaagtacaaaggatacgaaatctacaaggtgtacaaagacgctggcatttcagccaaggacatgacccaccggcctcagttccagcagatgattgaggatatgaagtcagggaaaatcaattacatcgtcgcatataaacttgacagagtgacgaggagcgtcagggacctcgaaatcttgatcagcactcttgagcagtatcactgctacttgatctgtgatcgggatgacgtcaacacatctactgctaatggacgcttttttatccgcatgctgactgtgctgtctcaactcgagatcgaaatagtttctgaaagaactaagtttggactgggtggcgccattaaagctggacatattccaggcgtctgccccttcgggtattatcgagacaccgacaagaccataaagatcgacaactccacaaaggatatcgtgatacgcatataccagatgtacctggaaggcaaaagttaccaacagattgccaacatcttgaacgacgagaaagtgccatcccccgtcaagactaagtggggagatagcacaatcgagaaaattattaataaccgcgtgtacatgggtgactttgagcgatataagaaagataagacacgagaaagcgagatctacatgaatgtggttcctccgattatatccagagccatgtgggaggacacccagaatcagaaaggaaagaaccagagggcatattctcgccacagaatctacattttctttcaaaaactgatctgtcctaagtgcggtaggattatgaccggcaagggagcgggcggaaaaaagtctaagtatatgtactatacgtgtgagaaatgtaagatctacttcaacgaagatgacgtggaggggactcttattaaccacatactcgacttcatcgaatatgactatcatgtgaataagtttttttaccccctcctggcggagaaaaaggacgacgagtcaaaagagatagagaaggagatatctaaactgaccgcccagaaggacaggcttaaaaaagcttacatgaatgggattgtagaaatggatgatttcgccgaggattttaaggtcattgacgagcggctgtccattctcgaaaccaaaagaatcaacagcatagatttgcaagaggaatgctacaaccctgcccatcttattgcccagagggatatcgagaaggaaaccttgatcgaagggcagatgtataaagatgtgatcctgaacctgtggaccatgaaatccaaagaagagaagcaggcgttcatcagtaagtttatcgagagtgtggcacttaacaagaatgaagatggcagcattaacatcgaaaaagtcaacctgagatcctctttcatcgagcaagtagacaaactgtacaagaaaggtgtgattgatataccctcaacaatggagacagacggcaatttgcagaatgtacgaacttccattaacctgagcgccaagcaggtgaacgaatacctggatgagatcaagaaagaaatgaatattaattatctcgaccttggcgaatatcacttcaatggggaggagtttgatgagaccgagggtctgaagaacgagattgctacctataaggacaaagttgtgtcattcaagattaagaagtatgagaaaccaatccggttcttcgctatcaaggagatgaagaatttcctcgcaaaaccggatgggaacgtccatttgtccgttgtgactcacgtaattcccccagagagtaca

SEQ ID NO: 1281 - DNA, 1719 bp, unidentified
  source 1..1719: mol_type = unassigned DNA; note = Bacteriophage uvig_61202 from the Index of /pub/databases/metagenomics/genome_sets/gut_phage_database (ebi.ac.uk)
atgaataagaatcaggagcggcccaaaaaggcagccttgtatgtccgagtgtccaccaattaccagatagacaaggacagccttcctatgcaaagacaggacctggttaattatgccaagctcatgttcggcatagacgactacgtaattttcgaagatgccggatattctggcaagaacactgaccggcctgagtttcaaaacatgatgaagcgaatacgcaacggggagttcacacacttgctctgttggaagattgataggatatctcgaaatctgttggatttcgccgcaatgtaccaggaacttaaagacctcaatgtgacgttcgtgagtaaaaatgagcaatttgacaccagcacggctattggagaagctatgctgaagatcattctgatttttgcagaactcgaaaggaatatgaccagtgagagagtcacagccacaatgcttagcagagctcagaacggcctgtggaacgggggaaaagtaccttacggctactcctacgataaggaacagaaagagttttctgttaatcccgaagaggccgagatcgttaagaagatcttcgatgcgtatagtaaccaccattcaatcgtgaccgtcgctagggcactgaacgaggatgggtattcatctagggccggtaatgactggtccccggtttctattttcatcattcttacaaaccctttttacaagggcacctatcgctacaaccattacaagatccctggcctcaaagtcgaaaaggatccaagcgagtggatcgaggtgccagatcaccatccccgcatcattagcgacgagaaatttgagtacgtgaattccattttgaaggaaaactctaggagcaagagactgcctgggaaacagcacgcaacgaacaatacccacatttttgggggccttctgtattgctccagctgcggttccatctatgtgtcctctcccgcccggatgcagtcctgtggctaccgcccatcaaagtacgcctgccccaacctgcggaaacgcaaggcttgtacttcaaagagtatctccgaccccgtgataggagaattcctcatgaactatgtcctgaacatgatgcgggcgaaagatagcttctcttccatacacaactcagatgacctggagcatgccttgttgaggggtagcacctttgacagcgtggaccatattgggaaagatggagtggaatcttacttttacatgctgactactgtcccaatcaatggaaagcgaatgcgcaagccaaaaaaagtggttaccattgatccagagctgaaaaggcttagagctgagaaacgaaaaactgaaagagctctggagagactcatgaacttgtacctgtatagtgaagacagcatctccaagaaagattataccatccggaaaagtgccctcgaagattaccttaaagagataacagagaaccttaatatgattgatcggtcaaataatcacgagatcattagcgatgagaactttatcaaaagggcaagttacttcatcctcaacaaggaactggctgacaagaattacatctattttaagaaactggcgatggacatggatccggagatcctgaagaacttctttcatgagatcatcgactcagtagtcatggagcagaacagagtgatggaaattgtgttccgcaatggcctgacacacactttctattataaggacacagaaaagcccgaagca

SEQ ID NO: 1282 - DNA, 1365 bp, unidentified
  source 1..1365: mol_type = unassigned DNA; note = Bacteriophage uvig_393944 from the Index of /pub/databases/metagenomics/genome_sets/gut_phage_database (ebi.ac.uk)
atggccaatgagatcaaacaggtggcactttatattcgcgtgagcactgatcagcaggcaaaacacggcgacagccttgatgagcagcagcacactctcaacgagtatgttcggcagcagggcaatatgagagtcttcaaaacgtacatcgacgacggtataagtgggcagaagctgtacagagatgagtttcaaaaactgctcgacgacgtaaaaaaagggaaaatcgacaccattttgtttaccaaactggacaggtggtttcgaaatctccggcattacctcaatattcaagagatactggataaaaacaacgtcacctggctggccgtaacacagccgtttttcaatacagagacggctatgggcaggtcattcgtgaaccagtctatgggattcgctgaattggaggcccagatgacctctgagagaattcgggcggtgttcgacaataagatacggaagggggaagtcgtttctggcaaggtgcctctgggctatgatatcaaggacaaacatttggtccccaacgagaaagctgagatcgtgaaggagattttccagtactacctcgagaccgggtccatgcgggcgactgtgaggcacctggaaaaccatttctcaatgacaagggattatcagagcgtgcgacaaatgctcactaaccgcaaatacatcggagaattgagggacaataagaatttttgcgaacccatagtcgacagggacgtcttcgaacgggtgcagctgcagttgagcaaaaacatccgaatgaacaagaagagagattatatgttcaccgggctgcttgtttgttcagaatgtggctgcaattactccgcaacagccgtgattagtcggtacgttcgaaaagacggcactactaatcccaatgaaagacacctgtatcgctgtaccaagaatcgcaacaacgttaagaagtgcagtaataagaaaggaatctacgagacaacgctcgaaaactttttgctggagaatatagaaaaacaagccgaagaactgtccgtccgcatgcaaaaagaaccagccgtgaagaagaccaagaacatcaatgataagatcaagaaaaagatcgataggttgaagaaggcatacctgaacgatgtgattacccttgaagagtataaggaggatagagaggaacttgaggctttgctgattcctgagcaggataacaagatcgccaaaatcgacctcagtagcctgcacaactattcaacagctgagtttcgcgagggttataagcaacttacaatttccgaaaagtcttccttgtggagacaggtaatcaagaacattgtggtatacccagacggtaacctgaaaattaattttttgggatac

SEQ ID NO: 1283 - DNA, 1533 bp, unidentified
  source 1..1533: mol_type = unassigned DNA; note = Bacteriophage uvig_53595 from the Index of /pub/databases/metagenomics/genome_sets/gut_phage_database (ebi.ac.uk)
atggacaatgaaaggaaaattgccggtgtttacattcgcgtttcatctgaggatcaggctcgagaaggtttttccctgggagaacaagaggagaagctcctgcagctctgtaagtttaaagaactcgaagtgtataccgtgtataaagaagccggaatatctgctaaagatatggagcaccggccacagtttcaggagatgcttaaagacatgaaggagggaaaaatcaattacattgtggcctacaaacttgaccggatcacacggtccgtcagggacctggaagaactgatcagtgttcttgaacagtacaactgcttccttctgtgcgatcgcgatgatgtgaatacatcaacagcgaatgggcggtttttcgtgagaatgctgaccgtcctgtcacagctggaaatcgagatcgtttccgagcggaccaagtttggcctgaatggcgcaattaaactgggtcacatccccggccaacggccttttggatataagtcagctgaggataaaagaatggttatcgataactccaccagaccttatgtcgagaagatcttcgacatgtacctcgagggaaagagtttccagcagatagccaattacttcaaggaaaacaagatcttctccaaaaagaactggaaggacaccacaatccaaaagattatagataacaagatctacatgggggactacgagcagtataaacgcattgggaaacaggtgaacctggagcctattgtgtatatgaatgtggtggagccaattatcagcagagctaagtgggaagaatgccaacgccagaaagaaaggaatcagcggacttatacaagggatcgagtctacacgtttttccagagactgaagtgccccaattgtagtaggattatgaaatgcaagggctctggcgggactaagcgaaagtatatgtactatacgtgtgaacattgtcatattaatttcaatgaggaccatgtggagcacttgctgagggacttcatctacgatctgcttgagtatgatatggccgtaaagaagttctttctgccagtgctggaggacaagaccaacaacattgacactactagtatcgataaagagatccgagacttggagaaacagcgaaacagaatcaagaacctgtatattaagggggtcgtcgaaatagacgatttcaaagaggactacaaacttattgaggataagcttgcgaacctggagagcaaaaagttggaactcgtaaacctggagaccttcaactacagcccgcaagaactcttggcacaaagagacctcgaaaaagagaaaatgataaggctcgacactttgaatacagtgcttaagaccaagtggaatgacaaggataaaagcgaaaaacaggagttcataagcaagttcatcgatactatagagatcaagaaggactctgagggcaaccttattctcgaaaaaattaattttcgcaacggctttatccgccagttggtcaagttttacgacgcaggtatctttgatgtggccgtgcccgtaatg

SEQ ID NO: 1284 - DNA, 1344 bp, unidentified
  source 1..1344: mol_type = unassigned DNA; note = Bacteriophage uvig_342637 from the Index of /pub/databases/metagenomics/genome_sets/gut_phage_database (ebi.ac.uk)
atggaggcaatgaagcgcgccgctctgtacgtgcgcgtgtccactgaggaacaatcaagacacggcctgagtctggaagagcagaagactgcccttgagtcatttgcgaagagtaacgggtacactattgccggcgagtacatcgatgctgggatcagcgccaggaaaccatataccaagcgacctgcacttctgcgcctgctggacgactgtaaagacggaaagatagatacaattcttttcatcaagctcgatcgctggtttaggaatgtaggcgggtactatgctgtgcaggagattctggacaagtacaacgtcacatggaaagcaaccaaagaggactacgagacagaaactgcctctggaagattgaaagtgaatattatgctgagtgtcgcgcaggacgaggcggataggacatctgagcgaattaagtttgtgttcgatggcaagagggaacggcgggagcccataactggacatccgcctgctgggtacaagattgtggacaagaaaattgtcaaggacgaaaacacggagcagatgatagatggattctttaggaaatttttgcagaccggctcaatcagtgaaacccagaagtatatctacgataagttcggcaacatcatcgactaccaggttgcatctaaaatcttgagatcaacagcttactacggattctggcatggtgtggaaggtatgtgtgagccctatatcaccaaagaacagtatgatcaaatccagtccatgagacaaaaggttgtgcgcaaaacgaaggagaataggatctatctctttagcggcctcatcttctgcggtgattgcggcaatcgaatggttggccgaaccaacaatcggagcgggaccgttaactatacctgccctaagtatcacgagaaacggggatgtaataactccatattcatctccgaaaagaaggtcgaagcctatatcattgagacaatggactccaagttccaggaggccaagtacgagatcgagaaaatcaacaataacgtggacaactccactgtcaagaaccagataagcgccattaaacggaagctgtctaaactgaaagacctgtacctcaatgatctgattactttggaagaatataaacatgatcaagcatcaatgaccgaagaggtggagaaactcgaaaagagcatcgctatgcccaaaacggacaacattaagaagattgagagcctcttggaagaggactggaatgagtcttacgaacacctttctcgcgaagaaaaacggaatgcctggagaatacttatcggtaaaatcaccattaacccagatagagggattagctatacacttaatgta

SEQ ID NO: 1285 - DNA, 1686 bp, unidentified
  source 1..1686: mol_type = unassigned DNA; note = Bacteriophage uvig_173210 from the Index of /pub/databases/metagenomics/genome_sets/gut_phage_database (ebi.ac.uk)
atgaaaaataagattgcgatctacattcgcgtatcaactacccatcagattgacaaagagagtcttccctttcaacggagagagctggagaattacgcaaagtacgttctgaacatcgacgatatggaattttttgaggatgcaggctattcaggcaaaaacatcatgcgaccggcttttcagagtatgatgtctcgagtgagacttggggaattttcacacatacttgtgtggaaaatagaccgcatatcccgcaacattattgacttcgctaacatgtttgaggagttgaaaaaactcaatgtcacgttcgtgagcaaaaatgagcagttcgataccagctcagccatcggcgaagccattctgaagattattttggtttttgccgaattggagaggaatctgactgctgagagggtgtcagacgtgatgatttcccgggccagtacaggccagtggaacggaggcagagtgccactcggatacaattacgacaaagagaaccacacttttaccgtgaaccagcaagaggccgagatcgtgaagttcatcttcgattactacattgacaatggatctatggtgagtctcgtcaatgccttgaaggacaaggagattaaaacgaaaactaatggtgcctttagcttgtcagctgtcgcaaccgttctcaacaacatattctacaccggaaagtatagatataattacaggaaacagggcgaccggcagcaggtaaagcctaagagtgagtggattgttatagacaaccatcacccagccattatctctgaagaggtctttaagagggccgaggagatcaaacagacgaacctcagactgaagaacgaaaaggggaaaatcgtgaagaagaacaatatccatctgtttagcaaccttttggagtgtgatgtgtgccataataatttttcttcttctctggaccgaccccgcgttaatcaagggggatatcggcactctatgtacaattgttatggtaggcgcatcggtgcgtgtaaaagtaagtatgtgagcgatgtctacctgggtaagttcgtgttcaactatatcgcaaatctttataaggcctattgctccttcggaaagagtacaaccttcgaaacttttaaaaaaaagatgctgaggggcaacattttctccgacataaaagaagtaacaaatctggagggcatctacaatatcttctgctcaaagtacaacgacaaagctaccgcaaacattatcaactacaagaatactaagcaggattttgggaatgaactcagaatagctctgtccgaaaaagggaaatatgaacgggctcttgcccgccttaaggatgcatatctgtttagcgatgacgcgatgacacagaacgaatatatctcccagaagcactctatcgaagtaaagctgagcgctaccaataagaaactcgataaactgcaaagcaaagacgatacacctttcgatgacgtcgaattcctgaacgtgctgtcctacttcatcctcaaccagaatttgcaagataagcgggagattgacttcgttgattttatcacatccgtcgacaagaaaatcataagcgatttcgtgcacaagatgttcatcaagttcatcatctccaacggcaagattaagagcatgacatttcgaaacgggatcactaacaccttcgtctacgacgat

SEQ ID NO: 1286 - DNA, 1356 bp, unidentified
  source 1..1356: mol_type = unassigned DNA; note = Bacteriophage uvig_13498 from the Index of /pub/databases/metagenomics/genome_sets/gut_phage_database (ebi.ac.uk)
atgccgaaacgaacacggatcgaagacaccggtattcaaagggccgctctttatattcgcgtctctaccgaggaacaagcaatgcacggactttcccttacggcccagagagagacactgttgaaatatgcggaagagaacgggctccgcatagtcgggacttacgcagatgagggaattaccgctcgaaaaaaatacaagaaccggctggaattcatgaggatgctgcgggacgtacaatctgataaaatcgatctgatactttttatcaaactggacagatggtttcggaacatcgctgattattacgaggtacagaagatccttgacgatcacaaggtgcgatggatcgcaaccgaggaggattatgataccaccacagccaatggcaggctccacctcaatattaagctgtctattgcgcaggatgaaagtgataggacctctgagcggatcaagtttgtgttcgacagcaaggtgaaacgcggggaagttatttccggtaaaatacccctcggctttcgggttgaagacaaacatttgtgcattgaccaggaaactgccgggattgttgtggacatctttaacaagtacgtggcgatccgctccctgggagctctgagaaaatatatcatggatacgtatgggatggtttactgctatagcggcctcagagccctgctccagaacactagatacattggtttggcccacgacatggacgacttttgccctcccctgatcgatagggacgtgttcggactggtgcagtcaataatcaaagagcgcgcacagagaaatgctactaagagaactgactgggtctatcttttcaccggcctcgtgagatgtgccgaatgtggcaatagattgagtgctcataccgtcgccggaaagtacatctattaccggtgcacacgatacgagaaattgcacctgtgtacccacaagaagcgcacgagcgagttggttctggaagactggctgctgcataatcttgtcagtcagttcgcacaatacaatctggagctcgaggccaggactgcccagcaggtgcagaaagtcgacgagtcaaaggtgcgacgcaagatggataagctgaaggacctttaccttaacgacttgatcgatcgcgatgcttatgaaaaggattatacgacacttcgggacgagctgagggccgcaacagctgcacgagagaagctgcccgaaccagtcaatctcaaggagattactgatgctctctcagcctacagcgaactttccaaagaacataaaaaggagttctgggccaggattatcggcaggatagtggtaacaaacgaggatgacttcttcgtgtacccaatcagccct

SEQ ID NO: 1287 - DNA, 1332 bp, unidentified
  source 1..1332: mol_type = unassigned DNA; note = Bacteriophage uvig_313242 from the Index of /pub/databases/metagenomics/genome_sets/gut_phage_database (ebi.ac.uk)
atgagagtagccctctacgcccgcgtatcaactgaggaacaggctgtacacgggctctctatcggagttcaacaggacacacttagatcatgggctgatggcaacaactatacaatagtgggaatgtataccgacgccgggatctccgccagaaaagccgccagtaaacgccctgccctgcagcaaatgcttgacgatgtgagggctgggaaaattgacatggttgcctttacgaaacttgatcgatggttccgaaacgtggcagagtattataaggtgcaggctgtcttggatgcctataacgtgagctggaaggcgctcgaagaagattatgagacagcaacttccgcggggcggtttaaggtgaacattatgctgagcgtcgcagagagcgaggccgaccggaccgccgagaggattaaggtggtcaataagaataagcgagaaaaagggatgtgtcataacggccacccaacactcggaattaaagtgaaagatggaaaaatcgtcgaggaccccgagacagcggatatcgttcgggacatatttgactactatgtcagaacacagtcaatcacccagacctctagatacctgctggataagtataagatcgttagagcttaccggaacatgaaaagcctgctgaaaaatcggaggtacgtgggttacgcagataatggccagttgctttacgcaccaatcgtggatcccaccacctttgaactcgcacaagaaatcatggctcagaggtctgctaggcactccggtgacttcacccagaagcacacctatattttctcctcaattaccgtgtgtggcgaatgcggtcgccgcctcacgtacagaatgaataggaggcataataagagtggtactaccgaatatgtatacggacgctgtcctcgccacgccagtggcacatgcggcaacgcaacgagcgtccgagaggacatactggaggcatacatgctggatcatttgatcattgagtgcgaaaagtacaacgctatcgtggcccagcagaacgcaactcctaagccctccgttgataagaatgccataaagcgcaaaatgcagaagctcaaagacctctacctctctgacctgattgacagagaggtgtatgaaagcgactacactgagttgcggaaggctttggaggcgcccgagccggaggaccaaagggaaatcgacattggccaactgcggagcgccctggctctgtacgatgatctggaaccatctgataagcatgaattctggcgccggactcttaagaaaatttccatcgaggacgacggggagatcaatttcactgtcagtgtgcct

SEQ ID NO: 1288 - DNA, 1299 bp, unidentified
  source 1..1299: mol_type = unassigned DNA; note = Bacteriophage uvig_212380 from the Index of /pub/databases/metagenomics/genome_sets/gut_phage_database (ebi.ac.uk)
atgaaaaaaaagagagtcgccgatgtggtcaatgggcagaaatctgcactgtacataagagtgtccactcactggcaaattgacaaggattccctcccactgcaacgagaggagcttataaactatagtaagtatgcgttgggaatagaggctcatgaagtgtttgaggatgctggctactctgccaagaacacagacagacctgcctatcaacagatgatgagtcgcctgcgcacaggcgaattttcccacttggttgtctggaagatcgatagaatctcaaggaatctcatcgattttgccacaatgtatcaggaacttaagagtctgggcgtgacatttgtgagcaagaacgagcagtttgacacctcaagcgccatgggagaggcaatgctgaaaattatcctggtcttcgccgaattggaacgcaatatgaccagtgaacgggtgaccgccgtcatgctgagccgcgccggaaatggcctctggaatggcgggaaagtccctttcggatatgactacgacaaagaaacgggggttttctccatcaacgaggagcaggcagctgtagtgagaagtatttttaacgagtacgagtctatagtttccctcctgtcagtggcgaagtggttgaacgaaagagggcttcgcagccggagagggatcgcatggaatcccaccactgtatctattatcctgcgaaatccattttacgtgggcacttaccgatacaactacaggggtgagtccgggggtccaaggaactggagcgtcaaagacgagtctgagtggatcttggtacctgaccatcaccctgctatcattgacattgaccagtgggctcgcgtgcaaggtatgctgactggaaacagacggaaccggccgggcggcggtaccacctaccagcggaagaacacgcatatattcgccggacttcttcgctgcggctattgtgggaactggatgaatgctacagttgacagggcccggagcgatgggtggagaccaagcatctatgcatgttctcgaaagcgacgcttcgatgattgcgagaataagtatatctccgatattacactcggccccttcgctctgaattacattgcgaatatgatgaaggcccagaggtctttcggtcggagcacctccatcgaaactctcgaaaaaaaactccttaggggagacgttttcgccgacgtggagcacattgatagggccggccttcaggaactgtacgatctgttcaggaggggacagtcacagcccgtggagtatgcacccgcatcagtgcgggaagct

SEQ ID NO: 1289 - DNA, 1623 bp, unidentified
  source 1..1623: mol_type = unassigned DNA; note = Bacteriophage uvig_34482 from the Index of /pub/databases/metagenomics/genome_sets/gut_phage_database (ebi.ac.uk)
atggggaagattgcggataaacttaaacagattagggtcgccatctatgttcgcgtcagtacacattatcagatagacaaagatagccttcccgtgcagaaagaagagctgatcgcatatgctaagtatgtgcttaacgccgattcatacgagatatttgaggacgctggcttcagtgccaagaacacagacaggccaggttttcaacagatgatgtctagaattcgagaaggcgagttttcccatgtgttggtgtggaagctggatcggatttcaaggaacctccttgatttcgcagccatgtacgacgagctgaaacgacttggtgtgaccttcgtcagtaaaaacgaacagttcgatacctcttcagcaatgggcgaagccatgctgaaaatcattctggtgtttgccgagctcgaacgcaaaatgactgcagaacgcgtaatcgcagttatgatttctagggccggaaatgggcagtggaatggcggtcggatcccttttgggtacaattacgataagaacgcagagacattctccgtgaacgaaaccgaggctgctgttgtgctgaagatgttcgacctgtacgaggaaactcactcacttctgcaagtggcaaaggcgctcaacgccagcggaagtaggcaccgatcaggtaaagagtggacgccgacaaccgtttccatcatcttgaagagtccattttacaccggcgcctaccgctataactactacgatatgtcaaagcggaattctcgccaggacgtaaagccagaaggagaatgggtggtcgtggaggatcaccatccagccataattgaccctgtgagatggaagaacgtggtggaactcctggaacgaaatcggagaggctggcaaagcgctggaaagacatacacgcgcaaaaacattcatgttttcgcgggactgctcacttgtggcgtttgcgggagcataatgtccgccacctctaatgccagagctcacaaagacggctacaggccttcaaattacgcctgtatgtcccacaggaaaaacaatggatgcacaaacaagtacatcacagacacgaagatcggacccttcgtattgaattatatctccaacctgattcgggcgaaggactctttcgggaaaactacctcccccgagactttgcagaaaaaattgctgcgaggcgatatgtttaaggacatcgtcagaattaaggagccggggctgatggagttgtataatctttatcgcagccagctccctggggtgaagtacgccagtaaagtagctgaacgaagcggtagctccgacaccgcttccgagaaggatatactcctttccgaacgccggcggctcgagagggctcttagccgactgaaaagcctctatctgtattccgaggaggacatgtcagagcgggactacgtcatcgagaaaaatagactcactgaaagcctggataaggtcaatgaaaggctggacaagcttaacgatggcctttctagtcaattctctatctctgacgaagagttgctggctaaggcaagttattttatcatgagccagaagctgttggacagaagatttgtcgattatcggagactgcttaaggagaccgatcccgagagc

SEQ ID NO: 1290 - DNA, 1557 bp, unidentified
  source 1..1557: mol_type = unassigned DNA; note = Bacteriophage uvig_463416 from the Index of /pub/databases/metagenomics/genome_sets/gut_phage_database (ebi.ac.uk)
atgcgcaatgtagccatctatgtgcgcgtctccacgatgcatcaagccgaacaaggctactcaattgattctcagctcgtcgattgcagaaaaaaggcccacgaccttggcgctattacaattaatgagtatgtcgataaaggcaagagtggagcctttctcgacaggccagagctgcagcgcatgctgaacgacataaaaacggaaaaggaatcctatgacgcactcattatctacaagctggatcgactgagtagagatagcatgggcctggcctacataatcaagatccttcagcagaaaaacataaaaatcattagcactgacggggctcagtatggagctaatccgcaggacgtgttgaccatgcagattatgggctctattgcccaatttgataatgcactgcgcaaggagaggagcattcgaggtaagatcgagaaaagaaagcaggggaagcttgataagatcaccaagtatggctacatctttaacgacgagaagcaaaatcttgatattaaagaggacgaagcgattgtgattcggaaaatcttcaagtggtttactgaagacaatctcagtgctttccggatttcaaaaaaactgaatacagagaagatccctgcaccacagcccaaaatcaaccgcaaaattataaacaaggacaatatttggtttgagagcactatacggactatgcttaaagacgaaacgtatgcagggattagacacacaatgatctacaagtttgagaagatcagtctgaacaacatgaagaaaaccaagcggccacctgaggaatggatttccgtcccggttcctagcatcataagcagagagatgtgggataaagccaataatataatgaaccggaagtcaactaacccccggaggacccagagaacatggattttgcaaggtttggtgtattgcgagaagtgtggacaaatcatgaatatcaaacagaccccaaagatcggaaaaatcaaagagaacgaggagaaatacaacttctatttcaagtgcaggacaaatatcctcaactggttcggttctgataagaaatgtcccaatcgccaggtgcccatctacacattggaggactctgtgtgggaaaccctcctcaatatcttctactcaaaggaaaccctcgaaaaatacctcaaagaaacacagttgaaagacaatgtgtacaacctgctcgataaacttatcgaggataggaataagctgtcaaaaaacaagaacaagatagtggagtggtttgctgacgggaaaatcgaccaggaaattgccgataataagatcaatgacctgaacaacaaaatcaacgacctcgataagaagatttctaacctgcagtccaccaacaggtccaagaagagcttctccatcaacaatctgtacgacattttccataagatcaaaaatcccaatagggagcagaagaaggaaataatccactccgttgttgaaaagatattcgtcgagagactggataacaagcgatctaacgcgtatactaagcctgtactgaaaatccggattattctgcga

SEQ ID NO: 1291 - DNA, 1353 bp, unidentified
  source 1..1353: mol_type = unassigned DNA; note = Bacteriophage uvig_346035 from the Index of /pub/databases/metagenomics/genome_sets/gut_phage_database (ebi.ac.uk)
atgactcgagtggccctgtatatcagggtatctacaagtgaacaggttattaacggattgtccttggacgcccaaaaggaagctcttattaaacacgctaaggagcgggggtataatattgtggatatctatgctgacgaggggatcaccgcacgcaagaaactgagcaatcggaaggagctgcagcgactgctgaacgatgtgaagaaggacaaaatcgaccttattttggtaacgaaactcgacaggtggttccgcaacatcaaagattactacgctgttcaggatatccttgaagcccacaactgcaactggcggaccatcttcgagaattatgacactagtactgcctcaggcaggctgcacatcaatatcatgcttagcgtgaaccaggatgaatgtgacaggacttctgagcgcattaaggctgtcttcaagcacaagaaagagaataaggaggtctgtagcgggtccgttccatacggttattatattgacgaaaacaagcatctgcagattgatgaggagaaagccaaagaggtccaggacgcgtacaaccattatgaactccataataacatgatgcaaacacggaactatctctccgacaagtatggatacatcacctactctgcaacacggaaaagattgactcatgaagcctacacagggaccttcgatggaatcaaagatttctgcccggccatcattagcgccaaacaatacaagaacgtgcagcgactcatttcaatgaataagaaagagtacaagcccaaagcccctcaggaggagtatatcttttctggcatgcttaggtgtaaagtgtgtggcagcgcgtttaattcaaatagaatctttcgctacggcacgtgctacaagttctacaggtgtcaaaaacacaagagagagaaagcatgcaccaacaagtatactatatccgagaaaggaatccttgagaagtaccttttggagaacatcaaagcagaactcaataattacaagatttcttatgaagtcaaacaggcgagcatagatacctccgcaatatcttcacaactggtgaagtgcagacagaagctggaaaagctgaaagacctgtatctggatgaccttatagacaagacaagttacaaggaggaatacgctcgcctcaataacacgatcgccgacctcgagaagcagattgataacgattccgatatggacattgatgctgtggaaacaattcttagtatggattttgagggcatctacaacaccctgcagcccaatgaaaagagatacctgtggcagagcataattgactatatagaagtcggtaccaatagagacgacatcacaatacactttaaa

SEQ ID NO: 1292 - DNA, 1350 bp, unidentified
  source 1..1350: mol_type = unassigned DNA; note = Bacteriophage uvig_375837 from the Index of /pub/databases/metagenomics/genome_sets/gut_phage_database (ebi.ac.uk)
atgaaacgcgtagcactctatatgagggtgtcaaccgaacaacaggctaaacatggcgactcattgagagaacagaaggagacactgtatgagtatattgagcagcacaaggatctgaaggtggtcaatgaatatgtggacggtgggattagtggtcagaaaatcaacagggatgagtttcaaaagctccttcaggatgtcaaagagaacaagatcgatctcattctgttcacaaaacttgaccgatggtttcggaatctcaggcactatctgaatactcaggagatcctggagaaacataatgttagctggaatgctgtgagccagcaatattacgataccacaactgcctacggtcgcaccttcatcgcacaagtaatgtcattcgcagaactggaggcccagattgattccgagcggatcaaggccgtgatggccaacaagattgcgcagggcgaggtggtgtctggcaaaacgcctctcgggtacagtatcgagaacaaaaaactggtaatcaatgacgacgccccaattgttattgacattttcaactactttttgagcagcggaagcctcagaaagactgtctactacttggggagtcagtacggaattgtccgcgattaccagtccgtgaaaaacatgctgacgaacaagaagtatatcggcgagctccgcaacaacaagaactactgcccacctatcatcgacaagaaactgttctacgctgtccaaaaggccttgcccaaaaatctgaaaacaaacgcaaagcgggattatatctttaaaggccttctgaagtgttctgactgtcagggatctgttgctgggcagaccattaaagcccggtataagaaaaaggatggaacagaatctatctatgaacggacttgctacaggtgcgttaagagacgaaataataagcttagatgtactaataagcgagcattttacgagaaaaatctggagcgctacatatttgaagcgaccaagcagaaattcgagcaaatacagataaactactcaaagaaacagcccaagataatcaagaaaaagaactccaagaaaaacatcgaaaataagttggatagacttaaaaaggcctatttgaatgaagttattgacctggaggaatataagaaggacagggaagccctcatgaaagaactgaacgagatcgaagtggagccggctaagatagacattaagaatgtggagttcatactgtccaaagaattcgacgagatatacaaagaaagttccgaggaagagaagaacgctctttggaggagcatcattgataatatcattgtctttcccgacggcaatatcaccgtgaacttcctgatc

SEQ ID NO: 1293 - DNA, 1629 bp, unidentified
  source 1..1629: mol_type = unassigned DNA; note = Bacteriophage uvig_324806 from the Index of /pub/databases/metagenomics/genome_sets/gut_phage_database (ebi.ac.uk)
atgctgaaatatctgaaaaacgataatgaaatcgtcgccgtttactgccgagtcagctccgatgagcaggcagataaaggaactatcgagaaccaaaaagagtacgcagaaaaatatgtgcgcctgaacatgctcaatgtttacgattactatctggatgacggggtaacaggcaccctcccactgcaaaagcggcccgaaggcaaaaggttgctggaggatgctaaagctggcaagtttaatctcgttctgttctttaaacttgacaggctgggacgctctgtacgggtgatccttaacgctgtgtatgacctcatggaacttaatgtggatgtgagatctatgacagaagcattcgacaccacaacacctagcggtcgcttcacactcaacacgtttgcaggaatcgcagagttggaaagagatactatactgactcggatgcgaatgggaacaattcggcatgccaagctggggaagtggctgggaggaccagtcccttacggctacaccctggaaaacggttatctggaaatatcaaggaccaaaatccctgggctgacctatagcgaagcagacattgtcaagctgatattcgagaaaaccgtatatgagaaaatgagtgctgaggccattgccgactacctgaacaatttgtgtgttccaacgaagtacaagatactgaaccgaaagttgatcacttccgggtactggtatccaagtcgcattctctcaatgctgcacaatacggtatactacggggtccatatctttggtcagatgtcaaaacatcagaaacccgagattattaaacagaccaaccccgccatcgtggatatcgacctgtgggacgcagcccagaaacaactgacatcaaataagcttttggccgccagatgccgaaaaaatgattatctgctgtctggtcttatcaagtgtgggctttgtggccgcacctacatagggactggctacgccggctccaagaaggaaaaagtcttgtactacgtgtgcaacgataagaataggtatcaccccgataagaaccagaagatatgccaatcccagaatttgcgggcggattggattgagaacattgtgtggaacgactgtttgtcctatatcatgcagcctgacaaactttatctcgagaataaggcgcagaatcttacagaccccaaggatgagttgaatgctctcgaacagaccgctgtgaaacttgagagagagaggagctctatcttggacttgttccgcaagaagattattactgaaaacgatctcaagaatcagctcgataaaatcgcgaaagagcaggacaagctcaatagagctatcaatgacaagaaggccctgatttctaaaattgacaagatcaacagtaacatgatcaagatggtggatctgctcaagagttttcagaagtacattagcgacaacattacttttgctgacaagaggaagatcgtggaggccctggtcgaaaatatcatcgtttataccgactacgacaacggccagagagacatcccgatcgtgaccattgccataaactatgtgttcaaaaacgagaagaatcctcttaagcggaactaccagccgtccagcaaacaaaatattcacggcttc

SEQ ID NO: 1294 - DNA, 1638 bp, unidentified
  source 1..1638: mol_type = unassigned DNA; note = Bacteriophage uvig_527025 from the Index of /pub/databases/metagenomics/genome_sets/gut_phage_database (ebi.ac.uk)
atggtcagaatcaattgcgcaatctatgtgaggaaatctaccgagaaggggttggagttggagttcaattctctccataaccaggaagacgcctgcagatcttacatcatggcccaggccttcaataattgggaatattttaaaacttacactgatggcgggattagcgggggaacaatggagcgacccgccctgaaacagatgcttgaagatatccggagagggctgattcagactgtggtggtgtacaaggttgataggctgtctcgctcaataatggattttcataatatgatgaaagagttcgacaagtatggctgttccttcgttagcataacacaggcattcgacacctccaccagcatgggcaagcttactctgaatatgctgctgtcatttgcacaattcgaacgcgaagtatcctcagagcgggtccgggataaaatcagggcttccaaagccaaaggactgtggactggcggagtcccaaaacttggatacgatattaaagacaagaaattggtcattaaccctgtcgaggccgagcaggtgcgctccatttttgaaggttatctgcaatgcggttctcttgcggagctcgaaaaattcgcagaaatcaagggctttaagcataaggattggatcaccaacaagggtgagcagcggggcggcaagccgtttaaaatttcagccctgcacagactgctgcacgagaaactgtaccttggcatgatcgagaataagcgcaccggacaagctttcaagggacagcacgaagcaattatatcaaaagacctgtgggataaggttcagaccaaacttaaggacaacgacaactgtgcgaaccacacaaggaaccgaaacaataatctcctgacaggcaaactctttgatagcaatagaactatttttacgaaccaggcaaacagtaagaataaggctaccaaaaggcactactacagtattaagggtctctttctccctacggagcagatagacaagctcaccaaggatgccatcatcgagattctgaatagcaacctgaacgggctcaataaggacagtgctatggccctgaaactgatcaacttcacagacatgaactattttatgcagcgcaacttcatcagaaatttcatcaacaagattatctaccaaaaggatagattgacattcttctttaacacagccccaatcactctctctgcctacacgggggacagccttaaccctaatgacaatcccctggagttcattgcagacaacatcaacaaccagatcatatatgagaagcaggtggtgattaatcgaggacttagttccaacgtgtataacgctgggaaagtaggcttgatgagcgttaatgacaacaatcgcctgattatacgggcgtttgcttatgcttggaagttcaagaaactgtatgaaagggggataaggatggaggatattattaagcaggaaaagatgacaaagcgaaccatctacaaatacctcaacttggcctatcttagccccaaaatcgtgaatcaactcctcaatggtactctcaccgtgaatttgcagaccctcttcgaaatcgctagtaagaacttgtcctttgaggagcaagaaaatctgatctacaaccggcttatc

SEQ ID NO: 1295 - DNA, 1518 bp, unidentified
  source 1..1518: mol_type = unassigned DNA; note = Bacteriophage uvig_450121 from the Index of /pub/databases/metagenomics/genome_sets/gut_phage_database (ebi.ac.uk)
atggccatcgctctgtacgctcggaaaagcatagaacgggagaattcaattagctgcgaaacccaaatcgaatactgcaagagtgtaattaagcctgacgagcgctctgaaaaaaccattgagttcattgacaacggctattcaggcggtaatgtggatagggacggattccagaaaatgatgaggcagatagagagagggaaaatatctaaagtcatagtctatcgcctcgaccgcatctcccggagcctctctgactttgtcggaatacttgaaacactcaaaaagcataatgtacagttcgtttctagtcaagagtcctttgacacctcctcaccttacggtgagatgatagtgaagattctgatggtgtttgccgagttcgagcggaagagcattatcgaaagggtgaaacacgcgtacgcttacagatccgaaatggggttgtatatgtccggcagaaggccatacggcttcaaccttaaggatacagtcatcaataatgtgaagaccaagatgttcgagcccgtaactaacgagattgagcagatcaagtacatctttgagaattactccgtgcccaacgtgaccctccggagactgatggacaatctcattgataacaacatctcagctacaacaggctcttggagcaccgcaaaacttagtaatatcattaaaaatccaatctacgtgaaggccgataacgccatctatgagtactatagcaagcgaaacgcaaatatcatgtctgacattaaccagttcgatgggctgcacgggatacagacatacggcaagagcaaacataccgccgatgatatgtctgatattaaaattgttgtcatgccgcatgacggaattatcaacagcgagctttggctgaaatgtcagaagaagattgttaaaaataagaaactggggaattccgtgaacaattcaacctcctggctgggaggtaaaatcgcctgtaaacagtgtgggcgcactatgacggtaactaaaggcggaaagaagaaggatggaacgcagacaaggtatttttcatgtactggtaaaagtcacaatcgaatctgcaacggccccaaagtgacgctgtatgcggacagcctcgaggatatggtctataaactcattgcagaaaagctgcagagcctcaagggcagtcgaaaaaagatctctactgacaactctaacaagatcaacctgcttaagaatcagttgtcagagatcaagcaaagtcaggaaaagattgtgaatatgttgttggacgacagttttaagagtgacatgaaaagcttgctgaacgagaaggctaagaagctgtcagaagaatccaaggccatcaccgagaaaatcgaagacctggaatccgaggagaacgagattataagcgttattaacctgtcccaaaagtggaaatctgcaaatactgatgaaagaaaggccgtgtgcaacgtcttgatacacaaaatcttcatctgtgaagatgggacatgcgaagtggtttggaacatc

SEQ ID NO: 1296 - DNA, 1512 bp, unidentified
  source 1..1512: mol_type = unassigned DNA; note = Bacteriophage uvig_42449 from the Index of /pub/databases/metagenomics/genome_sets/gut_phage_database (ebi.ac.uk)
atggatcgagcagttatctacgctcggtatagctccgataatcaacgcgaagaaagcatcgacgcacaggtgagggcctgtcgggagtactgcaagcgcaaagattatttcgtgacacacatctacaaagatgaggcaaaaagtggcactaaactggccggaagagacgcctacaaacagatgctcgccgacgtcaaggagaatcttttcgatgtaatcattttccacaagatagatcggaatgctagaaatgaattggactattaccttacgaaggatatgctcgagaagaacaatgtgcgctatgaatatgcggtgcaaaatattgacggcagcccggaaggccaaatgatggaaaatatgctggtgggttttgccgcgtactactctcggaacctctcaaaagaaacgaaaaaaggccttaatgagaacgctcataagtgcctgtttaacggtggggttcctcccctggggtatgatatcgatcagaaccagaggtatgtcatcaacaccaaggaggctgaaatcgtcaagctgatattcaagctgtatatcgaagggattggatacaagaaaattgcagagaaattggacgaacttggatacaaaacaaagaccggaggggactttgggaaaaatagtctctttgacatcatcggcaacgagaagtattgtggtatctactcctataacaagcatcccagggctaaaaacggcaaggggagaaatatgcacgcaaagagtttccctgaggactatattaccattgacaacgctatcccagccataattagcatggagctgtatgaggctgcccaggccagacgcagacagaacaagagtcgacccggaatctacaacggaaagaggcaatacctgctcacagggaaaattttctgtggccactgcggctcagctatgggcggacacacgaatacacctcgaaagaaatcatactcttactatggctgcctggataaggataggacaccagcacacaaatgcactcagaagcagattaacaccgagattgtggataccgccgtcattaacaagatcaagcataccttcttgaactccgaggctttgttgcggatcgccgacaagatgcgccagcagtacgccacattgaaagacgatgttgaggatgaaattcattctaaaacttcccagatggcaggcgcaatcaaacggagaaacaatctgtactgtctcgtggagcagggtattaatgacgattacactctgagcaggatttccgccgtgaacgccgaggtggagaaactgaaagctcagatagacaatcttaaggacaaaaagaatcttaaggtgctgactgacgaggccatcatcaaggcgttcaaactgtttgaatctaaaatctgtagcctcgatactaattcagccaagaagctgcttgtagaactctttttgattaaggttatcgtcaccgacaagaacattgacataatactggatgcggacaagataaccaacatggtaatgggtcaa

SEQ ID NO: 1297 - DNA, 1653 bp, unidentified
  source 1..1653: mol_type = unassigned DNA; note = Bacteriophage uvig_396773 from the Index of /pub/databases/metagenomics/genome_sets/gut_phage_database (ebi.ac.uk)
atgatcgcagccatctatagccggaaatcaaagttcacaggaaaaggagaaagcatcgagaatcaggttaatctttgtaaagaatacgcacttcataacttgcgcgataaaaacataaccgagtttctggtgtatgaggatgaggggttctccggcgggtcagtagatagaccagagttcaagcggctcatcaatgacatcaagctcaagaagatcgatatcattatctgctataaactcgaccgaatcagtcgcaacgtctctgacttttctaataccatcgagctcctgaacaagtacaacgtgggctttatctcaattaaggaacagttcgacactagcactcccatgggccgcgctatgatgtacattagttctgtgtttgctcaactggaacgcgaaacaattgctgaaagggttcgggataatatgctggaattggctaaaaccggtagatggctgggcggagcgacccccatgggttacgaatccaaaaagattacatacatcgatgagaacatgaaggagcgatctctcgtgaagcttaagcaggtgcccgaggaactcgaaatcatcaaactcatcttcaacaagtatctgtactttaagagtctgtcaaaggtggagacatatctcttgcaaaaaaacataaagaccaagaggggtagtaatttctccaaaagcaatctccgagtcatactgaacaatccggtgtatgtaaaaagtgacaacaagattattgactacttggtcgacatgggcattacggtgtgcggggaacctgacgggcagagcggtatcctgacttacaacaagcaaatgactattaggaatgacaaagggaaagccgttcgggtgtacagagatactgatgactgggtggccgcagtatctagccaaaagggcatcattgaggctgatgattggctggaggcccagaaaatcctgtccgataataaggacaagtttcctaaccagggaaaaacacataacgccctccttactggcattctcaggtgcagtaagtgtgattccccaatgcagattgctcacggacacatcagcaaaaagacaggcaagaagatatattactatacgtgtcctctcaaaaaaaattcaaagtccgtgaggtgtgacaatagaaatgcaaaagttgaggaagtggacaaaatcattatcgaccacctcaaggagctgccccttaacaagaaggcaattataaagaatctcctgaaacagaacaagaaagccaaagagaccactatagcctcaaacgaaaagagcatcaagaacgagatagccaccaaagagaaacagattgataccttgttgacgaagctttccattgatgatgacgtctctgacctgatcattgacaagattaagaagctgaaaaatgaactgaattccctgaaggtcgacctgctgaatgtcaacaacacaaagaccaaactgaatgaggtagaagtgtctctgaactttatcgagttgctgctcgacaagtgctctattatcgacaccctttccgtcgaagagaaaaaacagataattgatgtttttgtgacagacgccgagtggaatggagatgattacttcttcggggcggacttccttggcagcgagccaatagaagagaacgagcttaaaaaaaag

SEQ ID NO: 1298 - DNA, 1632 bp, unidentified
  source 1..1632: mol_type = unassigned DNA; note = Bacteriophage ivig_4126 from the Index of /pub/databases/metagenomics/genome_sets/gut_phage_database (ebi.ac.uk)
atgaaaattgctatctactcacggaaaagtaagtacactggcgtcggagattccatcgagaaccaggtgcagatgtgcaaggattacgccaacgccaagtatatggggcaggatctcgagttcgctacatatgaagatgaagggtttagcggaagaaatctcattagacccgagttccagaaactgattaacaacataaacagctacgacatacttatgtgctacaagctggatcgcatatcccgcaacgtagcagatttttcatccactctggaggttttgcaagacgccaagtgcgacttcgtcagcataaaagagaactttgatacatcaactccaatggggcgagcaatgattcatatcgcgtctgtctttgcacagcttgaaagagagacgatcgctgaaagggtcaaggataatatgcttgagttggccaaaaatggaaggtggtccgggggcaggaccccactgggatataagtccgagcccgtacaatacatcgacgaagaaggcaacgagaggaaagccgtgaaactggtgcaggatcaggaagagctggaactggttaaactgatctacgatacatatttgaagcagggttctctgcacaagacggaagtgtggttcacgcagcacaagatcaagagtaacagcgctgtcctgctcgaaaagacatcactgaagattattctccagaatccagtgtatgtccgcagtgcgcccgaggtaattaattatctgaaagacaataactggaatgtgtatggcgaggccgacggggtgcacggattgttgacatacaacaagaccgagagcgtggctgggtccaacggtaaagtgactaaaagagttcaaaataaggagaattggattgccgctgttagcaatgtgaagggcatcatcgacgctgacacttggatccgggttcaggaacagttcaaaaaaaataagaacacctttcctaatctgggcaaaactcatacagccattttgaccggtaagcttcgatgttcaaagtgcaagaattacatgttggtacaacatggtcgaactagtgtgaaaacaggcgacaagatctactactatatctgcagtatgaagcggaagtctaaaggcgaactctgtaactgtaagaacattaaggctaatgagatcgaacctgcagtgctgaatttgattgaggaactcgccaccaataaggaagaattcaagaataagcttcgcgagaaaaacaccgcatccaagctggataatgacataaaactcaagaagtctgccctcgaaaagcaaatcgcagataaagagaaacagattaccggactggtggataagcttagccttgatgactctatagctgacatcctcatcaacaggataaagaactataaagcggaaattgagaccctgaaagccgacctcctgaatatctctgccgagattgagcagaacaacaactacaaacttgccgagagcttcctggacggcttctttgagcagtgtaaagacatctcctctcaaccgaaagagaagcagcggcagctcatcaatagctatgtcaactatatcaactttgactcagacaccgaggaggcagaactcaagctgtacgagcctggggaaattaaaaaaaat

SEQ ID NO: 1299 - DNA, 1323 bp, unidentified
  source 1..1323: mol_type = unassigned DNA; note = Bacteriophage uvig_591587 from the Index of /pub/databases/metagenomics/genome_sets/gut_phage_database (ebi.ac.uk)
atgagggtggccctgtacgcacgcgtatctaccgaagagcaagccattcacgggctgtcaataggggtgcagcaggaatcattgaagaagtgggcctctgaaaaccatcacactatagtggatatgtatgtagacgcaggtatttccgccaggaaacccgcctctaaaaggccgagcctccagcggttgctggatgatgtaagggccggcaagatcgacatgattgtgttcacaaagctggatcgatggttccggaacgtcaaagagtattataaggtgcaggaggtgcttgagcagcacgatgtgagttggagggccctcgaggagaactacgagacggagacatctaacggagtcttcacagtcaatatcatgctgagcgttgcccaatccgaagcagaccgcacgtcagagcggatcaaggttgtaacaaagaacaagcgcgataagggcctgtgtcatcaggggaaaaagcctcttggcttgaatattgttaaaggcgagcttgtcgaggacccagaaactgcccctattattagagacattttccggtattttatcgctacccaatccgtgactgctaccagaagatacctgctcagccagtactcaatcacaagatcttataagaacacaaagctcatcctcaagaacacccgctacataggagtggcggataatggacagcgcctttaccaccctattgtgccacccgaggatttcgctctcgcacagtcaatcatggcagaaaggtctacccgccatagtggtgactttacccaaaaacacgtctatctgtttaccggtattgttttctgtgctgagtgtgggcgccgccttagcggaactatgagtcatctgcacaatagagaatacgtttactacaagtgcccaagctacgtcggcagatcctgcacccatctgagacgagaacgggaagaagccctggaacagtatatggtggagcacatcctgtccggttgcatagactataatgctgcaatagcgcagcaatccgccgtcaaaagtcctactatcgatcgggccgctgtgaagcggaaaatggagaaattgaaggatttgtacctgtccgacctcatcgacagggagatgtatgaggctgactatttggtcctgaaaaaacagcttgaagcacccgagccagcgaagcgggaacccattgacatcgacgtgctgaaaagcgctattggagcgtacgatgacctcgagccgctcgaacgacgagaattttggagaaggatcgttaaacgaatcagcgtggatcaggacggcggcatcaattttgagttggtggggcacatc

SEQ ID NO: 1300 - DNA, 1362 bp, unidentified
  source 1..1362: mol_type = unassigned DNA; note = Bacteriophage uvig_39360 from the Index of /pub/databases/metagenomics/genome_sets/gut_phage_database (ebi.ac.uk)
atggagtgcgtcgcttaccttcgcgtttccaccgagaaacaagcggaggaaggctacggcttggatctgcagcgaatcagcatcaccgattattgcaggaaaaatgagttgattatctccgattggtacatcgacgacggatacactggaagtaacatggaccgcccacaactgcagcggctgatccgagactgcagcaagaagcgcataaagtgcctcgttgccttcaagctcgaccgcatcagccggtctatggttgatggaatctacatgattgagagggtctttcagcccaacggggtggactttagatgtgtgtatgactccgtgtcttacgattctcccatggaacaggcctatactcagatgatggctgtatttgcccaactcgataaaaataccatgatgatgaggatgcggggcggacgcctcgagagagtgaagaagggatattggtacgggggtgggaatcggccttactgttacgattacagtcgagaaaaaggaattctcgttcctattcccgagagagcagaacaggcaaatcgggcccttgatttgttcctgcaaggctactcagatgagagaataatgaaaatctgtggttattcctctgaactgctggtgagacatattcttaccggggtggtgaatattgggatgatcccatataagggggagatctacaaaggccttcatgagccaatttttgacgagagaaagttcgaactggctcaggagtataggaaaactcgacgcaagactaaaacagcatgttttagtatggagacaaatcttcttaccggcctgtgctattgcggcatttgtggttgcaaaatgaggtatcagaaatggacaaacggcaagcacaagatctactgttactcacatgacaggagcctgaagaaacttcccaaccacaatcctgaatgcgacaataccctggaatgggcgaaagacattgagaagcaggtggaggaagagatcctgaagatatcactcaacattagctcctatcagaagacacagaaagagtccgagctggaaataactaagaaggccttggaaaaaaataaggcaaaactcaagcggctgtataacttctacgctgaaggtaacgacaccatcgtggattctatcagggaaacagaagatgagataaacaagcagaaggaggtcattttcgagttgcaaaagagcgaggggaacaagcagtcaaaagagattgtgtatgacaagattaaaagtcttgccgacgtctggccgcacatcgataaaacgagcaaaaacgtgatccttaagacgatcatatctaaaattgtaatcgtcaagggcaacgtagaaatacagctgaaggaattc

SEQ ID NO: 1301 - DNA, 1740 bp, unidentified
  source 1..1740: mol_type = unassigned DNA; note = Bacteriophage uvig_460722 from the Index of /pub/databases/metagenomics/genome_sets/gut_phage_database (ebi.ac.uk)
atggaattctctaagcttactagggttgccatctacattagggtgtcaacgaccatgcaagccgaaaacggggaatccctgaacgttcagagaactcagcttacgacctatgcacagatgatgttgaatgcattgcccgagaacatagtgattttcgaggatgccggctacagcggcaaaaatatggatagacctaagttccaggacatgatgtcccagatccgggctggaaagttctcacatttgctggtgtggaagattgaccggatcagtagaaacctgcttgacttttccatgatgtacaaagaactgaaggaactgggtgtaacttttgtgagcaagaatgaacagtttgatacgtcaaccgcaatgggcgaggccatgctgaaaattatcctggtgttcgcagaactcgagaggaatatgaccagcgagagagtcactcacaccatgatagcgatggctcaatccggaaggtggaacggcggaagagttccatttgggtatacttaccgcaccgaaggcgagaaaaaagaaaagcagatcttcgaaatcgataagggtgaggcggccctcgtgcaggagatttttgatttgtacgagcaggagcgatctattgtccgggaggctaagatccttaatgatagaaacgctatctcaaggtatggacacgagtggagtccagttacagtccatcttgtgctgaggaacatcttttacgtcggagactatcgatacaacgcactgcgcgagggcgatcgctcaaagcctaagcccgaatctgagtggataattgtgaaggaccaccatcccgccatcatctctcgagagcagtttgcgcgcgtgcaagctatactgaaagccaacaagcggtatagaaaagatatggcccctgcatccagtcgagaacgcatacacattttcggcgggttgctcttctgtggtaactgcggtaaaccgttgaataactctgtgagtaataagaaggctgatgggtggcaatatagcaattatccgtgccccacccggaggcgcagctccaacaagtgtaccggaaaaagtacttctgatccagtggtgggggagtttgtattcaactacattcttaatatgctgaatgcccagaaagggttcaaggacatccagaccccagcacagttgcaagaccgcctgctctttggcgacgcgttccacaacgtaatcagcattgacagcgatggactgaatagcttctttaacctcctgagcagcggtaacatctctggcgctatctatggcaaggatgtggctgtttctaagcccaaaacagccaaagttgatcctgaacttgtgagactccgaaaggagaagaaacgcctggagcgggctcttgaccggctcctgaatacctacatcatgagtgacaggcctatctctgagaacgagtacattcggaagagaactgacctggagacactcctttccgacgtgaacgacaaacttggcatagcacagtccgaggaagtccaaatggctctcacagactcagaattcttgacaaaagccagccagttcattatagggcagaaactgtcaaatcggctgtatattaattacaagaatctggcccagtccgtcgatccatccgtcctcaaaacatttgtagtgtccgtcatcgacaatatcgttatctacaatgggaaagtcaagagtattgtgttcaggaacggacttgccgccacatttgaatatagctcaatt

SEQ ID NO: 1302 - DNA, 1401 bp, unidentified
  source 1..1401: mol_type = unassigned DNA; note = Bacteriophage uvig_288194 from the Index of /pub/databases/metagenomics/genome_sets/gut_phage_database (ebi.ac.uk)
atgctcaaggccgcgctgtacgcccgcgtgagttccgaggaacaggctaaacgagagaacagcattcctgctcagttgcgcgccctcagggagtattgcagaaaaaacaacatcgagattttcaaagagtataaagacgaggggattactggccagattagcaagagaccagcctttcagcaaatgctcagtgcggctttcagcggtaaaatcaatgtgattctcgtgcataagtttgacaggtttgcccgcaaagcagagctttctcggagcgttaaaaattctctgcaagcagctaaggtcaacgttgtttctataaccgaacccatcgaggattccccaatgggcttctttatggaagggctgtacgagctgatggcagagtactatgttaggaacctgagcgcagaagtgtttaaaggtatgaacgaaagggcccttaagggaaagcacatgggccagatgccttacggatactactgcaaggacggaaatgtgtacgtcaacgagacccaggccgaagtgatccataagatctaccgcttctacgatgagggctgggggcacatgaagatcgccaagtggctgaatgaatccaagatacctacctataagggtattatcggaggatggcagacatttcaggtgaagcagatactgaagaattccaagtatataggggaaaatttgtggaacgggactgtctacccagccgatttcccagctattctcgagcctgctctgttccaccgggtgcaggagaagtctaacctgatgactagaacacatacctacagaggcaataactacacaaaacatcacctgcttggactcctttactgtggcgaatgcggctccattatgcgggttaaacccaaccaagactggcaacgcaggaaatttgatacctacacttgtagagatgcaagccagtataggggcgattgtcggttcaccaaaatcttcgatgctactaaactcgagtctgaagtcgatgcatatctgcgatcagtgctggcgggtgcaccgatctcactgattgtctccaaagacgccgaaaaagtaaaaccggcggatgcttcaaaaagtcagattgagaagattaatgccgaattgaagagagctaaggacgcctatttgtcaggcgtgttcgacctcgacgagtatcgggaaatcagacaagggctggagaataacaagaagatcatagaagccgaaacaaagaatgtacccgctccccttcgagccaacgagaaggaggacattctcaggaaaaaaatcaaaagtgcatgggacctgtataagaatgtgcagacagccgaggagaagcggacgatcttgaagacgttcatccacaagatcctcatctatcgagaccgctgggaagtagtcttttacata

SEQ ID NO: 1303 - DNA, 1797 bp, unidentified
  source 1..1797: mol_type = unassigned DNA; note = Bacteriophage uvig_296879 from the Index of /pub/databases/metagenomics/genome_sets/gut_phage_database (ebi.ac.uk)
atgtccaccaacaaggaactcagggagggtgtggcagataaggccaaaacctgcttcctgtatgtgcgagtaagtactaagatgcaagtagagaacggagagagcatcgaggcgcaactgtatgaccttcgggattacgctaagcgaaacaacctgcgcatcttgcatgagtacattgatgatggctattccggtaagaatataactggacggcctcacttccaggaaatgatggaagagattaagagtggcgtgagagttaactatgtgttggtcttcaaactgtcaagatttgggagaaacgctgctgacgctctgtctagtcttcaattgatgcaagactacggtacaaatcttgtttgtgtgaaggatggaatcaattctgaggcccagatgggtaagatgatgatagcctttatgtccgcgtttgcagaaatggagcgggaaaatatactggtgcagactatggcgggcagagaacaaaaagctcgagaggggaaatggaacggaggccaggcaccttatgggtacaaactcgttaaagacgagaaggggaaggggcacctggagatcgacgaagatgaagctgagattgtccgcattatctttcacgaatacacgaaaaaaggcaaaggagttatggccctggcatcttggcttaatgcacagggatacaggaaaaatgttaggggcaatggaaagtacgaacactttgtgcctacgtttctcaagaacgtgctctgcaacccagtgtatgtgggaaaaattgcttatgggcgaaggaggactacccccgtgaaaggcaagagaaatgagtacagaatgatcaaacagtcagattacgacgtctacgacggcgagcatgaggccattatcgatgaggcaacatggaatgccgcccaggaacggatggccgaggagtcccaccctttccccgaagcaaagacaggggaacatgtgcatctgctcacaggcatgctgatctgtccagtctgcggccggaaaatgattgccaacgtctcccacggcaagcggaagaaggacggcaccgtagggaagagtacatatgcttacgcatgtaagtacagcaaaaaacagttcggaccctcatgcacctttactcgccagttcaagcaggaatatatcaaccgcgaagtcattgaagtaattgctaggactgcctattctgacatattcgaagagcgagtcagagacgagctggatgcggccgtggacatagaaaagctggaagctgatgtcgagcgcatcgggaaagcactcgacaacaataaggctgccagacgcatgctcagccgcaagttggattctttggacgttagcgacagatcatacgagaggaaatacgaggacatgcaggcgcgccttgataaactgtacgacgagtgcgctgacatcgaggccgcattcgggaatgccgaatctaaacttgagagcgccaaagagaaacaggtgacgactgcccggatctatgaaatgcttgatgagttccgcgagcattttgacgaatacgatccggtcagaaagaaggagattcttcggcaggtggtggatagcgtggaaatcaatcccgatgcaaatccgaagaagggcgacaccatcgtcacccgcgtcaggttcaggtgtccagtttccttttatccaaccctgcccgaggaggcctatgacgccctcggtattaaggagttcaaccggctggaaaccaccgagtacgtgtcagaaaacaacagcagggtagatgaagacacagtggagacagtggccatcctcggtcgacgg

SEQ ID NO: 1304 - DNA, 1284 bp, unidentified
  source 1..1284: mol_type = unassigned DNA; note = Bacteriophage uvig_151499 from the Index of /pub/databases/metagenomics/genome_sets/gut_phage_database (ebi.ac.uk)
atggacaaggagaataaggctgtaagatgtgccatctacactcgaaaatcccacgaggaggggctcgaacaggatttcaattctctggacgcacaacgcgaaagtggcgaaaattatattgccagccagaagacgagagggtggatctgcctgcctgaaaggtatgatgatggtgggttctcagggggcaacaccaatagaccagccctgaaaaaacttctcgaggatattgcatctgggaagatcgacgttgtcgttgtgtacaagattgatcggttgtcaaggagcatctgcgattttgctgagctgagtaagacctttgacaagttcggtgcaagcttcgttgcggtgacccaggacattaacacctccaccagctcagggcgcatgatgcttaacatcttggttactttcgctcagtatgaacgcgaggtcattgcggagaggataagggacaagatgagcgcttcacggaaaaaagggctgtgggtcggcggcgttacaccttttggatatcgggtgctgaacaagcaccttgaaatagtccccgagcaagccgagattgtgaaacgcatgttccaacgatacagcgagacagcatccgtgaaacaggtgtgcgacgagttgacagacggaggcattcgcacacgaacgggaaagtttttcaacccaagtatggtatacaggattcttgataatcattcttacataggcaaggtgcagtataaaggagaagtattcccgggcgaccacgccgctatcatcggacagacactgtggaatgtggtgcacgagatactcaaggagaacactgccgctgaaaacggtaattctaggcggcagcagacctccgcgtccctcagaggtctcttgaaatgcgggcattgcgactgtgcaatgggcccaacatacaccggcaagaaaggaaagaactatctctattacatatgtgagaaggattacaagcgcaccagaccttcttgtcccgtgcgaagaattagcggtggagacatcgagaaactggtgattgagcaactccagaagctgttcaactcccagacttttatcgatctgactgccgagaatggcaatatgtccagagattctgtcgcctcagcctttgctaacctgagtggtttttggaaggaattgtttcccgccgagcggaataggttgctgaaacttttgatcgagcgggtgactgtcaacgaaggaaacatcgaaatcacaatcaaaacggagggcatgaaaaacctgatgatggaaatggaacatgaacacaat

SEQ ID NO: 1305 - DNA, 1491 bp, unidentified
  source 1..1491: mol_type = unassigned DNA; note = Bacteriophage uvig_539135 from the Index of /pub/databases/metagenomics/genome_sets/gut_phage_database (ebi.ac.uk)
atggttgctatctatgctaggcaatctattgacaaaaaggactcaatttccatagacagccagatcgagctgtgcaagagagaggcctttggtgaagaagtgaggacttacgtggataaaggcttctccggtaaaaataccgaccggccacagttccaggcactgatgaatgacatcaagagtaaggaaatccacaaggtggttgtctacagactggataggatatcccgagcccttatagactttgcgaagattatggaggatttcaacaagtacaacatagagttcgtatcaacaaccgaaaaattcgacacttctaccccaatgggaaaggctatgctgtccattgtgatggtattcgcacagctggaacgcgagactattcaacagcgaatcaaggataactattacgcacgcgggaaaaagggtttttaccttgggggtaaaccgccctatggcttcaaaaaagagaaaacaaaagttgatggcatttctacatcaatactgcacaacaatgagtttgagatcgacgtcctgaccgacatatttgataagtacgcgaatagcgaccttgcgctcggaggaattgtcaagtatctcaataacaagaacatacctgctccacatggcgggaggtgggaatctacaaagattgcccgcatcctgcgcaaccctgtgtacgtgaaggcagatgctgacatctacgtctactataagaacaaggggtgcaaaatctccaacgagctcaccgaattcactgatgaaaatggctgttacctttacgggaaaagagatagaagcgccgcaaagtatacagacgtaaccgatcacgttctttccttggcccctcataaaggggtcattgactcagaaatctttcttcggtgtcaacatcggttggataccaataagcaggttaagaacagcggcaaaggaaaacacagctggctgactggccttactaagtgtggactgtgtggatatgctatgacggtgaatgccactaagaaatacaagtattttatctgccggggcaagacgagctacaacgcatgcgagggccccgaaaacacaatctatgtggatgacattgaggagcacgtggaaaaagccatcaaggataaggccgtgagtttgtcaaaaatgaagagcaaagtgacgaaaaacgagtctaacgtaaccaacgctgaaaaaattaagattatcgagatcgaccagcaaatcgagaacctgttggaacagatggccaaaagtaatgccgtcgtcaccgaatatattaacgacaagatcacaaagctccacaatgagaagaatgagatcttgaagaccatttccgagaagaacgagaaacccaatagtaatctcgaggatattctccataagatcaataattgggatacactggagttcgacgaaaaaaagatggtgaccaaggaactgatacagaaaatcgatctctctgacgacaaaatcaatattgtgtggaaatat

SEQ ID NO: 1306 - DNA, 1620 bp, unidentified
  source 1..1620: mol_type = unassigned DNA; note = Bacteriophage uvig_57166 from the Index of /pub/databases/metagenomics/genome_sets/gut_phage_database (ebi.ac.uk)
atggaagaggttaagtgtgcaatctacacccgaaaatcaaccgatgaagggttggagaaagagttcaatactctcgaggcacagagggaggccggtgagaattacattaaaagtcagaaacaccaggggtgggtgttggttgaggagcactatgatgatgggggcttctctggaggcaatatgaaacgccccgctctccagagattgttggatgacattaagtgtggcaagattaacatgatcgtagtctataagatcgatcgactgactagatccctcgtcgactttagtaagatggtggacattttcgacaagtatcattgttccttcgtaagcgtaacacagaacttcaacacctccgactcaatggggcgactgactctgaatatgctgcttagctttgctcagtttgagcgggagattggtagcgaaagggtgcgcgataagacagcagcctctcggaagaaagggatgtggacaggcggcgttgtcccctacggctacaggtccatcaacaagaaactcgaaatagaaccacaagaagcagacgtggtaaagttcatgtttgagatgtacctcaaatacaagagtgtgatgagcgtgtgcaaactcttgacagagaatgggtacagggatttcagacgggacgccctgctgcgcatgttgaagaatccaacgtatatgggaaagatcaagtacaaagacgaactgtacgatggacagcacaaagcgatcatctctccgaaaatcttcgagtccgtgcagtatatcctgaagaacaaggagaaatcagagcggacctgcctgtttaacaagaatgaagtcggcatacttagggggctgctcacttgcggctgttgtcattcccccatgacaccggcctcatgtcagagccacggtgtcaggcgcttctactatacatctaccaaagctaagtattatggctaccatcattgctctaatggcgcagtcccagtgcagctcatggacgagtgcatacttaaaatcgttaccccacttatctcagacattacggtcctgaatggtctgataaacaagatatctaccgataaaagtgccgaaatctacaaagcaatgagacaccctgagaaaatcatcgagaagatggtggagcgggacaagctgcagcttatgaagctgcttataaagggaattgtggtgaactatgacacgatcgaaatcacatggtccaaagtggccctgtctctgctgactagtaacctgctcgctcaaacccaggatcacaccactattatcgactatccctttaaacgcaataagggtgctttgattctcagcttgcctgaagacatcgctcagaacgtgaactacagcaccgagctcattatggccttgtgcaaggcgtttaagtatcaaaagataatcagcaccggaaaacaatccatacttgagctggctgcccaggaaaacattgatagcgggtacttgggccggctgatcaggttgacatgcctggcccctgacattatcaagcgcattcttgccggaactcaacctgcggaattgtatcttcagcgactgattagagaagatattccccctatctgggccgaacaaagaaaactgtacggagttatt

SEQ ID NO: 1307 - DNA, 1380 bp, unidentified
  source 1..1380: mol_type = unassigned DNA; note = Bacteriophage uvig_577393 from the Index of /pub/databases/metagenomics/genome_sets/gut_phage_database (ebi.ac.uk)
atgaaggtggccatctacacaagggtgagctctgccgagcaagctaacgaggggtactctatacacgaacagaagaagaaacttatttcatactgcgagatccatgactggaacgagtataaggtgtttacagacgcaggcatcagcggcggatccatgaagcgcccagcccttcagaatctgatgaagcaactctcctacttcgatttggttctggtgtataaactggatagacttacccgcaacgtcagagatttgctggacatgttggaagagtttgagcaatacaatgtgtcattcaaaagtgctacagaagtctttgataccaccagcgctattgggaagctttttatcactatggttggggcaatggccgaatgggaacgcgaaacaattagggaaaggagcctgttcggatcccgggccgcggtgcgggaaggtaactatatacgagaggcccctttttgctacgataatattgaaggaaaactgcacccgaatgaacatgccaaggtgatcgacctgatagtatccatgttcaaaaaagggatttctgctaacgagattgccagacgacttaacagctctaaagtctatgttcccaagaaaaagtcatggaatcgcaactctctcattagactgatgcggtctcccgttttgaggggacacacaaagtacggcgatatgctgatagagaatacgcacgagcccgtgctttcaaagcatgactacaatgctatcaacgacgcgatcagttcaaagacacacaaaagtaaagtgaagcatcacgctatctttcggggcgcattggtctgtcctcagtgcaacagaaggctccatctgtatgcaggtaccgtcaaagatagaaagggctacaagtatgatgtgcgacggtataagtgtgagacctgtagcaagaataaggacgttaaaaacgtcagcttcaatgagtctgaggtagaaaataagtttatcaacctgctgaaatcctatgagctcaataagtttcacattaggaaggtcgagccagtgaaaaagatcgagtacgacatcgacaagatcaacaagcagaagattaattacactcgcagctggagtctcggctatattgaagacgatgagtactttgaactcatggaggagatcaatgcaactaaaaagatgatcgaggaacagactaccgaaaataagcagagtgtgtccaaagagcagatccagagcataaacaatttcatccttaaagggtgggaggaactgacgattaaagataaagaggaactgatcctttccaccgtagataaaattgagttcaacttcatccctaaagacaaaaaacataagactaacaccctcgacataaactccattcacttcaagttc

SEQ ID NO: 1308 - DNA, 1341 bp, unidentified
  source 1..1341: mol_type = unassigned DNA; note = Bacteriophage uvig_365918 from the Index of /pub/databases/metagenomics/genome_sets/gut_phage_database (ebi.ac.uk)
atgaataagctgaatgtgggctatcttagggttagcaccgaagctcagacggaaaagtacgggctggatcttcaaaaacaaaaaatcattgagagagctaataaggacggcaccaccattgatcgctggtatatcgatggagggtattctggaagtaggcttgacagacctgacattcagcgcctcttggaggacgtggagttctggattattaaaagtgtgtatgtgtacaaactcgacaggatgtcaagagacactattgatgcactgactctgctctgccgcacgctccctaagtacggcgtgaagctgatctcagccactgaagagctgaggatagatactcccagcgacaagtttttgaccagcgtgaccgctgtcgtcggccagtatgaaagagaactgatctacatgcggacccgagccggaatggtagaacgggttaaaaaaggactctggatgggtggtggtcgcatcccatacgggtattactacgatcgaaatgacggcattctgcatgtgaaaagtggagagtccgaaaaagtcatagaggcctacgaactgtatctgaaaggctacagttgtcagagaatttctgaccttcttgacttttcttgtgacaagcacgtgaagaacatcttgacctcaaaagtgtacctcggctacatattttacaaaggaaagtactataagggcctgcacgagccgatcgtaagcgagaagatgttcaactctgtccacatctttatgaaaaagagatcctccaacgcatatattgggaacaagttcatgctcagcgggctgtgttattgcggcaagtgtggcgcccgcatgcgatataagaaatgggggaactgccatattatggaatgctactctcgggacgggggcaaacaaaggatggtgagagatccaaactgtaaaaatctccggatggacgccaagatgatcgagcaggaagtttctgactgctttcgccgattcatcgtcaacgtaaaagcggaagaaaagaaggaaaatcagaaatccatcatcgagaagaagataaaaaagagtatagataagctgaagaaactctacgcattgtatggtgagggagatagcgatacactcttgtccgtcattcaagaggaggagaaaaggcagaaaagccttaagacagagctggaagagtcaatccgggaggagagcgttgattcctcagtgaagattgagaatatccagcgggtctctactatctgggacacactgacacccaaggagcagaataagatcttgaaagaatgcgtggagaaggttgtgatcacagacggtgatattgatatccatttcaacatatcc

SEQ ID NO: 1309 - DNA, 1335 bp, unidentified
  source 1..1335: mol_type = unassigned DNA; note = Bacteriophage uvig_57063 from the Index of /pub/databases/metagenomics/genome_sets/gut_phage_database (ebi.ac.uk)
atgaaaaaaatgaatgtgggctacctgagggttagcactgaaaatcagacagaaaagtacggtctggacttgcagaaaaacaagataatcgagaaagcagaaaaagaaggcgacaagtggtatatcgacggtggctattcaggcagcactcttgacagaccagatattcagaggctgctggaggacagcaagaatgggtatatcgaaaaggtgtacatctacaaactcgacagggtctctagagatacaattgacacgcttgtcattctgtatcgaaccctccccaagtataatgttaaaattgtatctgccactgaggaactcagtttcgatacaccaatggacaaaatgaagatcgggattgatgctctcatgggccagtatgagcgagagatcattagcatgcggaccaaagcgggaatgttggagagggtgaaaagtggattgtggatgggcggaggtcgcgtgcctttcgggtactactatgaccgcaatgatgggatacttcacccgaaagaagatgaagccgaaaaggtgagaaccatgtaccggctgtacaatgatggatattcatgccaaaagatttccgacatgctgggaatgaagggggagaggattgtgatccaaattctcaagagaaaatccaacgtaggctacatagagtacaagggaaacatctacaaaggcaagcatgaagctatcatcgatgaagagactttttacaaaacgcagaggttcatggagaagcgagctaataactcatacatttgtaacaagttcctcttgagcggcctgtgcttttgtgggaagtgtggtgcccggatgagatataagaaatgggccaatcggcacgtcctggagtgctatagtcgcgacggatacaaggagtacatggtcaagaaccccaactgtgataataagagacccgacgcaaaagacgtggagaaggaggtttccgattgctttaagcggttcgcagtgaacatcacaggtcgccgcgaaaagcagatctccaaaaaagagctgattgagaaagagatgaagtctacagtcgataagctcaagaagctgtatgaattgtatgccaccaatgaatcagagaccctgctcgaggtgattggcaaaagtgaaaagcgggtgaaggagcttcgcagagaactgtccaaagaaacccgaaaaaaatctctgacaactcctgagaggatcgagaaaatcaagaaaatcagcgatgtatgggacaagcttgacgtcaaggagcagaacaaggtgcttaaggagtgcattgataaaatagttataaccgacgggaacatagatatctactttaaccttctg

SEQ ID NO: 1310 - DNA, 1365 bp, unidentified
  source 1..1365: mol_type = unassigned DNA; note = Bacteriophage uvig_586504 from the Index of /pub/databases/metagenomics/genome_sets/gut_phage_database (ebi.ac.uk)
atggagtgtgtggcttatattagagtttctacggaacgccaggcggaggagggctacggccttgagtcccagaagcgcgatatcgacgaatactgtcgcaaacaccagctcataatcaaggaatactatgtcgacgcaggactcagcgggatggaaatgtcaaagcgcgttgaactgcaaagactgatctccgatatggccaaaattgaggtcatcgttgtgtacaagcttgatcggctggccagagacactgttgatgccttgtatatgataggaaaaattttcaccccaaaaggaatttgtgtggagtccgtccacgactttgccaggtatgaaaccccacaggataagttccagacccaagtaatggcagcagtggcagaatacgatcgaaacacaatgatgcttcggatgcgcggaggcatgttggaaagggtgaaaaggggcttctggatgggaggcgggaacctgcctttttgttacagctatgacaaggagttggggatcctggtccccattccagagcgggccgaaacagccagaaatgcccttgaactttacattaatggttacagtgacggacacatcgccaggatttgccattatagcggggaacccgtcgctaaaaaaatccttacttcagtggtgaacatcgggatgattccttataaaggcaaggtgtaccagggcaaacacaagcccatctttgacatagagagatacgagctggctcaggaaatccgaaaatctagacacgatgccaaaagttggattgcgcatcctacaaatctcttgacaggtctgtgctactgcggtgtttgtgggtgcgctatgcggtaccagaagtggggtcaaaaggaggatagtcctaggaagatctattgctgtagcaagaacatagacttggattacctgccaaactacaatcatgactgcgacagtaagccccagtgggctagcgatatagaagagcaggtggaaaagcaaatgctcgagatttctgtgaacctgtccaagtacaagccgaaagagaaggaaaccaaacttcaaatcatgcagtctcagctctcaagggagaaaaacaagctgaaacgactctatatactctatgcagagggcaacgacaccgtgatcgagctgatcaagcagacggaggaagaggtgaaacggattaccgcagccattgaagaggagtcaaaagctactaagaagactcagaagaaagagtttgtatatgacaacataaagaagctggcggatgtatggaacaagattgacaaacaggctaaaaataagatcttcaagacaatcatctccaagattgtcattgccaatgataatatcgagatccaactgaaaaatttc

SEQ ID NO: 1311 - DNA, 1347 bp, unidentified
  source 1..1347: mol_type = unassigned DNA; note = Bacteriophage uvig_135914 from the Index of /pub/databases/metagenomics/genome_sets/gut_phage_database (ebi.ac.uk)
atgtctaaacttcaggttgcttatcttagggtcagtactgaaactcaaactgaaaagtatgggctcgatatgcagaagcagaaaataatggactattgcgaaaagcatgggattactatcgataagtggtatattgatggcggttattctggttcaaagctggacaggccagagatacaagagctcttgaatcatgccaaaagtggaattatcgatacagtgtatatctacaaactcgaccgaatgtctcgggatgtgatagatacccttaatctgttttacaagatcctgcctggttacggcgtgaaggtcatctccatgaccgaagagctgcgcacggaaaatccgatggatagaatgatgctgacgatgaatgcagccatgaaccaatacgagcgagaagttatcagaatgcggatgagcgccggcatgctcgagagagtgaaaaaaggatactggatgggcggcggacgcaccccttggggatactactatgatcgcaacgacggaattctgcacatcaatgaacagcaggcctctgtggtcaggaaagtgtacgacctgtacctgaacggctttagctgtgagaacattagtaagattctgggcttcaagggcgagcccatcgttaagggaattctgaagcgaaaatccaacattggactgatcgaatacaaagggaaggtttacaaagggaggcacgaacccataattgatgaaaaggtgttttggaaagtgcaagacgaaatgaagaagagacatacaaatgcatacttgagctcaggccacctcctgaccgggctgtgccactgcgggtattgtggtgcgaggatgcgctaccagaaatggacagcaaagaccatgaagctggtttgttattcacattatcagtcctccaaagcttacatgcgcaagtctgactgttgtaagaacagaccagtcgatgcctataaggtcgaggctgaagtcgaggagtgcttcaaaaacttcgctatcaatatcaatgaatacaccgagagccaccaggactcaacagagatcttggtggagactctcaaaaaaagcgacacaaaagtgagacggctttatgggctctacgccgacaacccttccgagaacctgctggacgtgatcaaggcggaagaggaaaacatcaagaaactcaagaaaaagttggacgacgccaaaaccgagaagcggtgcgatcccaccaagatcgcagagattcggcacatgagcgatgtctgggacagtctcacgcttaaggagaaaaataagattttgaagcagtgcgtagaggacattgtagtagacaaagatgagatcacaataaggttcgtgactctc

SEQ ID NO: 1312 - DNA, 1353 bp, unidentified
  source 1..1353: mol_type = unassigned DNA; note = Bacteriophage uvig_256011 from the Index of /pub/databases/metagenomics/genome_sets/gut_phage_database (ebi.ac.uk)
atgaaaaagatggatgttgcttacctgagggtctcaaccgagacacagactgaaaaatacggactggatatgcagcggcagaaaatcattgattattgcgaacggaacggggtcaccattgacaagtggtatgtggacggagggtacagcggctcaaaacttgatagacccgatattcagaagctccttgatgacgctgagaacggtcttattggcagagtgtttatctacaaactcgatcgcatgagccgagacgtgatcgataccctcaacctgatctataggattttgccaaagtacggagtcaaagtgatcagtatgacagaggagatccgaacggaaaaccctatggacaaagtgatgctcactatgaatgcggccatgaatcagtatgagagggaggtgattaggatgaggatgagtgcaggtatggtggagcgcgtgaagaaagggtactggatgggcggcggaaggactccatatggatattattacgaccggaatgacggcatcctgcacgtggaccaggaacaagctgagctggttagaaatgcctatatgttgtatctggatggcacctcctgtgacaaaatatcaaaaatgctgggcttcaaaggggagagaattgtaacccaaatcttgaagcggaagtccaacattggctacatagtgtataacggtaagacatacaaggggctccatgagcccattgttgatgaaaagacgttttacgacgttcaagaaatgatgaaaaaacgaagcactaacagccatgtctctaatggaaatttgcttacaggtctgtgctactgtggcgtctgtggagccagaatccggtatcagaagtgggggtcttaccacaagctggtgtgctatagccaggacatacattctggcaaggactacatgaagaaaagcgatcactgcaataatgcaaagataaaggctgattacgttgagcatgaagtcgaggagtgtttcgtacaatttgccatcaatatcgacgatagtaagcctgagagtatagaccgcacagacatcatagagaaacagatcaagtccatcaactcaaagatcaagaagctgtacgatctctacatcgaacgccaatctgataacctgctcgatatgatcaattccgaggaggaaaaagtgagagacctggaattggaaattatcgccgagcgcaacgattctaacgacgggctttccgaagaaaagatctcccagattaaacacatggcagacatttgggacgtgctgaaaatccaggagaagaacaagattctgaagcagtgcattgacaaaattgtaataatgaatggtaacgtcgaaattcacttccacaccatc

SEQ ID NO: 1313 - DNA, 1275 bp, unidentified
  source 1..1275: mol_type = unassigned DNA; note = Bacteriophage uvig_150631 from the Index of /pub/databases/metagenomics/genome_sets/gut_phage_database (ebi.ac.uk)
atgaaaaaagaaaaaacttatcggtgtgctatctacacacgaaagagtgttgctgaagggctggatatggaattcaatactttggatgcacagcgggaagcgggagagaactacatcttcagccaaaagaacgaggggtggaaggtgataacgaagcattatgacgacggtggattctctggcggcaatatggacagacctgccctgaaggaattgttttctgacatcgaaaagggactcatcgacatcgtggtcgtgtacaaagttgacaggctgagccggtctttgatggattttgccaagatcgtcgagctgtttgagaagtacaacgtgtccttcgtctctgtgactcagcactttaacactaaagacagtatgggcaggctcacccttaacatactccttagctttgcgcagtttgagcgggaaattatctctgagaggatcagagataaaattgtggcttccaaacgaagaggccagtggattggaggcctgcctattctcggcttcgatactaactatggcggccgcggtgtatctatcaatgaactggaagcacagactgtcagagagatcttcgacacctatattgagaataggagcatatccaagacaatagaagtgttgaacctgaaagacgttcgcaacaagcaatggcgcacacggaaagggaaggtgaggggaggtcaaaagttctcaaagagtacactcgcacggttgctgaagaacaagaagtatattgggaaagttgatttcgacggtaaagtgtatgatggagatttcgggtacatagtctccgaggagatctttcagaaggcccaggagatcctcgagaataataactttgagaagtgcattccgaccaagaataagtacaatgccttgctctcagggaagctgtattgtgcccactgcggcacactgatggggacacagtacaccaagaaaacccccaccaaaatctaccggtactatatttgttgccatgcacagaaatacggttggaaaacgtgcccacatcccagcctgccagctgatgaaattgagaattaccttgtgcgcgaactgagtgagattgccaactccaccaagcttaggaatgaagtaatagagtcattctatcacaacacccttacgcaaatcagcgacctgggcaagagaaataccgctctctcccgatcacttattgaactgcgcaagaaaattaaaacagaggagagcatcgagctctaccccaaaattagaactatcaagaaagccggaatcggggat

SEQ ID NO: 1314 - DNA, 1347 bp, unidentified
  source 1..1347: mol_type = unassigned DNA; note = Bacteriophage uvig_541260 from the Index of /pub/databases/metagenomics/genome_sets/gut_phage_database (ebi.ac.uk)
atgcgaaaacttaatgtggcctacctgagggtatccacagaagctcagacggagaaatatggcctggatgttcagaaacagaagattctggaccattgcgagaaaaaaggtgtagtgattgacaagtggtacattgacggagggtattccggttctaaacttgaccggcctaaaattcaggaactgctcgatgatgcagagaaaggcctcatcgggaccgtctttatctacaagcttgatcgaatgtcacgagatgttatagacacactcaatctcttttacaaggtgcttcccaagtatggagtgaaagtggtttctatgactgaggatttgaggactgagaagccaatggacagagtgatgctgacgatgaatgccgctatgaatcaatatgaaagagaggtcatcagaatgaggatgagtgccggaatgttggaacgcgtgaagaaggggctgtggatgggcggcgggaggataccttggggatactattacgatcgcaacgatggtattcttcatgtggacgaggaacaagccaagatggtcaggaacgcctataagttgtaccttgaagggtattcttgcgacaagatcgcaaccatgctgggattcagaggcgagcgcatcgttacccaaatcttgaagagaaagagcaacatcggactcatcgaatataagggcaacgtgtaccagggcaaacatgagccgatcgtggatgagaagctgttttgggatgtacaggacgcgattaataagcgaaaaaccaacagccacatatctaacaatcacctcctgacaggtttgtgttattgcgggtactgcggctctaagatgagatatcaaaaatgggggcggagtggacacaggctcgtgtgctactcacactacaagagtggtaagccctatatgcgcaaagtagattcctgtatctccaaaccagaacgggctgatttcttggagaacgagattgaggacgcattcaagaaattcgccatacacgtcgacgagactgagaatgaatgcctcgaccagagcatcatactggaacggacaattaagagtgagcatgaacgcctcaaaaaaatgtacactctgtacatcagctgtatgagcgacgacctgctggagttgatcaaggagaaggaagaatcaatcaagaaactgcagaagcagctcgaggaaaacgaacgggagaagggctgtgacgtggagaagattgaggaaatcaaacagatggctgacgtgtgggattccctgaccgtcaaagaaaagaatcggatcctgaaagaatgtgtcgagaaaattattataaagggcagcgatattgaggtttcatttgtcaccttc

SEQ ID NO: 1315 - DNA, 1359 bp, unidentified
  source 1..1359: mol_type = unassigned DNA; note = Bacteriophage uvig_484218 from the Index of /pub/databases/metagenomics/genome_sets/gut_phage_database (ebi.ac.uk)
atggagtgcgtcgcctacatccgcgtttccaccgaacgccaggttgaagaggggtatggcctggagagccaaaagcgggatattgaagagtattgcaagaaaaacgagatgcttataacagattggtacatcgatgctggcttgtctggaatggatatgagcaagagggtcgagctccagcggctgattagcgacatctccaagatatcaaacattgtcgtgtataaacttgacaggctggctcgggattccgtagacgctctctacatgattgaaaagttgttcactcccaagggtgtgagggtgaactctgtccatgactttgcaaggtacgagacgccacaggacaagttccaaactcacatcatggctgcagtggcggagtacgatagaaacacaatgctcctgcggatgcgagggggcatgttggaaagagtgaaaaacggatactggatgggcggtgggaacactccgtattgttatcgctacgacaagaacctcgggtaccttgtgcctatccccgagcgggcagagcaggccaatagagcgatggatctgttcatcgatggaatgagcgacgtgaaaattcagaggctccttggatataagtcagaatttgtggtgagaagcattatgaccggcattgttaatatcggttacattccttacaagggcggagtatacaaggggctgcacgaaccaatctttgacagagagaagttttacctggcccaggaattgagaaaatcccgcaggaaacaacacacatattgttacaccgagcctcatctgcttaccggactctgttactgccgggagtgcggctgtaaaatgcggtatcagaaaatcactggtatggggattcacaagatctactgttgctctcacaatagttacctggactatctgcccaatcataatccagattgcaataatcctggagcatgggccaacgatatcgagaaagccttcgagcacgagatcttggacatatcaatcaacctttctcaatataagcccaaggccaaagaaaccaagctgcagatacttaccaaacaacttgagaaacagaaggctaaactgaaacgactgtatacactgtatgcagaaggcaatgatatggttctggatatgatcaaaacgttggagactgagattcgcgagacaaccgaaaagctctccgccgaacgaaaaaacggccagcatgagcagaagaaggaatttgtctatgaaaacatcaagaaactggccgacatctgggacggcatcagtaaaagtcagaagaattcaatactcaagacaataatcgacaaggtaattgtggggaaagacgacattgaaattcagcttaagaatttc

SEQ ID NO: 1316 - DNA, 1722 bp, unidentified
  source 1..1722: mol_type = unassigned DNA; note = Bacteriophage uvig_287622 from the Index of /pub/databases/metagenomics/genome_sets/gut_phage_database (ebi.ac.uk)
atgagaaaaaagaaaattgacgcaccgaaagagaaaccccaacgagctgccatctatcttagagtgtccacagcctatcaggtggaccgggattctcttcctatgcaacgcaaagatctggtgggctactgcgagtacgccctgaacataagcgactacacaattttcgaagatgctgggtactccgggaaaaatactgaccggcccgcatttcagaaaatgatgatgcagatcagaaacgggatgtatagccatcttttggtttggaagattgataggatttccaggaatctcctcgattttgcccagatgtatgaagagctcaagaccctcggtgtgaccttcatctcacgcaatgaacaatttgatacgtccacggcgatgggcgaggccatgttgaagatggtgctgatattcgctgaactggaacggaaaaccaccgccgagcgcgttacagccacaatgatctcacgcgcaaatgacggcacctggaacggaggccgagtgccatttggatacgaccataacaaggagacccagacgttttccgttaacggcgacgagagttttatcgtactcgaaatgtatgacctgtacgagaagacagactcactggtgcacactgctagggagttgaacgatcgcggctacgtcagtcgacagcacaatccttttagcccggtcagtgtctggaccatcttgcggaacccgtggtacattgggacctacaggtacaattactataagatccctggcagaaaggcaatcaaggatgagagcgaatgggttgtgattcctgaccaccatacaccattggtatctaaggaacgcttcgatcgggtccagaagatgctggacagcaacgccaggtatagaaacacacctggtagatccgcgacacaaaaaaatgtgaatatcttctcaggactcatctggtgtgcctgctgcggtgctgcattcaccgcctctccaggcaaactgcatgctagcggctataggtctgcaaagtacgggtgcccaaatgtccgaaaaaccaaaacctgtaatgcaaagtacacttccgataccgtgttgggggagtttctgctgaactttatcttgaacgtaattaacgcgcaaaagagattcgaccagataaagagtccagctgatctggaggctcagctgcttcgaggagatactttcaaaaacgtcgctggaattgacagcgccagcgttgatgccctgtatgaaatgttggcagagtattctcccgctgactccgtgctgctgaagaagcccactgtcaaaaagaacctggaccccgagttgcgcaagcttagggccgacaaaagaaaaactgagcgggcgcttgccaggcttgaccacatctatctctactctaataagcaaatgagcgacaaggagtacctgattaaaaagaacgatctcatgaatgacctgaaagagcaggataagagtataggtctcctgacttccgaaagttgggcccagagcttgtcagatgacgatttcctcgagcaggcaagctcattcatcatgtctcagcgcttgcaggaacgggagtacatctattttcaggggctcgctgaatgtactgaaccctcagtgctgcggtctttctttctctccattgtggacagtgtcagaatgaggaatggacacgtggaaacactcacgttcaagaatggaatctctcacaagttcacatatctggccata

SEQ ID NO: 1317 - DNA, 1695 bp, unidentified
  source 1..1695: mol_type = unassigned DNA; note = Bacteriophage uvig_138265 from the Index of /pub/databases/metagenomics/genome_sets/gut_phage_database (ebi.ac.uk)
atgaccaagctcaaaaaggcagcattgtatattagagtaagcacccggtaccagatcgataaggactccctgccgttccaaaagcaaaagctcatagactattgcgaattcatggggattaaggattacgaggtctacgcggacgaaggcttctccggcaagaatacagatagaccttcatttcaacgaatgatgagtgaactgagaaacggggacatctctcatattattgtgtggaaggttgacaggatctcacggaacctgctggattttgctgcgatgtacactgagctgaaaaaataccgcgttacctttgtgagcatgaatgagcagttcgatacaagttctgcaattggcgaggccatgttgaaaatcatattggtgttcgctgagctggagcgaaatatgaccagcgagcgggtgacatccatcatgctcaatagggctgaacacgggcaatggaatggggcccgaatgcccatgggttacaagtgggatgataaaattaagttcccagtgccagatgaagaggagtcaaaaaccgtgcagttcatctttgacaagtatgaagaagtacacagctgtctcactgtctcacgctaccttaataacaataatattaacactaagcggggcggcaagtggacgagcaaaactgtcaacgatattattaagaaccccttctacataggaacctaccggtacaacgtaagggaatctgccaggggtaaaatgaaacccaagagtgaatggatcgtgaaagagaacaatcacacaccaatcatcgagaaggaccagttcgagcggtgcgcagccattatccagagtaacctgaaacgcgataccagcgagtaccgcagaacaaattatgtccatatcttctcacacttgctcaagtgcggaaagtgtggtagtggcttttgtagtcagaaagataaaatgcgctctaacgggtaccgcccttccatgtatcgatgcgccaaaaggatgcatatgaaggattgtgagcagaagataattaacgacaccacgattggaaacttcgtgttcaactacgtgtctaacgtggtcagagtgcaaaaggactttagcaaaattaatagcctcgataagtttgagaaggccctgcttaaaggacctgcgttcgaagacatcgctaaaatagaagaagccggactgcagcagatgtataatgctattctctataattcagcaacttccaattctctgtcttttgattttctttccacaacacaggccgacaataataccgccgaaatcatacttcttacgaaggaaaaagagaagtatgctaaagcagttgataggctgctcgacatctatctgtatgacagcgaggctgtctccaaagaggaattcgcaaagaagcagaaggacctgcagagcaaaatcgacgtaattgacgagaagatagagaaccttaagacctccgaggctaataacaagaaccttaaccctttggacactagttttatcaaaaaagccaccgcgtttctggtttcccagaaaatcttgtccgccagatatattgattttgttgaccttgccctgaattcagacccccagatcctgaaggattttgtgtctcagatcatcgagtacatcacagtggacgagaacaaggtcactaaaatcaagttcataaacggcattgaacacagcttcatcaggaaa

SEQ ID NO: 1318 - DNA, 1359 bp, unidentified
  source 1..1359: mol_type = unassigned DNA; note = Bacteriophage uvig_378326 from the Index of /pub/databases/metagenomics/genome_sets/gut_phage_database (ebi.ac.uk)
atgacagatattggttccgggtccagtgacatctatctcgatttgtacctccatgatggcgctacagaacgaaccgtgatgcgaattgcgctctacgcccgggtctctactgaagaacaagccatacatgggctctccatcgaggcccagtctgaagcactggaggagtgggcaaagcaggagcacgctaatgtggtggggacctatattgacgccgggattagtgcaaggaaaccagccagtaaaagaccatcaatgcaaagattgcttgccgatatcgagcgaggaaagattgacatggtcgtctttacaaaactcgatagatggttcaggaacatagctgagtattataaggtacaggagatactggagaggcatggcgttaactggcggaccattcacgaagactacgatactagtacggcatcaggccgcttcaaagtgaatattatgctggcagttgctcaggatgaggcagaccggacctctgaacgaatcaaggctgtatttgattcaaagcgcaaacggggagaggttgttagcggatccgtgcctcccggcatcaagatctgcaataagaagttcattgttgacgaggacaaggctcccataatgagggacgtgtttaatttttttatcgccaaccacagtgtgtacgcgacccagcgctacgcggccaacactcacggcttcttgcgggacacaagcacactcaaacgcctgctggcaaacccactttaccgcggcagggtcgtagatgaggctactttcgacctggccaaagaactgctgagcgtgagatcccagaggaactctggatcaccccgaggtaggatctaccttttcaaagggatgctgcactgcgatgtgtgcgggggaatgatgagcggcatcgtctgtaaggacttttactactaccggtgtaataagcatacctttaccggaaactgtccgaatagcaagtatatcagagagtctcacgtggaacagtggctgctcgagagagtcgttagcgaatgcgacgcctataattcccggatcactcaggaaagaaccgagaggcctagaatcgacgatgctggtattaggaggaagatgtctaaactgaaagacctgtaccttagcgacttgattgatcgggatgagtatgagagagattatactgaactgcgccagacgcttgaaaaagtgcaagaagccgaacctccagctcgacccatcgacgtggagtatgtacggtccgccgtggcgatgtatgacgatttggaaagaccggagaagaaagagttctggatgcgcatcgtcaaggagataattgcctaccctgacggcacattctcattcgtgctgcgcaacatc

SEQ ID NO: 1319 - DNA, 1608 bp, unidentified
  source 1..1608: mol_type = unassigned DNA; note = Bacteriophage uvig_598266 from the Index of /pub/databases/metagenomics/genome_sets/gut_phage_database (ebi.ac.uk)
atggccgaagaacacaagatcctcagatgcgctatctacacaaggaaatccaccgaggagggcctggagcttcagttcaattcactccaagcgcagcgagaagcttgcgaggcctacatcaaaagtcagaaacacgagggatggaaactcgtccccacagagtatgacgatggcggctattctgggggcaaccttaatagacccgcgcttcagcgattgctgaaagacatagccgacgggttgattgatattatagtggtttataagattgatagactcacccggtcactccacgacttctctaaaatcgtcgatgtgctcgaagaaagaaatgcgtcctttgttagcatcactcagcatttcaacacttccagtagcatgggcaggctcactcttaacatgctgctgtcattcgctcagtttgaacgggagatcacgggggagaggttgcgcgacaagattgcagcctccaaaaagaagggcatgtggatgggaggaacccctcccatggggtataaacggaaagataaaaagttgtacccagatgaaagccagagtgcaaaaattcagcttattttcgacaagtataacgagttgaagtctgtacagcgcttgaagaagtacctggattcccagcatatctattcacaacacgacaggcctttgtctgtcggcaatctgtatcgaatactccagaatcgggcatacatcggagaagtcccacacaagggagtgtggtataaaggagaacataaagggattatcgaaatcggtgtctttcataaagctcaggatacactgcaggagcacagaatagaccggcagaggtacgagccgcagaaatctctgctgtgcggtaagctgtacgatgacaagggtaacaggatgtccccatgttggtctactggtagtaagggtaaaaaataccgctattacgttagccaagccgtcatcaagtgcaagagtgacaagatagggaaggtgagcaaaattagccttctggagatcgagacgtttatcgacaagtggttcaataagcaattcaaagaggacaagagtgtgttcgccaatctcttgaaatcatacagcgtgaacgacaccaagcagatccttaacagcatccaaaataagacaatagagcagaagacacagcgcattctcctgggccgagtggatctcctgcccgaggagattacgttgaccatctatcaagagcagctctgtgaatatatccgctccctgtacgaaaaccggcctattaaagagctgttcaaagagtcactgaaaacttctctcgtattttacgtaaagtaccacatagcagtgatcgacaatggagccaaggctatagtgggggaaagaattgaaaaaaacacaaacaagaccctcgttcaactgttgattcaggcttttaacatttcccacgacatcctgcagggcaaacaggtgaaggatctgtgtgagaagtaccagctgaccgatagatacatgaggaagatcctgacactgcggtttctccctgcaaaggtgatccttagcattttggatggcacccaaggccgcgaaattactgccaagcaactgtttgaacaggccaatcagcataag

SEQ ID NO: 1320 - DNA, 1344 bp, unidentified
  source 1..1344: mol_type = unassigned DNA; note = Bacteriophage uvig_289409 from the Index of /pub/databases/metagenomics/genome_sets/gut_phage_database (ebi.ac.uk)
atgaagcagcgggctgccctgtacgtaagagtgtccaccgaagaacaggcaaaacacggtctttcccttcaagagcagctgaactctcttaaggcctatgcggaaaagaatggaatggatgtcgtgggtgtatatagtgacgcaggcattagcgcaagaaaaccctacacaaagcgcccagacctcctgcggctcctgagcgattgtgaagcccacaaagtcgacgttattctgttcatcaaactcgaccggtggttcaggaatgtggggaattactacgccgtgcaagacatcttggatagatgtggagtttcttggcaggcaaccaaagaggactacgaaacaagaacagcctctgggcgactgaaggtaaacatcatgctttcagtagcccaggacgaggcggaccgaacaagcgaacggatccgctttatcactgaggctaagaaggctaagggacagagcacaaatgctaaagcccctctcgggattaaagtggtcaactcccactacactatcgatcctgagacggccgatattgccagggacatgttcgcccagtatatcgctttgcaatcagcccttggtgtcagtaagtatatgagggaacgatatggcatcactaggacctataacaactttgtgaggtacattaaaaatcgcctctacattggagaagcatacggagttgagaacgctttcccagcactgatagacaagaaggactttgacttggccaatgctatcctcgcacgcagatctacgcgcaacagcagcgagaacgccgatagggtgtatctcttttcccgactgctggtgtgtcgggagtgcggcaagagtatgcagtcagagaccaagattaaaggcgagaatgggaagacatatacttacatctactacagatgccggaccaagatgatcaaggggacttgcaaacatgttcatcgcgtgaaagaggatgtgctcgaggattacctgctgcgcgagattgttcatttgatcgaggcttatcggttccaggtcgaaaaaagggcgaaaaaggagaaggctcccgctgtcacgcccgagtctattagaagaaagatgcaaaaactgaaggatctgtacttgtcagacttgatagaaattgaggattacaagaaagattatgcaggcctgaaagaacagctggaaacactggagatggtgcagaaaatggcccctccacctacccccatatccgagataaagtgccagcttgaagagtatccgagtatgaccagggcgcaaaagaaagcattttgggctcggaccgtccagagaatcgaagccgatgacaatggcgccttctttgtgactccagtg

SEQ ID NO: 1321 - DNA, 1701 bp, unidentified
  source 1..1701: mol_type = unassigned DNA; note = Bacteriophage uvig_57389 from the Index of /pub/databases/metagenomics/genome_sets/gut_phage_database (ebi.ac.uk)
atgcgcatgaaactgcatcgggaagaggagcaccgcaaggctgctctttacattagggtttctaccatgtatcaaattgacaaagaatccctgccccaccagcgggaagaacttacccgctatgccgaatacgcactccatatcagcgactatgaaatttttgaggacgccggctttagtgggaagaataccgatcgccctgcatatcaggagatgatggcccggattcgacaacatgagttcacgcacctcatcgtggataaaatcgataggatctcaaggaaccttctcgattttgcggccatgtacgatgagctgaaaaaactggatgtcacttttatcagccgaaatgaacagtttgatacgagcagcgccatgggcgaagcgatgctgaaaataatcctggtgtttgccgagctcgagcgacacatgacatccgaacgagtgtctgctattatggttgacagagcgaagaaggggaaatggaatggggccaatatcccactgggctatgactggtccgaaaaagctggttaccccgtcgaaaatccccaggaagtaaaaatcgttcaaatgatgtttgacatgtacgagaaagggtactctagcaacaggctgacccaatatcttaacgatcacggtattagggggaagagaaatggcctgtggacaactgctagtgtcagacaggtgctgactaacccattttacaaaggaactcttaggtacaattaccggcataaggctcgcggctgcattaagaaggagagcgagtggatcgtcattgaacataaccaccccaacattatatctgaagagcagtgggagcacgttaatgagattcttaagagtcatagtgtgacacggattcggaagaaacacgatcatgccttctccggactgctgacctgcctgtgtggtggaactggtggcgcaaggctcgacaagcctcggcagaacggcgtgaggccttcatactatgaatgcaatacacactggcgcgtctccaagacactctgtaacaacaatcttgccatgtctgacatgctgatcgggaccttcgtcttcaactatctcaagaacatgatcagagtgcagcagcacatgggcgagctggagacaccggaagcaatggaggcagagctgttgaagggggattgtttccatgatatcagcggcatagaaaaggccagtcttcaaaagatctacgccgtgttttgtaagaactccaatgtggcttatcaagagagcgaagcacttagatatgacgaccctgcggttattgccggaaatcaagtgaaagagctcgagaaaaaacggcaggcacacgagagagccctcgagcgactgaacaaggcatatctttacgctgagatcggattgtccgagaaggagtacttgcagaaccgccaggaaataatgcaggctatccaggacatagatcagaagatccaggtgatacagccagactccaatagcgaagacgatatagcattcttggaggcttcatctaatttcatcatcaagcaggagctgctttcagacgaaccaattcaatggctcgacttcgccttgcacgtgtctgccgccaccattcatcagtttttgtgcgctatcgtaaccaagatcgtgttctaccagagacggattttgtcaattgagttcaaaaacggagtcgtacacagattcctgtaccgggag

SEQ ID NO: 1322 - DNA, 1671 bp, unidentified
  source 1..1671: mol_type = unassigned DNA; note = Bacteriophage uvig_25407 from the Index of /pub/databases/metagenomics/genome_sets/gut_phage_database (ebi.ac.uk)
atgaagcggatgaagtgctatctgtacactcgagtctctacgagcatgcaggtggatgggtactccctggatgcacagaaagacaaactccggaaatatgccgagttccagaatatgctggtggcaggggagtattgcgacgagggtaagagtggcaaaaatattgagggacgcccagaattccttcggatgcttagggacattgagagtggtaaagatggagtgagtttcgtccttgtgtttaaactctctcggtttggaagaaacgctgcagatgtactgacttcccttcaaagaatgcaggattttggggtgaacctgatctgtgtggaggacgggattgattccagcaaagatagcggaaaacttatgatcagcgtgctgtctgccgtggccgaaatagaaagagaaaacatcctggttcagacgatggaagggcggcgccagaaggcgcgcgaagggaagtggaatgggggattcgcgccatacgggtataagctggtcgacggtcaactgcagatagcggaggaagaggctgaggtcataaggattatctatgataagtacattcatacgaccatgggcacagccagaatcgcctcatggctgaatgagcatgggtactccaaggtgtgcaggcacaacaataagagggaagctttcaccggatccttccttatcggcgtattggacaatccagtatactgcggcaagctcgcttacggcagaagacataacgaaaaaattccggggactaggaaccagtatcatatcgtgaagcaaaaagattatgctctgtacgacggcatacacgagcccattatctccgaggaagattggcaactcgcccaaaagcagcggcagcagaccaataagaggcagcttaagacacactcactggaccacgagcatgtgctcagtggtctgttgaaatgccccgtgtgtggcggcggaatgtatggcaacgttaatcggaagaaaaagggggatggcacctactaccgggactatttttactacgcatgtaagcaccgcctccacgtcgacggtaagcgatgtgactaccaccaccaatggggtgaggaaatcatcgatggcgccgtcgaggagattatacataagctcgtgaatacacctgcttttgaacagggcatccgcgaaaagataggaggaaaactggatacagccgagcttaacgccgagatggaagctctgcgaaaacaactgcgacagctgactggaacaaaagaccgccttggcgaacagattgatgccttggactttgatgaccctcactataccagaaaagctcaggaccttcaggaaaggcaaaacagagtttatgatcagatcgcatcaatcgaggtttctattgccgaggtccagaccaggatggacaatatcagacagcataggatcagcacagataacgtttatcagttccttttgtatttcgataagctctacgaccagttcactgacttggagaagaagaccttcatgaactcttttatcgagcgcgtagaaatctaccccgagaggcggagcgacggccgaattgtgaaacgcattgagtttcgatttcctgtttacttcaacggcagcaagattactggactcggttgggacgaaaccgacatgtcagagaatgtcatggtgttggcaaaactg

SEQ ID NO: 1323 - DNA, 1359 bp, unidentified
  source 1..1359: mol_type = unassigned DNA; note = Bacteriophage uvig_351737 from the Index of /pub/databases/metagenomics/genome_sets/gut_phage_database (ebi.ac.uk)
atggagatgatcaaagtgggactctatgaccgcgtgtcacatgatgagcaggccctctacggtgactctcttaggacacaaatcgaagccttgagaaagtacgccaaagagaagaattacataattgtcgatgagtatattgatgacggctatacggctacacagctgaataggccgggcttgcagcgcctgctgcaagacatccaggatgggaaaatcgatatgatattgttcacgaaaatcgaccgctggtcccgaggtgtgaggaattactataagctgcaggacatactcgacgagcataatgtcgactggaaaactatttgggaagagtacgataccaccactgcggctggcagactccagattaacatcatgctggcaatcgctgagaacgagagtaacgttacaagcgacagaatcaaagttgtcttcaaaaataagcttgaacggggagaggttatttctggcagcgtgccattggggtaccgaattaaggacaagcacctggaagtggttgaggaactgaggccactggtgagggacatctttaacaactacgaacggcttatgtccctgtcaaagctcgtggattattataaggataagcatcagggactgacctactggcggctgaaacgcatgctggagaattatctgtacatcgggatgcacgtcagcgattatgggatctaccgagacttctgtaccaagattatcgaacccgagcagtttgaacgggtacagcggctgctcgcaatgaatgcaaagcattataagaaagcgaaaagtaaaaacgagtacatcttcaagggagtgctccgctgcgccgattgtggcagaaaacttggcggtaatgccgggcgaaagacatataagtaccctagccaaatgaagaacacttatcgctgcaactggcactatagagacaaaacgtgccctaacaattacaacattactgagaaaatgatcgagcggagacttctcgagcagataaagcccgagctggagaagtaccttcttaccatagacattaagaccaaagaatacaagtcaactgctagtatcgatatcggaaagatcaataagaaattggagaagctcagagacctctacatggacgaccttattgataaagatcactacaagaccgagtatgagaggctgacaaaactgttgcaggaaaaggaaaaagtagaaaaacccaggattattgatgaaaagtctattcagcaattcctgtccatggacatcgaattgatctataaggatcttacaaaagccgaacgcaggagactttggctttccattatagatcacgtggtggtcaaccgggaaacctttgagataacttttctg

SEQ ID NO: 1324 - DNA, 1710 bp, unidentified
  source 1..1710: mol_type = unassigned DNA; note = Bacteriophage uvig_155989 from the Index of /pub/databases/metagenomics/genome_sets/gut_phage_database (ebi.ac.uk)
atggaagagcagaagcaaattaggtgtgccatctacaccagaaaatctacggacgagggcctcgaaaaggagttcaacacactggaggctcaaagggaggcaggtgagaattttgtgatgagcatgaaacatcagggctgggttatcttgccggaaaggtacgatgatggagggtttagtgggggcaacctgaaacgcccagctctgaaacggctcatggctgacgtggagaaaggcatcgtagatatgattgtggtgtataagatcgacaggctgacccggagcctcttggatttcgcccagctggtgcagacattcgagaaaaataattgtagcttcgtgtcagtcacgcagcatttcaatacctgcgactccatgggcaaactgaccctgaatatcctgctctcttttgcacagttcgagcgagagcttggggccgaacgagtgagagacaagattgccgcatccaagaaaaagggaatgtggactgggggcgctattcccctggggtacgatgtcaacaacaagaagcttgttattaacccagccgaagcggaaaccattagattcatttttgaggattataagcgcacgcgcagccagatcaggacagttgaggaccttaacgaaaagggctttaagccaaaaacttggaagaccaaaaccggtaaaatcgtcggctgtgaaatgttcaatcacgcaatgattagtaatattcttaataaccctatctacataggaatggtgccctacaaaggcgagctgtataagggtcagcataaggctataattactcaagaactgtgggatgagactagaaaagtgaagaaggataatatcggcacagcctttcgcccgtgcagaagcgttaagaactctctcctgaaagggctcttggaatgctcctgctgtggaactatgacacctaccagatccaagcgcggtaacaagtactatgagtattatacctccctcaaagctgtcaaagagggcgccaacaacgcccactgccagataggatccatacctgcaggagcaatcgacaactttgtcctggacaaagtaaagaaaatcttccaaactcctgagttgcaggaggaactccttaaggaattcaaacgacaaaatgaggattttaatggggccgacgttcacaacatagtacaggacatcggacaggcctttcagtattttgaacccgcgacagtgcacgagttcatcacagaagttgtagagaaggtgattgtctacactgatcacatcatcatcaaacttaggccaatgagcgccgacttgttcgagcgaggggccattgagaaggactcacattataatgaaaagttgctggaactgagttaccccatcaagttcggccgcaagagaggatgcgtgcagattgtggagccaaaccagccctcaggcgaaacatgtgagagggatatgaaattgtacaacgcagtcacccaagctttctactacaagcaggtgatggacgatcaaaagattagtctgtctgaactgtctaagcgcgaaaagttggaccgggggtacatgggacagatattgcggttgactacactggctcctgatatcatcatggccataattgaggggaggcagcccaaacttctcaccgcgcggcgactgatcagagaccactttccatattcatgggaggaccagcggcgggaactcggttttaatcctgct

SEQ ID NO: 1325 - DNA, 1296 bp, unidentified
  source 1..1296: mol_type = unassigned DNA; note = Bacteriophage uvig_321891 from the Index of /pub/databases/metagenomics/genome_sets/gut_phage_database (ebi.ac.uk)
atgaaaaggattatcgccatgtacctgcgggtcagtaccctggatcaggctaggaatggttatggactgggagaccaggaagtccagtgcaaaaagtatatcgacttgtattatcccaacgatgaggtggagatctacaaagacgatgggtacagcgccaagaatctggaacggcctgagatggcacgcatgctcgacgatatgaaaaagggcaagatacacactataattgcattcaagcttgaccgactgacacggaacgtcgtggatacgtacaagctcatcaaacaagttatggactacaattgttcactggtggctgtcgttgatcgacttgacattaccagcgctaatggaaggatgttcgtggggctcctgtctctgattagccaatgggaacgcgaagtaatctccgagcggaccattgctggcttggagcagatggtaaggagtggcaagtatccatgcgggggcaaggccccatatgggtggaacaagacagaagatggaaaacttgtgattaacgaggacgaggccgaaatcattaactatatgactgattgttatatcgaggggtactccttgaaggacatcagcaaaatggtgtttgcgaagtacggttaccgaaaatcttggaggcacctgaaagaattgcttatcagaaagctgaatatcggagtgttcgagtttcatggtgcgagttatgatgacttcgtgccccctataatgaacctgaataagtacaacgagctgctcaaaatggccgcacatagagaagttcacagtcttgagaagcagacttatacatttcatcacctcgtatactgctcctgtggcgagatgatgcagcatgtgtgcactatcaaacacaacagcggcgtgtctacgatctaccgctactattactgttccaagtgcaataagagagtcaatcaatctttcctcgagaaagagatttttgaaaccctttttctggaggaatttcgcataaaaactattgaaaagcataagaaacaggagctcattctcagctcactcgatgtcaagaaggaggaggttttcaatgcttacaaagaaaacatcattgacttcgacacctataagttcaccatggccaagctcgagaaggaaagaagcctggccttgaaggagctgacatcattggatatcgtgtctaactcaaagtattttgaaatgacacaggacgagaaatacgcatacgtgcacgacatgatctccaaaataatctttgatttcgacgaacagattgttctgtccatacaattcaaaaaaaag

SEQ ID NO: 1326 - DNA, 1314 bp, unidentified
  source 1..1314: mol_type = unassigned DNA; note = Bacteriophage uvig_151301 from the Index of /pub/databases/metagenomics/genome_sets/gut_phage_database (ebi.ac.uk)
atgcagcgggcagccctttatattagagtgtcttctgaggaacaggccatacacgggctctctatcgcagcccagaccgagactctcgatgcttgggctcaggaaaataagatctatgtgttcgaccattacatcgacgcgggtatttcagctcgaaagaaagcctccaaaaggccagagctccaacggctgttggaggacgtcaaaagtggacagatcaacctgattgtttttacaaagctggaccgctggttccggaacattgccgagtactataaagtccaggaagtgctggagacctatcacgttgactggaaaactgtccaagaggactacgataccagtacggccagcgggagactgaagattaatatcatgctgagcgtagcgcaagatgaggccgataggaccggcgagagaattaaggccgttttcgagtctaagacactgagaaacgaacctatctccggaaaagtacctctgggatacaagatcgaaaataagcacatcgtcatcaatgaagagaccgcacccatcgccatcgatctcttcaacaagtacatagctattcgcagcatttccagcctccgaaagtacctgatggatacgtacggaattgcccatagtcataccgcaatccgcgtgatgctcaagaacgagagatacattggtcgcgctcacgatcaggagaactattgcccagcactgatttcacagaaaacttttgatcacgtccaggaaatccttaatataagagcacagagatcctccctggaacgaactggcagggtctacctttttacggggatcgtgtactgtgccgagtgcgggaacagactcagtggccatgtggtggctcaaaaatatatctattaccgatgtactaggtatgagaagcttcatctttgccagcacaagaaacggacatccgaactggtgctggagaaatggctgctggaaaatttgttgaccgagttcatgaagtacaacgaaaggctggaagctgaggtgcaaagggcaaagcctctcgttgatacagctaggataaggcggaaaatggagaagctcaaagatttgtaccttaatgacctgattgagcgggacatatatgaaaaagactatacagccctttctgcggaattgaacgtggccactaagaaacccgtaatcggcaagcccgtgaatatcgacaagcttagcgactcattggctacatattcaaccttgtctcgcgaaggccagaaagaattttggagccggactgttcgccgcattgatataaccaacgaggacgtgtttagcgtcacaccgatc

SEQ ID NO: 1327 - DNA, 1545 bp, unidentified
  source 1..1545: mol_type = unassigned DNA; note = Bacteriophage uvig_522525 from the Index of /pub/databases/metagenomics/genome_sets/gut_phage_database (ebi.ac.uk)
atgtataaacgaatcggcctctacgcgcggtactccgacacgaagcaggacgatggctattccattgaataccagatgtctgaatgccaggactatttgaacaagcaagggcttagcctcaccaagacttatatcgaccaggcaattacagggacaaaggtggcaggtagagaggccttccatgaactcttgaatgacgttaaaaacgagctcattgatgtaatcgtcgtgtacaagttcagcagaatttttcgcaatgcatatgagtctcacaagtaccggaagctgtttaaaaaacacaatgtccgccttatctcaattacccagcttatggatgatgatacctccgcaggacggctcatgattaacgtgctggctgatatcgaccaattccagtctgagaccatatcagatttcgtgaagagttcaatgcgggagatggccaaacagggctacttcacaggagggacagttccctatggatacaagctggagactgtgttcgacaacggaaagaagaagaagaaaaggtatactcccgatgaatttgaaaaagaagtcgtgaagaagctgtttgaactgtacgctgataactatagtctgaaataccttcaggactataccaaaagcattggtgcctccactagacagggtaagccctttggaatcacttcaatcgccagaatgttgcgaaatgacttttacattggagtacttcggtacaacgctcaaggccatgaaccaattgtcgtttacgacgtaatcccgccaattatcgataaggtgctgtgggacagggtgcaacaacgacacaaaagtcagaattatgtgaagccaaggaaacggaaggacctgtactcccttactggcaaaatcatctgtggcaagtgtgggaaacacttctttgggataaggtctgccagcgtgcagcgcgggaagaagtatgactacaagtactatgtatgcagcacgtccaaaacttatgcggagtgcacatgtaaaagggtgaggaaggactttcttgagaaaacagtcctcaacgagatcaagaagcacattctgaacgaaaaagccatctaccaaatcgctaatgagatcattgccaagctgggcgagaaccctgactcccagaaaaataagctgaagcagttgaaaaaagagcttagcactgttaagagtcagataagcgaattgctggaactcagaagcctgaaactcgtcaacaatgcatatgtggccgaacatatgaaaaaatacgaggaacgcgctaaagagatcgatatccagataatgtcaatagagcaacagaccaaaatgaccatctctcgcgctatgatcgtcgattatctgaataagatgatgtctattagtgataccacagatgacgaggttctgcagacgattttcaacaatttcgtggagaagattgtgatagacaacgaggttatagaggtgttcctgtttacctcccctaccacagaacagatcggccataaacttccgcacggtcagcctgagtggtctttgtacaccaagacaaagaga

SEQ ID NO: 1328 - DNA, 1740 bp, unidentified
  source 1..1740: mol_type = unassigned DNA; note = Bacteriophage uvig_517329 from the Index of /pub/databases/metagenomics/genome_sets/gut_phage_database (ebi.ac.uk)
atgtctgagaagattatcaattgcgccatctacacaaggaaaagcaccgaagaagggttggaacaggacttcaacagtctggacaatcagtacgagttttgcaccaattacctcaagtccttgaatgaccccactcttcacctgctgccaactcgatacgacgatggtggatatagtggtggcagcctgaatagaccggctcttcaatgtcttctggccgatatccgatgtggcctcgtcaatcgcgtgatcatctacaaaatagatcggttgacgagagagatacgcgacttctttaagcttctggatgtcttcgagaagtataatgtagaattcgtgagcgttaaggaaaaccagtactacaacactaccaccgctatcggaagattgatggtcaatatgtttttggtgttcgcccagtttgagagggagaacgccggtgatagaatcagagacaaaatcgcgacttccaaagccaaagggatgtggatgggcggatgcccgccatatggctatgatattggagaccgctgcctcgtgattaacgagactgaagctcagaatatacgattcatctatcagaccttctgtaatacacactcactggccgacaccaccgaagccctgaattcaggcggtatccggacaaagtgttacacaacaagacaaggccgcactttcggcggacgcaagttttcagttaaaacagtgcagcgcattttgcaaaaccccctgtacaaagggatggttacccatcgggacaaacagtaccccgggcaacatgccgcaatcatcgatgccacacagttcgatttggtgcaggcaatttttgctgcgcacaaggacaaacgggaagctcggaggtgccctcaaaaggcatctggcggggagagggagacagcagctcttacgggcctgattttttgcggctgttgcggaagcgcgatgactccttcctactgttgcaaaggagatattaggtaccattattataggtgctatcgccgggcctcaaagctcgaggataagtgtcctattaaccagatccggaccagcgagatagaccgagtggtaatggagcaggtgttggcaattctgaagagtcgggaattctttgtccagtacatttcccaccatcacgagttcgacgtgtctaccgccttcgcattgtttaataatctggacgatgtctggaactctctctttgaaacggagaagcgacggatactgagagaattgctggcaaaggtaaccatttttaaggacaagatcgtgctcgacgtcaaaaagtctggcctggctggggttttcgccgagctctctcagaacaacctgctggccgaggtcgagtataaggaaaacgagacattccagattagcattgcttatagagctacaagactggcaaacggtgccaaaattatagtgccagcaactgccaaagaggagagtcgctttaacggctccctcaggcttgcaaggcaaatcgctaagggattcgcctggcgcaagatgatggagtccgggttgagcctgcaggaactgacggcgtccgctaaaactaacgaaagagacatcaggttcgctatgcggctttccatgatcgatccagcgatcgtggaatctgttctctcagggaagagtcctgaatttctcacctatgcctttatgaaaaagcaccccatacccttgctgtggagcgatcagaggaaactctacgggttcgaggagcggaaacag

SEQ ID NO: 1329 - DNA, 1620 bp, unidentified
  source 1..1620: mol_type = unassigned DNA; note = Bacteriophage uvig_11457 from the Index of /pub/databases/metagenomics/genome_sets/gut_phage_database (ebi.ac.uk)
atggtttttgccatctactccaggaaaagcgtgtttacaggcaaaggcgattccatagagaaccagatagagttttgtaaagagtacgtatacaagaattatccagacgaagatattaaggaaagtgactttaagatctatcccgatgaaggctacagcggtggcaacactaatcgcccatatttcaaaaaactgctggaagacgccgagaataagaaaattgattgtgtggtgtgttataggctcgaccgaatttctagatccgttctggatttttcagcgcttatccagaaactgaataagctcgacatttcatttgtctctattaaggagcagttcgatactagcacgcccatgggtcgagctatgatgtatatttctagcgttttcgctcaactggagcgggagactaccgccgaacgggttaaagataacatgtatgagttggccaaacagggcaggtggcttggcgggcatcctccatatggattcgatttcaagaaaatcatctactacgacgagcagatgaagcaacgcaagatgtgtcagctcacagtcaatgaggagcagatgaaaattgccaaggaggtgttcgaaaagtacttggaatacaacagtatcggtagagtcgtgacctatcttaatgaaaaaggggtaaaaggtgctcgcgggggagagatttgcagccgcaatgtgcagagcattttgcgatctcctgcatacgtcaagacatcaaacgaagtgtttatctacctgaaggataagggatgcttcgtggccggcatcccggacaatatgcacggatcattgctttatgcaaagaaatcccagagccctattgtggccgtggcaaggcacgagggggtgatcgagtcagataagtggttgaaagtacaagagatacttgacaaaaacgccgaaaaagctccccgggctgggacgggaaaggtggcattgctcagtaatcttctcgtttgcgggaagtgtaagagtaacatgatcctgaattacaagagtaacagcgacatcgtgtactatgtttgctctaagcggaagagacaaggcaaaaagacatgcgattgcagtatcctcaggactgacaaaatagacaaactggtcctggatcatatcaagaaagtagacgtgaaaaaaatcatcgaggagtataacaacatcaaagaatcaaacaccgaagaaaagaagctggtcgaactcgaagtgaagaacaagaagaagaagattaaggatctggagctgcaggtgaacaacttggtcaatcagctggcgaatttcagcaattccaccgcatctacctacatcattgagaaaatcgaggagctgaacaaggaaattaccgatataaagttcgagattgataagttggacatcgacaaaatctccatctctaaagacgacctgaacttggacattctcatcgacaacattaagaagtttaatagctctctggacaatctggagttgtcacaacagagattgctcctctcctccataattaagaacgtcatatggaatgatgaagagaactccctggagatcaactacctgggacttgaaaatatagataactacggcaaaaaaagtcacttctgtaatgacaag

SEQ ID NO: 1330 - DNA, 1704 bp, unidentified
  source 1..1704: mol_type = unassigned DNA; note = Bacteriophage uvig_285452 from the Index of /pub/databases/metagenomics/genome_sets/gut_phage_database (ebi.ac.uk)
atggaggagcagaaaaaggttagatgcgcaatctacacaagaaagtctactgacgaaggtcttgacaaggagttcaatactctcgaggcccaaagggaggcaggcgccaattatattctgagccagaaacaccagggctgggtgcttctggacgagcggtacgacgatgggggcttttccggcggtaatatcaataggccagctttgaagagactgattcatgacgttgaagctggaaaaatcgacatgatcgtagtctacaagatcgataggttgacacgctctcttgctgatttttctaaacttattgaggtcctggataagcacaagtgtagcttcgtgagcgtgacgcagaactttaacacctatgattccatgggccggctgacccttaacgtcctgctgagctttgctcagttcgaacgcgaagtgggtgctgaaagaattagggataaggtggccgcgtcacgcaagaaaggtatgtggatgggaggaaaagtacccttcgggtatatgctgattaacaagcaccttgagatcaatccaacagaggcagaaatcgtacgattgatattcaacaagtacagcgcctgtaagagtgaacgcgacgtgtgtacctttctgaaagcagggggatactgcatcaatgcccgcaagcagaagaatgggactgagcttcccgccaaagaattcacggtgtctaagattgattacatgttgcgaaacccaatctacataggaaaagtggtgcataaaggcacagtgtatgacgggcaacaggaggccataattagcaaggaactgtgggaacgcgtggaaaatactagacttgggaaccggcatgggaaacttaaacccagtagagtagtgaggaacgcactgctcaaaggcatgcttgagtgcggctgtggatgcaactcctcaatgattcctacccggacccgcaagaagaacaggacctacgagtattatgtttccctcaaagccgtgaaggaaggctatcaacattgcgagctcggaagtatacccgtcggagagctcgataagtttgttctgagcaagattcagaacatactgaagagcccccttcttctgaacgagcttttgaagtatcttaaaccagatatgcccgagatcggcatgaatgaacttctccagaagaccaaggcacctgaggacttcttcacttatctgtctcaagaatccctgagacagattctcgagaggttgatctctcgcgtcatcatctacaaagacaaacttgttatccggctgttgccgcttggggccctgctcctggaaaaatcccagacggctgatctccaggcttccgaggaacactctggcctggccgagctcgtctaccacattagttttagtcgaaagcgaggccatatgaaagttattcctgccgaagaatcacagacagctgtggacgagacactgctgaatgccctggtcaaagcgcacaactggcgggataaactggagaattctgacatgtcattgcgggagctcgccaggaaggagaaggtcgcacacgtgtacatctccaaaatgatgaagctgacctatctcgcgcctgacatcatcgacgctataattgtgggtacacagccacagagcttgaaaattagtgatctcctgaagtccccgatccctgccagctggtcagagcaaagaactaagtacgggttcaattca

SEQ ID NO: 1331 - DNA, 1779 bp, unidentified
  source 1..1779: mol_type = unassigned DNA; note = Bacteriophage uvig_325705 from the Index of /pub/databases/metagenomics/genome_sets/gut_phage_database (ebi.ac.uk)
atggcccggaaaaatcctaagacactggacgctgcacatcccctgagttgtgtcttgtacataagagtttccactaaactccaggttgaaaagggcgaaagcatcgacgcccaacactttgaattgacacgctacgctgataaccacgacatgcgagtgctgggtgagtatgttgatgcgggattcagcggaaaaaatgtgcagggtaggccccagtttcggcagatgatggatgatatcatcaaggctcaaccatcaaagcggcccgcctacgttctggtgtttaaactttctcgattcggccggaacgccgccgatacctggaactctcttcaaaccctgcaggattatggcgtcgagctctgctgtgtgaaggatgggatcgattccggaacctctatgggcaaggccatgcttagcatcgccgctgtcttcgctgagatggagagggacaatattaggacgcagacaatgtccgggcgcgaggaaaaagctcgcaagggctactggaatgggggccaggcaccattcggataccgccttgtggacaaaggcaataagtttaaggaactggaagtggacgaggatgaggctaaagtggtccgaaggatctttgaaatgtacgcgtatgagaacaaggggtctatggcaatcgcaacctggctgaacaaccacgggattaagaagaagcctaggggcaacgccagaatggacactttttcatccgggactgtgcagaggatgattaccaacccggtgtatatcggtaaaatagcctatgggcgccgccggactgagacgattgagggcactagaggcgagacccacgttgtgaagagtgacggatacgaaatccacgatgggcagcatgacgcgattattgatgacgcgacttgggcagccgcccaagctctcgtaggaacacgaaagcctaatatgaaaacccacgacgacgggcacgtcaatatgctgaacggtttgttggtatgccccgtatgtggccgcaaaatgtcctcaaaaccaaaccgaggaaagctcaagaaggacggcacacggggtaaaacaacatgggcctactattgtccacatacctcaaaagcccgcggcgcatcctgcactttcaagagtcagtaccctcaggagtgcgtcgatgccgaggtggtgcaacttgtaagcctggccagcaggagcgacgccttcgttgacgcgctgcgcagacggatagacgatgccaccgatattgagcagcttaaagaagacatagaaaggattgaaggggaaaaagcagcaaacgacaaacgaatgagaatgctgattacacagattgactctctcgacaccgctgataggagttatgaacggaaattcaacgatttgcagagacgcctggacgatctctacgatagggatgcaggtttgagcgaggctctggacgaaacccaggccaaaatgaccacggctgaaaagcggatggatggagagcgaagacttctggaggaactcgatcggatccctgagctgcttgaggttgcagacgagcaaacacggttcgacctcatccacgaagctgtgtcagaggtgcatatcctgccagataagaatcccagaaaggagagggtggtagctaatgtgacttttaagtgcccagtcagattcttttgggaagagatccccggtgtcgccaatggctatacaccgatgactcctgactctctcggacagaataacttcagagacgatgaggcacatgtcgagacggtggccatacttggacgaaga

SEQ ID NO: 1332 - DNA, 1470 bp, unidentified
  source 1..1470: mol_type = unassigned DNA; note = Bacteriophage uvig_205806 from the Index of /pub/databases/metagenomics/genome_sets/gut_phage_database (ebi.ac.uk)
atgaaagctgcgctgtatacacgagtaagcactgatgaacaagccgaacacggctttagcctggaagctcaaaagaaacggctgatcgagtactgcaacaagaataatattgagatctacaagctttatagtgacgaggggattagtggtcattctattgttaaacgaaaagcccttcaggagatgctccaggacgccaaggaacataagttcaattatgtgatcgcctataagacagaccgcatctctagaaacttgctcgacctgttgactattaagaaccagttggatgaggctgatgtggagctgctcttgagtgatgaggcaattgataccaaggatgacgcggggatgacgatgttttcaataatgggagcttttgcagagctggaacgaaaaaaaatcaccgaacggatgatgtctggaaagcgccagaaactgatgaacgagcatattaaacttaagaacggaagggtgccttatggctatctgtacgacgatgagaacaagaaatatatcattgatgagagccggaggagcatagtagagttgatctataaacttgccagccagggttggtcctataataagatcacacggcacatcgctgaggaaaccgccgccaatagctccgactccaaaaaaaagtggtatatctcagacattagggcaattctgaccaatccaatgtacaaaggctacagtgggatatcatattactacaattttaatgacagagcgaagaagcccaagaactccgctatcctgtacaaagctacaaatgtcgagccttacttcaccgaagagtactgggacaccctctactcccagctcgaaaagaagactcagtatttcaagcgcaagcacccaatcgacagctatatcttctctgatgtgttgttttgcgcaacatgtggtctcaagattggaactcgccagcaccacgcaaattacctgtactatgtgtgcaattccaaacataagatgtacgacaacgaccacatctgtgattacgccattaatataaacaagttcaacaactggtttatcgagttcatcagaggcatagacgagaacaacattaagctttctgtttctaagcccaaagatctggacaaagagcttcaggccgtcagaagccagatttcattgaaagagaagaatagggaagtgctcctggataaactgatgaatggggttatagacgacacagagtacagactggcatccaatatggtgatcgcctcactgaactcccttaaaagtcaggaaaaggaattgtctgataagatggactcactcaaggaaaaagaacaaaccaagcggtacaacaggctgaaaatcaaagccctgaaagtcctcgtcaatgattgggataacctcacggatcaggctaagaaaaccctcatcaacagcagtattaacaagatcatgatcactaaggacggcattcaagaaatagagttcaac

SEQ ID NO: 1333 - DNA, 1335 bp, unidentified
  source 1..1335: mol_type = unassigned DNA; note = Bacteriophage uvig_119010 from the Index of /pub/databases/metagenomics/genome_sets/gut_phage_database (ebi.ac.uk)
atgaagaataagagggtggccctctatatcagagtgtcaaccgaggaacaagccagacagggacttagcctggacgcccagctgacagacttgcgggcatatgcagataagcacaaatacaacatcgttggagtctacactgacgatggcgcctccgcacggaaaaagccattcagccggcgcgcgttcaagcagttgattgaggacattaagcaaaacaagatagaccgagttctgttcatcaagctggataggtggttcaggtctgtcaaggactattataaagcacaggagattctcgatacgcacaaagttgactgggaaactacccaggaagattacaacactacaaccaccaatggaagactgatgctgaatatcaaactctcaatcgctcaaaacgagtctgacatgactagtgatcgaatccattttgtttttgcccagaagcgggctcgacacgagatctgttctggcaagatcccctttggttattctgtgcaaggcaaaaaactgatccccaatgaaaacgcgaagtacgtgcagccgctcttcgaacatttcgtgaagacccagaatttgacagaggccgcaaggtggatgtgtggtcacggtttttactatacttatgccagcatttcccatgtgctgaaaaatgaacgctacatagggaggagccacggagatgataatttttgccaacctcttgtcaccgaggagctgttctaccgggcccagaagatcataaagagtaaaaaattgatcaagcgcacacccaccggtagaattttccttttcaccggattgattagatgtcctatgtgcgggcatccatacacaggcatcgggtgcgtcgggaaaaacaatggcaagacttactactattaccagtgcccacagtccgtatcacccttcaaagcctgtacacatagagggcgagtgacggagaagaagatagaagaggccctcctggacagcttcgacgaagcgtacaaggactttcagtactcagtgaaaaagaagcagaaacagcagcctgtcactaccgatgtggataagcttaaacggaaactggaaaggttgaaagaactgtttctgaacgagctcatagagcttgacgagtacaagaagacacacgcagaactcagtgctgctattgctgaagtggaggctccaaaaattcagccgtccgctcctcttaactattacctgccaggcggcatccggccttattatgagaaaatgaccagggagcaacgccgccagttttggcaacagacagtagacagaattgatttggacgaggataacacgccccgcattacctttctttcc

SEQ ID NO: 1334 - DNA, 1317 bp, unidentified
  source 1..1317: mol_type = unassigned DNA; note = Bacteriophage uvig_115965 from the Index of /pub/databases/metagenomics/genome_sets/gut_phage_database (ebi.ac.uk)
atgactcgcgtggccctgtacatcagggtttccaccgaagaccaaaagatacacggactgagcgttgaggatcagatttctagcttgtcagcatgggcggagaaagaggctgtaatcgtcgcaggcgtctataatgacgctggaatttcagctagaaaacctgcaagcaagaggcccgaactgcagcggctgctcgacgatgtaagagcccggaaaatcgacctgatagtgtttaccaaacttgatcgctggtttaggaatatcggagagtactacaaggtgcaggaggtcctcgagacgtatggggttggttggaaaaccatctacgaagattatgatactacaacagcttctgggcggcttaaaattaacatcatgctctcagtcgcccaggacgaagccgatcgcacgggcgagagaattaaagcgattcacgagtcaaagctgctgcgcaatgagccaattagcggtaaggtgcctttcggttacaagattgagaaaaaacaactggtgattgttcccgaagacgctgagaaagtccgggacatctttgagcattatattgccctgagaagtgtgagggcattgcgaccttatgtgctcgaaacccatggattggtgtacactcagactggcctggcgcagcttctcaggaatgagagatatatcgggcatgcccacggcaagcccgatttttgccccgccatcctgtctgaggaggtcttctttaaggcacagaacatccttaaagtacgggcagagcgcctgaattttagtaggaccaatagggtttatctgttcaccgggatcgtgttctgcgctgaatgtgggaaccgactgtccgcccatgtggtcggccagaagtatgtgtactaccgctgcacccgatatgagaagacacatttgtgtagccacaagaagagaacatccgaacgaactctcgaaaactggcttcttcacaatttgccggctaaaatcgaagagtacaacgtaacattgcaggctcaagaaaaggccaataaggccggaaaggatatcgccaaaatcaaccacaagctgaacaagctgaaggagttgtacctcaacgatctcatctctatagacgactataagtccgattacagtgcattgaaagaggacctcattaaggcgtacagttcccaaacagaacacaagaaaccaattgatgtgcggaaaattactgaactgctgagcaagtatcctgacctgtccagcgccggcaaaaaggaattctggtctagaatcttgaagaaaatagtgataacccagaacgacgacttcttgatagaaccatac

SEQ ID NO: 1335 - DNA, 1266 bp, unidentified
  source 1..1266: mol_type = unassigned DNA; note = Bacteriophage ivig_3513 from the Index of /pub/databases/metagenomics/genome_sets/gut_phage_database (ebi.ac.uk)
atgaagaaacgagtggccttgtatgttagggtgtcaacgcaggagcagaagaaacacggactgagcgtcgactcccagattgccgccctcgaggagtattgtgcggaaaagaagtatacggtcgtggacgtttacaacgatgctgggatcagtgcccgcaaaaaatacaccaaaaggccaggccttttgagactgctgaatgactgtgaacagaagaagattgatttgatcctttttactaagctcgatagatggtttcgctctgtcgctgattattacgaggtgcagtctattctggaaaagtcaaaagtgccctggcaggctatttgggaggactatgaaacaataaccagccaggggatattcaaggtgaatataatgctgagtgtagcccaggcagaggctgaccggactagtgaaaggatccgggccgttatggaattcaaaagaaaaaatcgggagtatctgggcggtcccgtgcctcttgggtatatggtcaaagacaagaaactggtaaagaacccagaaacagagcatatcgttaacgacatgttcgactactacttctcaactttcagcaagtacaagaccgcagattacattttgcagaaatatcctgaggcaacagagatgaatacccggggaaacatgcaactgctgattagcaacccgatctacgcaggcgccgcatacggcatcgatggatactgcgatgcttatatcacccaagaacagcggagaaagatgcaggaaaattctaatgagaaagtgtatctgagcggggtgaaaaggacctatatcttttcaggacttctgaggtgctctgtgtgcggtgcgcgcatgggcggcactatgaaccatgggagcaaaagttatcgctgttttaatcgaaagatgaagcactacaccctcgtcagatccgaaaagaagctcgaaaagtacctgctcgagaacctggaaactatcctctccaacaagatctacgtattggagcaggcgaaagaggacacacaaaattataagatagagaagaagaaactccttgctgagcgcgaccgagtgaacctgatgttcgaaaagggtagaatcacagaggagtactacgactccaggtatgatgagattagcattcggcttaaagagcttgagaagaaggacgatgcccaatctgaaaagtccgaaaagctcaaaaaatacctttccggcaattggaaggagctgtacaaacagcttgatgaacaaggaaaacaggccttttggaaaaac

SEQ ID NO: 1336 - DNA, 1458 bp, unidentified
  source 1..1458: mol_type = unassigned DNA; note = Bacteriophage uvig_598110 from the Index of /pub/databases/metagenomics/genome_sets/gut_phage_database (ebi.ac.uk)
atgattatcaaaaaagtggccctttaccttagaaaatcccggaaggatgaaggcaatgaaagccgcgaggagacactggcacgacacgaaaggatgttgagagactattgtaaaactcataatctcgagatagtgaagatctatcgagaggttgtgtcagccgaaaacctcgaggatagaccccaggccagacagatgttggatgatgtggcggacggactgtttgacggcgtggtggtgattgaactcgaacgcctttcaagaggcaatcagattgatcaggtggaagtctctgaaacctttaaaagtgctaacaccttgatctacactctccagaaggtctatgacctcagccgggaggacgagattgacgaggaatttttcgagtttggactgttcatgtctcggcgcgaatacaagacgattaagagaaggttgatgcgggggaggaagcaggcccagaaggaagggtattacatcggtgccggcctgccatatggctttgggaaggtccggggagataagggcttcgtgctggtacccaatgccgagacccctattgtgcagatgatcttcaataagttcgtgtacgaggactattctcttgctgatctgaggcattacctgaacaagaacggaatcaaacctcagaaaatcaatgaatggaactcagtggtccttaaaaacctgctcaagaacaagtgctacctggggtacattaactataacagcaggagccggcggacacaggaatgctatgttggtaagcacgatgcagtcattgacgacgaaacattccagaaagcgcaggataaactggcaattagctctcataaactgaaacgaggctccgagcttaagaatcctctggccagcctggtaaagtgctctgcctgtggagccacaatgcaaaaagtgaacgagtacttccgatgtctcaaacccaactgcccgaccgttttgagttattttgacgtcgtagaaaagcgcatcatcgatgagttgaaagcagagctgaagaacttcaattacttcctcgagaactacggtgacgagattgagaagcaaaacaagaggaaggagcacgagcttgctctcctgcgcaaagaggttgcgaaaaaagattctatgattaataaggcatgcgagatgcttgagctcggggtttacagtaaggacaagtacctcagcagagtcaatatcatagaagctgacaagactgctcttcaaggtcaaatctcctcccttgaggcctcattttccgacgaacaggctaaggcccagaaagctataccaatcctggaaaaatgtctcgatgcttattgggacctgaacgcacaggagaagaatgatttgctgaagtcctttatcgaaaagatagagtacagtaagaccaaacgcaacaataggtggaattcaaatatcgatgacatgcaactgaaaatctatctgaaaata

SEQ ID NO: 1337 - DNA, 1320 bp, unidentified
  source 1..1320: mol_type = unassigned DNA; note = Bacteriophage uvig_161644 from the Index of /pub/databases/metagenomics/genome_sets/gut_phage_database (ebi.ac.uk)
atgaatactaacaagcgggctgcactctatatccgggtgagcactgaggaacaggctaggcatggcctgtccttgagcgcccagctggagaacctgcaacagtatgctaaaaacaaggggtacgacatagtgggtatctacaccgacgacggagcgtcagccaggaagagccccttcagccgaaaagcctttaaacagcttatggaggatgttcagtggaatcgaattgacaggattctgtttatcaaactggacagatggttcagatccgttcgagactattataaagctcaagacattctggacgcacatggtgtcgattgggagaccacccaggagcagtataacacgacaaccactaacggaaggcttatgcttaatatcaaactctcagtcgcacaaaatgagagcgatatgacatctgatcggatcaggtttgtgttcgagcaaaaacgagtgaagcacgaagtgcttagtgggttcgcccctctggggtacaagattaagaacaagcacctcgtaccagatgagaatgcctccataattgccaacgcttttaatcagttcattgcctatccgaatctgcagcaactgaccaattggttccactcacagggcatccattacaacgttacatcaatccgcaaactcttgcgcaatgaaagatatgtgggcagaaataagggcgacctggagtactgtccacccatcgtctctgaccagcagttctacactgtgcaagatatgttggataaaaaccttaccgtaaaacggacagcgagcggtctcgtctatatttttaccggccttctgagatgtcctatttgcggccacaaactgacatccagttgcgcctactccggaacacacaagtataaacgctaccggtgttctaggcactggcgcaacgaggactgctctttcaacagagggatcgcagagtccaaacttgagaagcagttgctggcacattttgacgacctgtatgagcattttaactctgctgtccaagaagaacagaagaacaatgcccgcatagacacgcaagtgatcaagaagaagcaggaacgccttaaggaactcttcctcaatgaactcatcactcttgacgagtacaagaaggactacgccaagtacgccgcgatgctgcccagcgaaccacggcctagtattcagccaagtctgtataaaggaatgaaggctgcagatatagaacagttgtacaaagctctccccgataggcagaaacaggcctttttgagacagataatcgattacatcgatttcgatgcagatctgaagcctatcattcactttaag

SEQ ID NO: 1338 - DNA, 1332 bp, unidentified
  source 1..1332: mol_type = unassigned DNA; note = Bacteriophage uvig_116390 from the Index of /pub/databases/metagenomics/genome_sets/gut_phage_database (ebi.ac.uk)
atgagggtgagcactgatcagcaggcaaaacatggcgatagcctcagagagcagcaggaaacactcgacgagtacataaagcagaacaagaacctgaaggtggtggacaagtatattgacggtgggatttccggacagaagttgaatagggacgaattccagcggttgctggatgacgtcaaaaacgatcagatcgacctgattttgtttaccaaactggatagatggtttcgcaatctgcgccactacctgaacacacaagagatcttggaaaaacacaacgtgtcctggaacgctgtaagtcaacagtactatgatacaactacagcctacggccgcacgtttatcgcccaggtgatgtctttcgccgagttggaggctcagatgacctcagagagaatcaaaagcgttttcagtaacaagatccaacagggagaagtggtttcagggaaagtcccccttggttacaagatagaaaataagcggctggttcccactcctgataaggatattgtgattgacctttttgattattacgtcagagtcgggtctctccggaagaccaccacctatctcgaggagaaacatgggattgtaagagactatcagtctgttcggaagctgctgacgaacgaaaagtacattggcaagctcaggaataatccaaattactgtgaacctataatcgacaaagacgtgttcgagactgttcagcttcgccttagccaaaatgtcaaaaccagtggatcacatgattacatctttaggggtctggtgaggtgcgccgactgtaacggctccatgtcctgtagtaccctgaagtccaagtacatcaagaaaacagacggcgaagtcagctattatatccggagctgctaccgatgcacacggcgaaggaataatccgacccggtgcaagaataagaaaacttattatgaaagagccctcgagcgctacctgctcgacaacatacaaaccaatattgcaatgcacgtcagaactctcaaaaaggaagtgacgaaaaaagattctgtgaagcgcaaaaaagatgccctctttgtgaagatcgagaggttgaaaaaagcgtatcttaatgagatcatcgagctggacgaatataaacgagatcgagagatgctggagaatgagatagctaacctgaaggagccaaaaatcaacaagaacatcgctccccttaagaaggtgctctcagacgacttcttcgaaaaatacgaaaaggcatctatcaaccagaagaatgagctgtggcgaagcatcattgagtctattgaagtatccgtagatggatacattacaattaacttcctccct

SEQ ID NO: 1339 - DNA, 1386 bp, unidentified
  source 1..1386: mol_type = unassigned DNA; note = Bacteriophage uvig_236553 from the Index of /pub/databases/metagenomics/genome_sets/gut_phage_database (ebi.ac.uk)
atgaagaggcagacagctaagctgaatgacaaactgcttttgagggtggccatctacatacgcgtgtctactgatcagcaggcccaggacggggactccgtaagggaccaacttgcaaccggacagaaatacatagagaaccacgagaatatgattttggcggacacctacgtggatgatggcatttcaggacagaaggtcaagagggatgacttccaacgcctcatgaatgatgtaagggctggctccatcgacctgattatttttaccagacttgaccgatggtttcggaacctgcgccattacctgaatacacaagatgtgctcgataaaaatggcgtgtcctggactgccacggaacagccctattttgatacctcaacccctcacggtagagctttcgttaataacagcatgatctgggccgaactggaagcacagaacgattctgaccgcatcctctccgtcttcgacgacaaggtcgaaaactctgaagttttgtcagggtcaaccccacttgggtatagaattgagaacaagcatctggtgcctgacgacgatgcaccaaccgccgcagccatatttgagtactatcggagtaacggtaaccttgcgatgactctgaggtatatggagacagaatttggactgatcagaagctccgcttccctcaagaacatgctgacgaatacaaagtacatcggggagttccgcactaacaagaattactgtcccgccatcattgacagggacctcttcgatgatgtgcagcgactgctcaagatcaacatcaagagtggcaagaaccacgactacatcttctctggcctcgttgtatgcgaagaatgtgaacatactatgagtggttgccagcagagaaattctcgcatcttggcagacggcacacgagttgtgtacaagtataattcatatagatgccggcagggaataacactccatcggtgtcctaatcacaaagtcatgctggagtctacgatggagaaaattctgctcgctcgcatccggcccgagctggagaattatatcgctgaatatgaggtcgccaaccggcccgccatgcgaaccgatagcaaaaggcgcaacctggagcacaaaatgcagaagcttaaagaactctatctgaatgacttgattacaatggacgagttcaaagtggatagggagaaactgatgcagcaattggataagatcaaaagtgacgatagccaaccgatgaaggacctctcctaccttaagaattttctgaaaactgatttcgagaacatctacgtgagccttagcataccagagaaacgagaactctggcggagcataattcgggaaattagagtggatcacgagagaaacgtcagaattatttttctt

SEQ ID NO: 1340 - DNA, 1368 bp, unidentified
  source 1..1368: mol_type = unassigned DNA; note = Bacteriophage uvig_370958 from the Index of /pub/databases/metagenomics/genome_sets/gut_phage_database (ebi.ac.uk)
atgaagagagccgtggcatacggcagatacagcacagacatgcagcgagaggaatcaatcgacgcccagttccgagcaattggggactattgtcagcgcaatgagattgaattggtcagcacttatgctgacgagggaatttcaggcaccaccgacaatagacccgagttccaaaggatgatcaaagatgcagagctcggcgcctttgattatgttatagtgcacaagcttgatagattttccaggagtaagtatgatagcgccatctacaaacgcaaactcaagctcctcaatgtccagctgctcagcgtgctggagaatctggacggctcccccgaatcacttattctggaatccgtactggagggtatgtcagaatactacagtcggaatttgtctcgcgaggtgaagaaaggcatgagggagaatgccctgaaatgtaagtttaacggcgggacacctcctctggggtatgatgtcgacgagaataagaactatgtgattaatgcgcacgaggctgaagccatcaagctcatcttcgatatgtttactaagaactactcctacagccaaatgatgaggaaacttaatgatctgggctacaagactaagcgaggccgggagttcacccgcaacagcttctacgaaatactgaacaacgagcgctacgtaggaacatatttctactccaaggaggactacgacgggttcaagggaaagagaaactaccataaaaagcggaacaagaacaatatgatccggatcgagaacggagttccggcaataatcgataaagagacctgggctaaggcgcaggagaaacttaagaacaacagaaatctcaaccggacaaacaagaatgggcggttttatctgttgaaagggctgctgttttgtggggaatgcggatcaccaatgagtggtaatatgcaatctaacaatcagggaaacaggtattattactataagtgcaaccgaaagtctaggacccacaagtgtcatgctcccgttgtgagggctgagaaaatcgaaaaggaagtcttggactgctttgaagacgtaatcttcacaaaaacgaataaggacgcagtgatcgacagcatgctcaagttccttgataaagaaaccgataccactgaccataaaaaaagcttggaaaaggaacttgccgtggttgagaaacagatcgataatatactggacgccattatgtctggcatttcctccccatccgtcaacgataaacttaaagagttggagacgaagaaagaaactctcaaagctagtatctctcgctgcaatattattggaagtataattaactctgtgggtgaaaaaagctctgccctgtttctgtacggtaacgtg

SEQ ID NO: 1341 - DNA, 1650 bp, unidentified
  source 1..1650: mol_type = unassigned DNA; note = Bacteriophage uvig_299740 from the Index of /pub/databases/metagenomics/genome_sets/gut_phage_database (ebi.ac.uk)
atgcagagggaggacctgatcaattacgctaagtacgtgctcaacatcgacaagtacgaggtgtttgaagacgcaggttattcagccaagagtactgagcgacccgcctatcaacagatgatgtccagactgagagatagagaattttctcaccttcttgtgtggaaaatcgatcgcattagcaggaatctgatcgacttcagcgaaatgtataacgaactgaagaagctcggcgtcacgttcgtctccaaaaacgagcagtttcagaccgataccccaatgggggaagccatgttgaaaatcatactcgtgttcgccgaattggagcgaaaaatgaccagcgagagggtgtcctccgtgatgatttccagggcaaataaggggcagtggaatggcggcaaagtgccttacggatatgattacgataaaacaactaaagaattcacaattaatcctgtggaggctgccgtcgtggaaagaatgttcaccatgtacgagacatgtcctagcctgctggccatagcacgcgagctgaattctgaaggtatcaccacgaagagtgggattgcgtggactcccgttaccgtctccaggctcttgcataacatcttttacactggtgcataccgctacaacaggctgtgtgagtcaaacggagctaataagacaccaacttttgaacgcaaacaggaggattgggtgatctatcagaaccatcaccctgcaatcattgataaggcgcggcaggaccgcgtgctggagaagttggcttcacaaaagcgaggcgggtgggaaatggatagaggaaaaagttatatgcggaagaacgtacatatttttgctggactcatatcctgtggtgtgtgcggcagcacctaccagtctacctctgataagatgcggagtaatgggtatgtcccaagcgtctatctgtgcgcccgcagacgaaggttttccgattgcgacaactcatctgttagcgatgcgtatctgggcccgttcgtactcaactacgttgctaacattataaaggttcaaaacagtttcggcaaaagtactagtgtggatacattggagtctaaactgctgaggggcgagtccctggccggggtgaccggcatcgagcaaaagggactcttggagctgtacgatttgcttcggcaaaaattcacagacgttgagttcacacccagccttctcaagtcaaatgaaactaagaagcccgccacggacgaaaaagacttgctcttgagcgacaaacgcaaagctgagagggccctgcagcggctgcagcagctgtacctttacgaagacgatgaaaaggccatttccgataaagaatatgtgattcagaggcaggagatccaggacaatcttgcaagaatcgataaacggctcgccgagattgaaaaatcagagagcaaacgaaatatatccgacgacgactttgtgaagcaagctacctacttcatcatggtaaacaagctgaatgacagacggtatgttaactattctaagtttatccagagcatggacaaagcagtcatcaaggagttcgtgcagtctgtaatatcaaagattgttgtcttggactctaagattgtcagcattcggtttatgaatgggatcgagcacaagttcctgtacgga

SEQ ID NO: 1342 - DNA, 1413 bp, unidentified
  source 1..1413: mol_type = unassigned DNA; note = Bacteriophage ivig_1066 from the Index of /pub/databases/metagenomics/genome_sets/gut_phage_database (ebi.ac.uk)
atgaagcgcgtggctttgtatatccgggtgtctagcgacgagcaggccaagttcggcgactccattcgggagcaacaggaaacactcaccgaatatgtggagaggcatgatgatatgaagattgtctccacatacatcgatgatggcatctcaggccaaaagctcaatcgggacgaatttgcccagctcataaccgatgtacagggagaccagattgacctcatcatctttaccaaattggatagatggtttcgcagcctgaagcactacctcaacactcaagacatcctggaagcgcacaatgtctactggtttgccgtttctcagccctactacgacacacgcactgcccaggggagagcctttatcgcgcagtccatgacttgggcggaactcgaggcacagcagacatctgagaggacaattgctataaacatttctaaagttaaaaacggagaggtgattaccggctcaacaccattcggctattcaatcaaggataaacacctcttccctgacgataatgcaccaattgccttggccatatttgagtacttcgatcaaaccagctctatcgctggtactgcaaagtacctcaaagagaccttcggaatttctcggaccagacctggcatcagaaacatgctgaaaaaccgcatgtatataggaaagtaccgacagaacaacaactactgcccagcaattatccccgaagctttgtttgctagtgtgcagaggaaacttccgctcaatgtcaaaagtaacaacaagaatgactatatctttcaaggcctgatgatgtgcggatgttgtgggcgcaaaatgagtgccgggcaagccacccgctatgggcgacctcgaaaggatgggactaaaaagcactatcccagcgtgtccgtctataagtgtaggtatcacattagcgacaaacgggattgccctaacaagaagacgatcaaggagacggtgctggaggagtacctcctggaccatatcaaagaaatgattcagttcgagatagttgccattgaaaataagaaaaagcaggtgatagacaccaaggcccggaggagaaagattgaagagaaacttgatagactgaaagcagcttacctggacgacgtcatcggtctggacgagtataagaaggacaggcaggagttgcaggaaaccctggccactttcaagaataagccatccgctgatatcagcaataagaaatccgatcttgaggaactgctgtattcaggtctgttcgatcattaccccgttctcactaaacttgaaaaaaaagagttctggcggagtttcatcgacagcatcacgatggatggtgaaagaaatattaccgtgaagttcctggagtccacttacgtacttacagacacagacgggagggcatcatttcgacgg

SEQ ID NO: 1343 - DNA, 1584 bp, unidentified
  source 1..1584: mol_type = unassigned DNA; note = Bacteriophage uvig_441476 from the Index of /pub/databases/metagenomics/genome_sets/gut_phage_database (ebi.ac.uk)
atgccctattgtctgtacttgagaaaatctcgaactgatcttgacgcggaggctaacggtgaaactgagactttggccaggcatgagaagattttgctggacctcgcgaaaagaatgcacctcgacgtgaccgagatctatcgcgaagtggtgtcaggtgagaccatcagctcacggccggtggtccagagagtactcaatgaggtggagaacgggctgtgggacggggtgctggttgttgaggtggagaggttggctagaggcgacaccatcgaccaagggatagtctcccgggccttcaagttttctaacacgaagattattacacccctgaaaacatacgatccaaacaacgagtacgatgaggagtatttcgagttcggcctcttcatgtctagacgagaatacaagactattcgccggcgcctgactcaggggcgaatatcaagcgccaaggaaggcaagcacaccgcaagcacacctccctacgggtacgatagggtccacgtggaaagcggtaaggggtacactctgatcccgaacgaaaaagaagccccagtcgtggagatgatgtttgattggtttgtgaatggcgaacttctcgaggacggctcctgtaagaaccttggaactatggccatcgctaataggctgacatccctgcaacttcctacccccagaggcggcaacgtctggtctcagcgcaccgtgtactggatcttgcataatccagtttatacaggaaggatcaggtggggatataagaaagataagaaaatgatagttgacggagtcgtaaaacgcaagcgggtgatctcatccgagaaagatcaggtactggtcgagggtctgcaccctgcgattatctcagaggatctgtttgagcaggctcagagtatattcgcagaaggcgggaccccaagcgtgaccgcaaacagagaacttaaaaatcccctgtctggcattgtggtgtgcggaatttgtggcgccccactgcgatataagattggatacaatcggtgcagcaatatgcttcactgtaggaccaggggatgcgaatgcaaaggctcctatttcgaccttgtcgagaagagattgctggaggctctccaagagtgggttgatcactacaagatgtcctgggatgacatgcccgaagaaacacatagtttgctgacgctcaaaaagcaggcttatgacacgtctattaaggaattgaacacacttacaaaacagctggacaagacacatgacttgttggagcagggagtgtatgacaccgatacatttttgagccgctccaagagtctgtctgagaagatcgcaacggccgaaaaaaatatccagaagttgagcgccgatatccaaaatgaacgactccgggaaaataatcggaaaaatctcattccaatggccgaaaacctgatagacgtctactggcagctgcctaccgccactgctaaaaacgaaatgctcaaggaggtactggaacgcgttgagtacaccaaactgcaggcaggcaaccggagtggtaaagggaaggatgactttgagttgatcctctatcctaaactgcctaagagt

SEQ ID NO: 1344 - DNA, 1758 bp, unidentified
  source 1..1758: mol_type = unassigned DNA; note = Bacteriophage uvig_112613 from the Index of /pub/databases/metagenomics/genome_sets/gut_phage_database (ebi.ac.uk)
atgccgtttaagaaagctatagagaccatgccaaactgttgccaccgagctgcaatctacattagagtgagcacaaaccaccagattgatcgcgactccctgcccttgcaacgcgaggagcttatcaactacgccaagtatgccctcggaattgagaactatgaggtgtttgaggacgcaggcttcagtgccaaaaataccgaccgacccgattatcagagaatgatgaaaatgatccgcagcggattgttctctcacgtgctggtgtggaaactcgatcggatttccagaaacctgctggacttcgctgctatgtatgaggagctgaagaggctgaacgtaacattcgtgagcaagaatgaacagttcgacactagcacagccatgggggaggctatgctcaaaattatcctggtttttgccgagcttgaaaggaagatgacttccgagcgggtcaccgcgacgatgcttagcagggcagcatcagggaagtggaatggaggtcgcattccctatgggttttcatacgattgtgatcgaagagagttctccatctgtactgaggaacagaacatcactctccttatgtgtgatttctatgagagttcccacagcttgttgtacgtatctagaaagctgaacgaactcggacatcgaaccagagctgggaatctgtggtctccagttcaggtgcgaaaaatcctggtgaacccattcagcgttggggactatgtctacaaccagacctccttgagtactggcacgcaaatcccgaacaaggaagaagattacatcgtatttgagggccatcatcctgccttgtttcctaaagagcggcagcagaaaattgtcagtcaactcagcaggaattcaagactgaagagcggctccaatgttagtgtgaagcagaagaacatacacgtcttttccggtatgatcttttgcgagaactgcggccagatgctcacttcttctaccggaaaggctctgtcaggtgatgggtggcgccctagtatctacctgtgcccttctaagcgcaaacatatttcagaagggtgtcatgatacaacagatagtactgtgggcgagttcaccattaattttatcctgaacatgctcaatgcccagcggaatttcgccctgataaggacccccgaagatctgcagcggcttcttctgtacggcaaggtgttcgacgacgttgatcacctgggcgaagaaggtttgaatgaaatgtttaccgtccttagtgaaaatctgcctgcaaacacgaaaagtggcctcaaaaaaaaggcaaagaagccagtcacaaatcccgaaattacaaagctcaagaaagagcagaagaaactcgaaagggccatggagcggctgaaaagactctacatgtattctgaggactctatgagcgaacacgattatattactgagcgcaatcggatttcagaggcctacgaagacattgagacaaggttgtccgagatcagcacctgcgaacacacagaaaggtccatcagcgaccaggacttcatccaacaagcgacagcctttgtgctttccaagaagctgtctggatcatcttacatcaattatcgacgactcgcggcaagcacggacgcccaaatattgaaggacttcttcaactctataattgactccataaccatcaacaccgacggccaggtgggatctatagtcttcaaaaatggcctgcttcatcggtttatctacagctcagctgagaaatcacagggttcc

SEQ ID NO: 1345 - DNA, 1719 bp, unidentified
  source 1..1719: mol_type = unassigned DNA; note = Bacteriophage uvig_184056 from the Index of /pub/databases/metagenomics/genome_sets/gut_phage_database (ebi.ac.uk)
atggctgtcactccttccattagcaaaaaaatcactgcaccaaaggctgcaatctacattagagtttctacacattggcaagtcgacaaggattcactgcaagtacagcgacgcgagctgatcgcctattgccaactcgtcctcggcattaacgactacgtcatattcgaggatgcgggatactccgccaagaacactgataggcccgactttcagaaaatgatgacccagattaggagcggcgatttctcacacgtcctcgtgtggaaaatcgaccgggtgagccgaaatctgctcgatttcgctagtatgtacgcggagttgcagaatcttggagttacctttatctccaagaacgagcagttcgatacatcaaccgccattggcgaggctatgctgaagattatcttggtgttcgcagaattggagcgcaatatgacatccgagagggttaccgccgtgatgttgtcccgggctaataacgggcagtggaacgggggtcgggtcccctacggctatgcccatcagaagggcagcggaagtttttctattgatgataccgagggtgaagtggtgaaaagaatatttcagctgtatgaggaaaggcagtctgtgctttatatcgccaacacgctcaatgacgagaaaattctgacccgcgcgggtgggacttggaacccagcaagcatccatcgcattttgacaaatccgttttactatggcgcctatcggtacaacattcgcaaaggaacaaacggccccaagcgctccgactccgagtgggtcgtggtggaggatcaccatccaagcctgatttctaaggaacgctttgacgtgatgcagtacaggctcaagaggaataagaggggtggtaatcaacggggcatctcagtcgaaaagaagaacgtgcacatttttagcggcctcctggtgtgtgggcactgctcagagatcatgaccgcaacgcctggcaaccggcgggcagacgggtggacccctagtaactacgcttgtatgaacagaagaaaaggaagctccctctgcgaaggtcgatatgtgagtgacgtcattgtagcccccttcgtactgacacttatcagcaatatcctgactgctaaggacaaagtcggagcgcgcactgagcctgccacattggagaagcggcttctgtcaggggctgtattctgtgacgttaagcacatcaaacccgatggcctgaatcagctgcttagcatcctgaaatcaggaatctctggactggaatattccccggaattcaaaaattctcagcctaacgatatggccagtgaggttgaatccttgaaggaccaaagacgaaagaaagaaattgccctcagacgacttaaaagtctctttctttatggatctgaagagatcccagagacggaattcatccttgaacagagaaaactgatagacgatctgaatgccatcgatgctaagcttctgaaactggatgtggacaatgcagggcttcagagcctggacgacgcctttgttgagaaggcatcttactttatcatggtggaaagaataatgaatggcgatagagacgatccagcctctttcatcaggaacgtggacttgagcgtggtgaagagttttctcaatactataatcaggaagatagtaatactctccgggaaagtttcatctattgagttcaagaacgggattaccctggaattcagttacgag

SEQ ID NO: 1346 - DNA, 1485 bp, unidentified
  source 1..1485: mol_type = unassigned DNA; note = Bacteriophage uvig_111591 from the Index of /pub/databases/metagenomics/genome_sets/gut_phage_database (ebi.ac.uk)
atgaagaccggagcgctgtacattcgggtatcaacccacatgcaagacgagctgtctcccgatgctcaaaaacgcctgcttctcgaatacgcgaaagccaacgatattctggtaagtagcgactatatcttcatcgaaacggggatctctggtcgcaaggtagacaagaggcctgagtttcaaaaaatgatctccctggctaaaactaaacctgccccttttgattccattttggtttggaagttttctaggttcgccaggaatcaggaggagtccgtggtttacaagagcctgctgaggaaacagtgcaatgtggacgtgataagtgtgagcgagcctcttatcgatggacccttcggatctttgatagagcgcattattgaatggatggatgagtattatagcatcagactcagtggcgaagtgacaaggggtatgaccgagaaagccctgcgcggaggctatcaggcccggcccccgttgggatataagatagccgtcaaaggcgaacctccaattattgtgccagaagaggctaagatcgtccgaatcatcttccaaaagtatgtgtacgagaagcaggggtacttcgatatcgcacgatatttgaattccctcggttacaagacttcccatggaaagagttttgaagccagatcaattgactacataatacagaatccaacttattgtggcatgatcaggtggaacagaactgagaacgagactaaccgaattaaggataaggatgaatggatcattacggaggggcatcatgagccaatcatctccaaggagttgtttgatgctgcccaagaccggtacaagagcacttatcggccccggggcgcccgcccaagctctacctatagacactggctcagcgggctgctgaagtgtccccactgtggcagaacaatgatagcaaagcgggtcgtgaaaaagagcaacggggcaaactatgcgtactttacgtgctacgggtactccaagggcaagtgccttattccttcaaatgtctcaagtcttaaactggaacccgcagtcctttcttcccttaaagagatcctggacacaaaaaccctgagcttcgaatacaaagtcatcgagcagaccgagcaggttgatgagaaggcacttctcgaggagcagcttcagcaaattgctctcaaagagcagcgcattaagacagcatatagagaaggcattgacacaatcgaagagtataaacacaaccgagagattatagaaagggaaagagacgaaatccagcagaaaatctacgaactcgaatctgttgatatggacacaagtgatgacaaggctatcatgctcaagaagattcagaatgtgtacgaggtggtgtcatcctcagactacaccgaccagcagaaaaacgaaatgctgaaaaccatcgtggacaagtacgtttacgacaaagagaatgatacactgaatgcttattattacttggccaaaccgcag

SEQ ID NO: 1347 - DNA, 1299 bp, unidentified
  source 1..1299: mol_type = unassigned DNA; note = Bacteriophage uvig_577010 from the Index of /pub/databases/metagenomics/genome_sets/gut_phage_database (ebi.ac.uk)
atggacataattcgcgcagcactctacattcgcgtttctaccgaagaacaggtccgggagggctactccgtggaagctcaaagagacaacctgaaaagatatgcaaaaaataaggggtacagcgtcgtaggcgtgtatgctgacgaggggattacagcgcgcaaaaaatatacgaatcggaaggagttcatgcggctcctggatgatgtggaagccggtaaaatcgacgtgatcctgtttatcaagctcgacaggtggttccgaaacgttggcgattattacaagatccaggagattctggaacgaaacaacgtcggttggactgccaccacagaaaattatgacacaaccacagcaaatggaagactgtacgttaacatacgccttgccgtcgcgcaggacgaaagcgataggacatcagaacgcataaagttcgtgttcgagaaaaaagtggcagatggagaggctatttggggcctcgctccttttggatataaggtggagaacaagaaagtggtcattgatgaagacctgtatccaatcgtggtagatacgttcgaagccttcatcaagctccggtctgtgaattccgtgtgcgtgtacattaatgagaaatacggcactcactactcatacaacatttttaaacgaatcctccgagacaataccgccttttactatggcacgtaccgcaacaatacttcctattgtccgccctatctgtctaaagcccagtacgagataatcaaggaaatcagcgatagcaccaccacaatcaggtcatctggcaagaagtacgattatatttttagcggaatgcttgaatgtggatactgtggcaagcggctcgtagggggtggcagcaccaggagagataacggaaaagcttattatgggtacagatgcactgggtatagaggtgggacctgctctaacaagatcagtgaacttaaaattgagtccttgctgtttgcggccctggaggacgaggtcaagaagtacaaggtggattacgagatcaagcagaagaagaaaaaacccgcctatattaataagagttccatagagaagaagatcgctaggcttagaaacctttaccttaacgaagtgattgagatcgatgactacactgtcgagtacaggaaattgcaagacaagctgaaggagtatgaggagagtatcaataaggttgaagacaataaggatttcacagccttggacaacttgttgaaaagtgacttcaaaaaaatctacaatgagctgtccaacatagacaaacggactctgtggcattcagtt

SEQ ID NO: 1348 - DNA, 1599 bp, unidentified
  source 1..1599: mol_type = unassigned DNA; note = Bacteriophage uvig_476025 from the Index of /pub/databases/metagenomics/genome_sets/gut_phage_database (ebi.ac.uk)
atgaaggccgttatctacgccaggtacagctctgataatcagagagaggaaagcatcgaaggccaggttcgcgagtgtcaatcctttgctgaacggaagggctatacagtgatacgcacctatattgatagagctctgtccggcacccgggcagataataggcctcagtttcaacagatgatcagcgactcaactctgagggaatttcagtacgtgattgtttggaaaattgaccggttcagtcgcgacaagttcgattctgtgaagtacaagtatgccctcaaaagcagcggtgtaagcgtcatttccgccacggagcctatcgacggctcccctgagggacagatgatggagtccgtctttgaggggatctccgtgtactacatcaaagaccttgcccagaaaacaagtagaggcatgacagagaatgcgatcaaggggaaattcaacggaggtactctgacctttgggtatacaatcgacgagaaccaccattttcaactggatccggttaatgcccctattgtgctcgacgtattcactcgatatagcgagggcgaaacaattcactccattctcgacgatatcaactccaagatgtctaataacggtaggaaattcacctatcacttcctgaactggatgttgaataatcggagatacctgggagaatacaagttccaagacactgtcaacaacgaggcaatcccgccaatcatttcccaggaactttttgacaagtgccaacacagactcaatgtgaataagcacaaggccgggtcattcaaaaagaacaaggaaaagtacctgctcacaggcaaaatcttttgtgggatctgcggggctacaatctctggaatttctggtactggaaagtgtaagagtatctatcggtattacaagtgcatgaacgtaaagaaacataagtgcaataagaaacccgtgcagaaggagctgattgaaaacatagtgctgaatgctgcactggatatttttaaagacaaagcgttgatccgaaagatttctaaggcatgcttcgatctgcagagcaaagagtctcccatgcttccagctcttaaaaggaggttgcgcgagaatcagaaagagattaagaacctgatgaacgcaatcaaagccgggatagtcttgaagacgaccaagagtgagctcgagaaattggaagccgagcaggaacagctggagattaatatcgcgatggaaaaactggttaaacccgtcattccacaggagaaaatacaagcatggctcatgaatttcgccgctgccgacctcagcgatcagagccagaaacagcgaataatagatatcttcgtgaacagtgtctacgtctacgatgatagagtggtgatatttttcaactataaagatggcgagcgctatgtggacttttctacccttgacgacctggaaaacccagctggatccaacgaaaaaaagaccaacactcatgaaaatgagtgttcacccttgatcaagagtggcgacccctcaggcaacagaacgcgagataccttgattaagtcacagaggaagatcatgcctgtgaacggatcagctatgcgcttccggtgtttgaat

SEQ ID NO: 1349 - DNA, 1395 bp, unidentified
  source 1..1395: mol_type = unassigned DNA; note = Bacteriophage uvig_382772 from the Index of /pub/databases/metagenomics/genome_sets/gut_phage_database (ebi.ac.uk)
atgcccgagaaaatcctgaggtgtgctatctacatcagggtcagcacatttgaacaaagtgtgcatggtaaaagtctgcaggctcagaaggagtacctggagcattatgccaaagagcataacatgtctgtagtaggagtatatgccgatgaggggaaaaccgctcgcaaagagcttaaaaagagaaaagccatacacgccttgatcgaggacgtgaaacaggaaaaaattgacgtcatactcttttggagacttgatcgctggtttaggagcctggccgacttctacaaggttcaggatgtgcttgatgagtatggcgtgagatggatctccgcatccgagccggggatcaacatggagactagagacggcagacttcagttgaatgtcgtcctgagcttcgggcaaaatgaggtggacacaacttctgaaaggattaagtttgttaacgaagcgagtataaagaatggccgcctcattttcggggaagccaatatgccatttggttacaagtccggcgtcgtggatggaaaaaaatgtatgatcaaggatcctgaaacagagaggatggttattgacttcttccgccattacaagaagcaccagggtaagcaggacgccctgaagtatatgcagaggacttatggtatctatttttcatatgcaatgctcaaaaccatgctgagctcagagttttacaaggggacgtaccgggggtatccctattgccctgcatacctcacggaaaaggaatggaacgagatccaggaaatttcagttcggaatgtcaaacgggcacctagcggacgcgtgtatctgtttacctccctgatgcgctgtccctcctgcggacaaaagttggtgggaaccggctgtagttctatctccaacagaaagaccggcaaaaaacggacatactgttactacaggtgcaataaggctttggctgatcacctgtgcccaaaccgacaccgggtgagccagaacttgatagagcaatatctgctcgagaacctcagtagcgagtacgagaaatacaagattcggtccaacaagatcaacgaggaaaagaagaaggtgcgaaaggccaaaaatccagcgcagctttctaaagaaatggagcgcctcaatttgctgtttcagaagggcaggatttcattcgattactatgacgaggagtaccaacgactcgaagaggaattggcgttcgctgcctcagatccctccctggaagagcctaaacgaaattattctgaattggaaaaactccttcggactgacttcaaggaaatgtacgactctctgtctctggaaaacagaagagcattctggcgcagcatcattaagcagatacacctgaatgacgattgcaccattaaggaggtggacttcctc

SEQ ID NO: 1350 - DNA, 1506 bp, unidentified
  source 1..1506: mol_type = unassigned DNA; note = Bacteriophage uvig_512136 from the Index of /pub/databases/metagenomics/genome_sets/gut_phage_database (ebi.ac.uk)
atgccatattgtatctacctgaggaaatcacggaaggacatggagctggagcagtacggagatggggagacactcgctcggcacaaacgaactttgctggagttggctcgcaaacagaacctgactataggcgagatatatgaggagatcgtaagcggcgaaagcatcgaagcccggcctcagatgcagaaactcctccgggatgtcgaaaacaatctttgggacggcgtcctcgtgatggagcttgagaggctggctcgaggcgacactaaagatcagggaaccgtagcccagacgttcaagctcacaaatactttgattattacccctcaaaagacctacaacccactgaacgaatttgacgaggaatacttcgagttcggcctgttcatgtctcggcgggagtacaagaccataaacagaagattgcaagcaggcagattggccagcattaaggaagggaactacattgggtctctgccgccctttggttacgataaggtgagacttactgatgccaaaggttatacactggccgagaatggagagtcagactacgtgcgcatgatctacgacctctacgtgaataagaatatgaccccagggaaaatcgctgactatctcacttctatcggcgtgcaaccgaagaagggagggaagtttaccatgcattccgtcagggacatcctccgcaatcctatctacatcggtaaagttagatggaactggaggcccaacaagaaaagtgtgcaggatggcaggatcatagtgacccggcctagatccacttccgagagtacggtgctgattaagggtaagcatcaggcaataattagcgaggaaatttttaacgcagcccaaaaaaaacacggaagtaacccacggacacagattaaacacgagctgaagaacccattcgcacacctgatgtattgcagggaatgtggcaaagcaatggtgtatcggacatatgctaattcagaacccagaatcatatgcgctaacaaatactgcgaaatttcttcctccccctttgaagtaatcgagaaatccgtcatcgactcacttacagaaaagctcggggaactggagattgccgccgcacagcccgagcagtctagcgctgagttcaagacatataggagcgcagtcaagaaaattgagcaagaactggaacaggcgaatgcccaacagaacaagctttatgacctcctggagcagggaatctacacccaagagatttttttggaacgccagaaagcgcttgaacagaggcggaaggatctgcaaaataagctggtcgccgcgcgagagaatgcccctcagccaatcaattacgaggagcgcatcacgaaagtgagacaggttttggaactgtatcccacactcgatgttaaggaacagaataccctgctgcgaagcgttattaagcgcattacctactatcgccctaagagtgatcgatatcatcagaacctggctgagatcgacatcgaattggtgttc

SEQ ID NO: 1351 - DNA, 1569 bp, unidentified
  source 1..1569: mol_type = unassigned DNA; note = Bacteriophage uvig_156529 from the Index of /pub/databases/metagenomics/genome_sets/gut_phage_database (ebi.ac.uk)
atgtcaattaaagcagtcagctattgccgctacagcacagataatcagaccgaaaattccatcatgtaccagatggctgctgccgaagagtattgcaagaaacatggtatggtgctcattgacgtttatagtgatgaagcaaagaccggcaccaatacgaacagggaagggctccagcgcctgatcaaggattgtgatacatctaagtttgacgcaatcatcatctacgaccagtctaggttgtcaaggaacatttctgattggttcgaattgagacagttgttttccagcaaggggaaacagctctactcctgtaacgagcagctttcctccgactatctgaactcaaacgctttcctgtccgagggaatccacgctctcttcgcccagaatcacgtcattgaaaccagacgcaagacccttgacggcgtcaaaagtaaagccaaacaagcagggttctgcggcgggactccaccactggggtacgatatcgtgaacggggagtacgtaatcaatgagaaggaggctcctgctatcaggaaaatgtttgaaatgtacgccctgggcaaaagttacgacgatataatgcaggtgctctatcgagaaggatacaggagcaaacgaggcaataagatctctagcaacgcgatctactatcttttgcgaaacgagagatatgtgggtatctattactggaacaagtatcagtacacagttatgcggaagcggattactcgaaaggagaaccccgagatagttcgaattgaaaatgccatacccccaatcatagacaaagaaacatggactatggtgcaggagcaactgtcaaagaataagggagccagcacccgaaccaagcggcaatatctcctgtctggcctgattaagtgtggatactgtggcggaacgtataccgggtttgcatccaaaaatagacgctcaggcgaagaaactgtgtactacacttgctcaactaaggagcgcctgaagacttgtaaggcaaaaaatgtccggggtgatgagatcgagtcctttgtgtattacacccttaaggaccggatcttcaaccaggatctggccgagcaggtggcggacatgatcattaaccaaagcaaagatatcgttacattcgacagtgccgccgtcaagcgggagatatccaagaagaagcaagctattaacaatttgttccaagcgatagagaatggcctgaatgccgaaatcaccaccgacaggataaacacattgcaagatgagattaaagccttggagctgtctctggagcagtctatgaaacagaatgacacggtgatcgatagagaaaaacttattcagagtctgctcgaggacgccaaaaagatcgacctggattttgaacacagaagagctataattcggaaatacgtggtaaagattgagattactgacgacacagttaacctccattgcatcggagatagctctaccacaggaggtgccacgccgcagtatggcgtactgctcttcgcaattgaccgcatcagtttgaaaaacattgtcaggcaggtgcccacacctacaagcaaggtg

SEQ ID NO: 1352 - DNA, 1374 bp, unidentified
  source 1..1374: mol_type = unassigned DNA; note = Bacteriophage uvig_594437 from the Index of /pub/databases/metagenomics/genome_sets/gut_phage_database (ebi.ac.uk)
atgaaacggatcctccgcgctgcactgtacatcagagtaagcaccgaggagcaggcgaaggagggagagtcactcccagcacaagagagtgccctggtcgagtatgctaacgaacatgggtatcgcattgtggatatctacaaagacgcgggagtgtcaggtactaggaaggttgaaaagcggccggagatgatgagattgttggacgacgtcaagcaggacaaaattgacatcgtgctcttcatcaagattaaccggtggttcagaagcgttagcgagtactggcgcgtacagcgcattctggatgattacggtgttatgtggaacgccatcactgaggacttcaaaaatgaaacggctatggataaggcaatgatcaactttgcgctcaccttctccgaatactttgccggcgtgcagggcgaacatatcaggtttacactcgaaaggatggcaaagaacggggagcctatctctggaaatcaaccatacgggtatatgataatacagggccccaagcacaagatgattgccaaagacctctctactggcgactacattccagatatgtaccagaagtatatcgagtgccacaatattgctgaaaccacccgatatctgaacgctaagtatcccgatcagaagttcgccgagacttacactacaagacgccggatatgtacccgagcttacactggctaccactgggcaaggcctgattattaccctccatatgtgacccaggaaaccttcgacgaggccaatgctatcctgaaagctagagccgagcgccaagctcattccaaacacacacctcccaaactttttagtggtctgataatctgcccctgttgcgggcgcagattggccactacatataagaaacctaccaaaggctaccccaatgggttcagaaaatatcggtgtagcatggcttggaacaggacgggtaagtgttcttacaggcacgaactgtatcagtgggtgattgagaagtattgcgtcgagcacgcgatgagtgaactgaagtcctttaccctcaaagcaaaaacaatagatacagaagccctgaaaacagagcaggaacgggagaaacttgaagcccaacttgagaggcttaacgacatgtacctgtacgggaagatggatttcgaatattacaagcgacacatggatgaggtgacggacaagcttgaccgaatcaagagaggagtgaaaccggccgatcggtcagtcgatgaattggaggccttgcatatcgacaattttgagtccgcctatgcagcccttaatgaggaaaatagggcaatgttttggcacaagctgctgaagggcattaccgtcgaaaaaacacatgtgaccggactgattttc

SEQ ID NO: 1353 - DNA, 1629 bp, unidentified
  source 1..1629: mol_type = unassigned DNA; note = Bacteriophage uvig_366074 from the Index of /pub/databases/metagenomics/genome_sets/gut_phage_database (ebi.ac.uk)
atgaggtacagcagtcatgctcaggatgacggctttagcattgaagcccaagagaaggctatcaagaagtacgcagatgagcatggatacgacctgcagtactattattgtgataaggctaaaaccgggacaaactcaaagcgccccgagtttcaaaaaatgatcgctgattccaagaagaagctcttccaagtctgtattgtgcacaaaactgaccggttcgcaaggtcacgctatgactccatctttttcaagagtatcctcaaaaagagcggcgtggaactgctgagcgtgactgagaattttggaaacgaccctgagggcaaagttatggagggtattgccgaggtgttcgccgagtattactccaacaatcttgcacgcgaagtgaagaagggactggatgttattgccagccagggcctgcataccggagggctgccacccttggggtacgatgtcagtgagaagcgactcgtgatcaatgaaagcgaagcagaaatagtgaggctcatctttgatagatattctaatggttatacctacaacgacatcgctaaggaattgaacgccaagggctataagacaaaaatcggcagagaattcactagcgcttcactgaactctatccttaaccagcgaaagtacatcggagagtatgtgtacaaccggcggtcatctaaaaatatcaatggctcatataatagccacaaaaataagccggaagaggagatcatcagaattcctgatgcagtaccaaaaatcatcgacgagaagatttttgagaaagtccagcaaagattggagatgaataagcggaaagcgggtcactataagtctaaaagtaactatcttttgtccgggctcattgtatgcggggaatgtgggtttcactatcagggcaatacaagagctgccggcaggggcagccagtctatgtactcctcttatcgatgcggaaaaaagcagaaccacaaaatcgggtgcggcaactctgagattgagaagaatagactcgaaaccttcgtcctggagcagatgcagaaatatctgttctccgacaacgccataaaaacaatcgtcaaacaagtcaacgagtacaacatatccgtttccaaaagtaaaaattcagacctcgcgttgtacgaaaagcaactgaatgagatcaacaagcagatcaagaatatcacgctggccattgcaaagggtgtaaaccaggaactgatgatcgagcagataaagtcaattgacagcagcaagaaagaccttgagaaacggattgaagaatctaaaattaccgcatttccacccatcgttgaagaggacgtgaggaaggccctgagtaagttcaaagagttcatgaaggagaataattacattgagtgcaagaatttcattaaccagtacattgacaagataatagtgtaccgcgataaggttgaagtcacttttaaagtggcttccgccatctttaacgcctctttcccggatgataagagtggaatgctgaaaattataatagaaatttctcgcactgaattgaagacgcttcccaaacagaggcggaaagtgcctgcgaacggtcagttcggggagtcctacttgaaacagtaccagattaccacaaag

SEQ ID NO: 1354 - DNA, 1494 bp, unidentified
  source 1..1494: mol_type = unassigned DNA; note = Bacteriophage uvig_573612 from the Index of /pub/databases/metagenomics/genome_sets/gut_phage_database (ebi.ac.uk)
atgcctaagacggaagagaagcaagccgccaaagccgttatctacgcccgatattctagcgacaggcagagagaagaaagtatcgagggacagctccgggtctgtgaagattatgcaaggcgaaacaatattacaattctgcatacctacgccgacagagctatgactggcagaagcgaccagaggcctgagtttcagatgatgatcagagacgctgctaccatggcgtttaacgtaatcctggtgtataagctgaatcggtttgctcggaacagatacgatagcgctaagtacaaacataagctgaaaaaatacggcgttaaagttgtgtccgcgatggagaatatcgcagatgacccatccggcatcttgctggagtccgtgatcgaagggatggccgagtactattctgcagaactttcagagaatgtgctgcggggtatgacccaaaatgcactggaaggcaaatggcccggcggggtaattccacttggctataaacttgataaagggggaagactcattattaatgaggaaaaggcgcccatcgtgaggatgatctaccagatgttcctggacggaatgtctgtcgctcgcattgaacgagaactcaatgacaaaaagtataccacagatgcaggtaaagtgttctcccggagtagggtgtactatatcctgcacaacgagcgatacatcggcaccttccagtggaaggatatcaagaaggagggtataatcccacccataatatcaaaggaagcctttcacgccgtacaggaacgcattaacgccatgaagtcaagctcttaccggactaacaataactatttgttggctggtaaggcgttctgcgcaagctgtggggccaaagtttccggaacaagcggcaagagtcagaatggaaataagtactgttactatggctgctcccaccatcatcgctctgcaaggtatgaatattgcgggactaagaatatccgcgcggatgtgctcgagaaacttgtctgcgacaaaactcacgagatactcagtagcaagaaggccataaaggagattgcccggcaagctgtcaagctgagacctaggaacgagagcgagcttgagatccgcgccataaaaaatcacataagctcttgccaaaagaagatcgacaattgcattaaggctattgagaacggggttatgagtaacgccctggtggagtccctgaatgaaaacgagagaactctcgacgtcctcaaggaaaaattggctaaagcctctcttatgcaggggtccggattgctgacggaggagaaaattcagtttttcttcgagaccattcgcgagaaagcaaaagaaaccgaaaagtacaacgatatcttgctgacatcactggtgcgcgccgtgtacatttgtaacgagtatgtcgaaatccagtataactacgcagagcagctcccgatcctgacaaaccccgtgaggattgagtcatgttcatacaagtgtacaaac

SEQ ID NO: 1355 - DNA, 1740 bp, unidentified
  source 1..1740: mol_type = unassigned DNA; note = Bacteriophage uvig_191392 from the Index of /pub/databases/metagenomics/genome_sets/gut_phage_database (ebi.ac.uk)
atggccaagctggtatcacggataagcgaggcgctcagcgaaatgaaggtggcaatctacatccgagtgtccactcagtaccaggtggacagagcttccctgccagtccaaagggaggagctcattaactatgcaaagtatgtcctgggaattacagactatgccgtatttgaggacgcaggatactccgccaaaaacactgatcggcctgattaccagcagatgatgacaagagtccggaccggcgaattcactcacatcttggtttggaaaattgaccgcatcagccgcaatctgctggatttcgccgctatgtatgctgaactcaagcagctcggcgtgacgtttgtgtctaagaacgagcaattcgacactagcagcgccatgggggaagccatgctgaaaattattcttgtcttcgctgaacttgaaaggaacatgacaagtgagagagtgtctgccattatgctgtctagggccacagatggcgtgtggaatggcggaaaggtgccatttggttatagctacgacaagagaaacaaggtcttctccatctacgagcccgaggcaaaaattgtgacctacatctatgaccagtatgaggcagtgcggtcactgactagtgtggctaagatactgaatgaaaagggagttaggtctcggacagggaaaccttggaatcccaccacaatcaggacaatgctgaccaatccattctacgccggcacgtaccgatacaattatagggacgaatccggaaaaagtcacgtagtgaaagctgccaaggaatgggtgatggtcgaagatcatcaccccgcgatcgtaacccgagagagacagaaccgcattgcggctcttctgcaatccagacagcgcggtgtttacagtagcggcatgacttatcaacgcaagaatacccatatctttgctggattgctccggtgtgggtgttgtggcagttcaatggccagcaccattgatagggagagaagtgatggatggagaccatcaatctacatgtgcacaaggcgccgacggttcaatgactgccagaacaagtatgtttctgatatcaccttggggccttttatcctcaactttatcgccaatatgatccgcgtttcaaacagctttggcaaaagtacttccatagagactcttgagaaaaagttgctccgcggcgacgtattctcaaatgtggatcacatcgaacgacccggtttggaggagctttacgcccatctgcgaagcggctttgacgagatgtcctttgagagcacaggggtgcaggcagccgagagtgcatcacagattcaggaacgcgatttgctgctgacagagaagcgacggttggaacgagcccttaacagattgagatcactgtatctctactccgaggatgaaatgccggaaaaagactacattgtcgaacggaaacagctcaccgacaggctgggtgaggtcgacgcgaggcttgaagaagtggagaaactggcagttgactctctcacgctgagcgatgaggagttcatggctaaagcttcctatttcatcctgacccaacagttgcaggataagcggtacgtgaattacgagaggttcatcagaaagattgatcctcagattgtcaaagacttcttgaactctatagttaccaacttctgcataaaagacgggttgactacctccatcttgtttaagaacgggctggagatacaattttcttataagtctacggaa

SEQ ID NO: 1356 - DNA, 1716 bp, unidentified
  source 1..1716: mol_type = unassigned DNA; note = Bacteriophage uvig_587167 from the Index of /pub/databases/metagenomics/genome_sets/gut_phage_database (ebi.ac.uk)
atggccaatagaaagtggcggcccgcctgttattgccgagtgtccacaatccaccagattgacaaggaatctatccctacgcaggtgcaccttctctctaactactgcgccggagtgttggggtgtaaaaaagaggacattaagttctacatcgatgctggatattccggcaaaaatacaaaacgcccagaatacgaaaagatgattgaagacgtcaaagccggacgcagaaacgtggtagtagcctataagctcgacaggatctctagaaacctcatcgattttgcgaagtttttggaaagccttaaggaacacggagcagagttcatctcactgagtgaatctttcgatacttcatcagttatgggtagggggatgttgaaactcatcgctcttttcgcggagatggagagaggcattacccgcgagagggtgatggccgtatccaaagatattatatccagaggcggccatcttggagcccctaccccgctcggctatgactatgataaggcaactaagaagtacagcattaacgagaaggaggctgagaccgtgaggtggatctttaaaacggccggagacggggagtctaccacatacatcagtaactacctgaacgatcataatataaccggcaagagaagcggctactggaccagcactaccgtctttcacatactgcataatccagcctacactgggaagtatgtgtggaaccgccggtcaagcggcaggtataagctcaaagacaaaagtgagtggctgacccaggaaaaggtatatccagtcataatccctgcagctgaatggcagtcagttcaagataaactggccgcccggcgaaaaggtaaaaacgtaaaacgcgcagtgcaaagccatctcttcctgggtctgctgagctgcgcgctgtgtgggcacgacttcagggcacgaaaggacaaagcgcgcgccgatggttaccggccctccgtgtacagttgtcccgcttacactggtcacgctggctgcacaaatggccactactattccgatatgcaaatcgctccactggtcactcagtatattgaaaacgttgacaaacttgctaacatgcaggatcttgtcaacagccgggccgatctggcaagagtgctgctcttcaacatgcctgatgtcgtccagatttctaacatagacacgttgtacggcctgtacggccgaaccaatcaggagccggtgcccgagaatatcgcaatggtgagagcttttgccgatgcggagaagctgaaggcagataaggaattggaaaaatattataaagcactcgatcgccttaaggacctttatctgttcggtgatgctaatatgtccaaggaggactacgtcacaacccggggaaaaattgagagcaagattgctgcagttatttctgccagggacgagacaactcgggaggtttcaccccgactcgatgttgacgccaagaagtacggaccaattctgaagttgctgcgcgggaatgttggatacaagatgatcggtgacaaagtggggtttgacttgctggccgagttttttcatgacgtgctgtccgggatcgtggtcgacaaaagtgggatcgtgaagataatcttcaaaaatggagtggcgcactgtctttgcaataaggaaacaggcgccggggtcgtgatggagtatcctcgggctggcaggagaaagagtttgaccacaagg

SEQ ID NO: 1357 - DNA, 1494 bp, unidentified
  source 1..1494: mol_type = unassigned DNA; note = Bacteriophage uvig_595287 from the Index of /pub/databases/metagenomics/genome_sets/gut_phage_database (ebi.ac.uk)
atggattccactaacataaaagctgtggtttacgcccgctactcatcacacagccagggcgaacagagcatcgagggccaactgtctgctgcacatacttacgccgatgcaaaaggttataccattatacacgagtatatcgatcgggccgttagtgggaggacagacaaccgggaggaatttcagaaaatgctgagcgataccactaagaaacagtttcaggtcattatattgtggaaggtagatagatttggccggaatagggaggagattacgttcaataagtacagatgcaagaagaacgacgtacgggtcgagtatgtcgccgaaaatgtcccagattctcctgagggggtgatacttgagtctgttcttgagggcatggctgagtactattctctccaactgagtcagaatatccgaagaggccagtacgaaggcgcaaaaaagcacaatgtgttgagtggaaacattcccctggggtataaagctgtggataagaaatacgtgattgatgagtcaacagctcctgtgattaaagaaatctacacactgtatgcctcaggatgtagcaccgcccagatcatcagacagcttaatagtgaaggtcatcgcacccgatatgggagaccttttaccaaaagttccctcaggacaatcctcaagaatgagtcctacattggcatctacacgtataaggatctgattcgcgatgaagatgcgatcccggctatcgtggataaagacactttttacaaggtccaggaaatgttgaaagtgaataagcgcaaaccacattcctcatggaactatagcgacttcctccttaccgggaaactgtactgcggcctgtgtgggtccgaaatgattggtacaagcggttatggcaagcttggtaccaagtataactactacaattgcctcagccaacggaagaagactggatgcaagaaaaagcccatccgggctgatctcctggagcccctggtcctcaaggaggctcaggacttgctcgccgacgacgccatcctggaattcatcgcggaccggaccctcgagttttatgccaagagcaactttaccggagaaaaaatagatgggctgaagaataagattgccgaagtggaaagcggaattaaaaacttgatcaagacaattgagcgcggaatcgtgtccgacacaatactggacagggttcaggaactggaggcccagaaaacagcccttgaaaaagcacttgcttctaccgagctggaacgaggcttcgacctgactaagaatgagattcaattttttctgaaatctctgaggtccgaggacatagaggacaggaacttccagaagagacttgtgaacattttcatcaactccatcttcgtatacgacgacaagattgacatcgcattcaacttcaaagaagacttggagactctgacgcttgcggatatccaacacgcaaaggcaggagcggagttcgcatgttgtgcctcatct

SEQ ID NO: 1358 - DNA, 1299 bp, unidentified
  source 1..1299: mol_type = unassigned DNA; note = Bacteriophage uvig_329173 from the Index of /pub/databases/metagenomics/genome_sets/gut_phage_database (ebi.ac.uk)
atgagggccgctctctacatcagagtgagcaccgaggaacaagcgcgccacgggttgtccctggcagagcaaaaggagtcactggaacggtacgcggaggcacatgaaatggaagtggtaggaatctacgaggacgctggaatttcagcacgcaagccatacaagaagcgccctgccctgctgcgattgctggaggattgcaaaagtggtaagatagacactattcttttcatcaagctggaccgctggtttcggaacgtggctggatattatgacgttcaaactcagctcgataagtatggcgttacctggcaggctaccaaagaggattacgaaacaaggacagcatccgggcggctcaaagtgaacattatgttgtcagtggcccaggacgaggcagaccggacttccgaaaggatcaagtttatcaatgaggggaaaaaagccaagggcattccctcaggctctaagacacccctgggaataacgattaaagatgggagatacgaaattgaccagaataccgcagaaatcgctgtcgatatgtttagtgcatacattaagctgaaatccacccttgctctcagacgctatatgtttgacacttggggtatctacagggcatacaataattataagaaagccatcacaaaccgactgtatattggcgaggtatatgggatcgagaatgcgttcccggcccttattaacacacacgactttgagctggctggagagatcatcaagcaacgaagccagaggtgttgcgatatgcggaaaggcaatatctatttgtttagcggcatccttcgctgtcgggaatgtggtaaaataatgcagagtaacgtcgttaagggatacaagtactatagatgcagaacgcagttccgcatgaacgcccagtgtgaccataggcagtgcgtccgggaagatgtgcttgaatcttacatgctcaattctatagagcagatggccgcgaagtaccatggccagtatgatgaggccggcaagaagccagctttgtccgccgataagattagaaaaaaaatgagcaagttgaaagacctttacctggccgacctgatcgagctcgacgaatataggaaggactacgaggatctgaaacagcagctctctcagatggaacctcaaaaacccaagtatttcgacagggatgctctgcacagagagatagaggaatacccaaacctgagccctcagatgaagaaagagttctggacccgaactgtcaaaagaattgaagccgataataacggggccttcttcgtgcttccccga

SEQ ID NO: 1359 - DNA, 1500 bp, unidentified
  source 1..1500: mol_type = unassigned DNA; note = Bacteriophage uvig_170733 from the Index of /pub/databases/metagenomics/genome_sets/gut_phage_database (ebi.ac.uk)
atgaatgaaaaaatcaacgcagtcatctatgctcggttcagcagtcataatcagcaagaacagtccattgaggggcagttgcggtattgcagcgactatgccaacaagaacggaatgaccgttattaactcatacatagacagagccatatcaggcactagtgacaacagaccctcttttcaacaaatgatcaaggattcaaataaccgcaagttcgatatcgtgctggtgtggaaactggatcgattcgccaggaacaagtacgattctgtcgtttacaagaacaagcttaagaagaatggggtaaaagtgataagcgtgacggagtaccttggggaaggcactgagtcagtgcttctggagagcctgctggaagcaatggccgagacctattccaggcagttgtctgaaaacgttcagaggggtatgagagaaagcgcgatgaaaggtctctcaactggaggtaatattccactcggctataagataattgataaaaaatacgtgattgatgaggccgaggcagagattattcgctatatctttaataactacgctgatggcaagcctaaaaaacaaatcatcgacgaaatcaacgctaaaggctggcggacgaagaaagggtgtaagttcaagtacaatagtttcaacaccatcctgaaaaaccgcaaatatatcggcgagtacatctaccaagacttggcggtgaaggacgtcattccagctattgtcgatgtggacatctttaatcaggtgcagagccagatgactcagaataagcgcaccgctggtacccagagtgcaaaacgagagtatttgctttccacaaaactgttctgcggccagtgcggaggagccatgaccggagaaacaagcaccggaaggcacggcgggaaatacgggtattacatgtgtcgaaacaagaagttccacaagaacaattgtgaaaagaagagagagcgccaggaagagctggaagagttcgtggtccaaaaaaccgtggccatgtatagtgacaaacagttcatgcaacttatcgccaagaaagtggtaaaactctacaatgacgagttcggatccaatcatattgcaacactcgaggaaaacaagcacaagctcgaaacaagatttgatgagttgtctaatgctcttgtaaagactacaaatgcaaggatgctggacaagtttaacaaggagattgaacagattgatatcgagctccaggaactggagatagagatagcgcgggaaaattccattgctcatgcccagatgactgtagatgacgtgatagattttatcaatgaggttatgaaggggaatattaaggataaagagttccagaagcagatcatcgacacatttgtgaatgccatctacgtctttgacgacaagctggttatctactacaacggctcttccgaggctgaaaaagtcaactattctgatatgctgaaagacatgcggaaagacgccacatccaacacgtttgcaccccct

SEQ ID NO: 1360 - DNA, 1719 bp, unidentified
  source 1..1719: mol_type = unassigned DNA; note = Bacteriophage uvig_400465 from the Index of /pub/databases/metagenomics/genome_sets/gut_phage_database (ebi.ac.uk)
atggcaatcatcgaacaaatccgcaagcagaaggcagccatctacgtgagagtcagcacacaatggcaagtggacaaagattccctcctggtgcaaaagcgggaactcatcgcttattgccagttggtatttgggattcaggattatgaggtatttgaggatccaggctatagcgctaagaacacagacagacctgcctatcaagagatgctgagcaggataagaaccggtgagtttagccaccttatggtctggaaaatcgaccgcatcagtcggaatcttttggactttacccagatgtacacagagctgaagaatctgggaatcattttcgtgtctaaaaacgaacagtttgacacatcaactgccatcggtgaagccatgcttaaaattatactcgtgttcgcagaactggagcgaaagatgactgccgaacgggtcacagcggtgatgctctctcgagccaacaacgggcagtggaatgggggacgcattccctatggttacaactacgacaaggggactaaagagttcacggtcaatccgaaggaggccaaagtttacaacctggtgtgtgacctgtacgaggaaaagcagagtctgatctatgtggcgaggtaccttaacgaaacggggtatagaagtagacagggaagtctgtggacccccgctacgattcgcaagctgcttacaaacgtattttacactggcgcatacagatacaatgtgcataaagaggggtccggatacaagagacgcgaagaggacgagtggattactatcgaaaatcatcatccagcgttgattgacgacgtgagatacgacaggttctgttttctgctctctaggaacgtccggggtggagttcgccctggagacacatacatacgaaaaaatgtgcatatatttggcggacttttgcggtgcggtatatgtggggcaaatatgtcagccacccttgataggatccgagccaatggctggaggccttccatctatggctgctccacaaggcggaaatcttctaacggctgctcaaacaagtatatcactgacgtctacctgggcccctttgtgtttaatttcttggccaatattcttcgaacctcaaacagcgtcactgagggcactaccccagattccctcgagaagcgactgctcagcggccctgcattcgctgatgtatcccacattcaccccgacgatctgaacagcttgctcgcgcagctgaggtctggaatgaccgggatggaatataagagcgctgctaccaaagccgctgatgtggatacccaggccaatgaaagacagatcctggaagatcggcgacgccacgatgagaacgcactcaatcggctgaaatccttgtacctgttcggcgaggatacgatatccgagaaagattatattattgaacggcagaagatcattgacgacatgaaccggatcgatgcaaaactcttcaagttcgttgaggcctccgctgatgctcttaagagtgatcttgccttcctggagcaggcttcttacctggtgatggttgaccagcttctttcaaacagaaccatcgactttgaaaagtatattcgctctatcgacccgaccattccaagggccttcctccactcagtgattagtaaaatcgaggttgcagacggcagagtcacaagcattcagttcaccaatgagctgatagttcgcttcatctatgataggagg

SEQ ID NO: 1361 - DNA, 1347 bp, unidentified
  source 1..1347: mol_type = unassigned DNA; note = Bacteriophage uvig_393882 from the Index of /pub/databases/metagenomics/genome_sets/gut_phage_database (ebi.ac.uk)
atgttgaagcgcgccgcactctacatcagagtgtctacagatcagcaagccaaacacggggactcacttgatgcccagattgccactttgaaagattatgtgagcactcaggacaacctgacgataatcgatacctacattgacgacgggatctctggacaaaaactgtacagagatgaattccagcggctgttggaggacattaaaaaaaatcgcattgacatcattctcttcacgaaactggatagatggtttcgcaatctgaggcattacctgaatattcaagaaatcttggataacagcggcgttacctggctcgccgtatctcagcccttctttaacaccgatacagcttatggaaggagctttgtgaaccaaagcatgtcttttgctgagctggaggcccagatggctagtgaacggatcaaggccgtatttgagaataagatacgcaaaggtgaagtcgtcactggttcagtgcctttcgggtataagatttgtgacaaaaaacttatcccaaacgaaaacgctcccatcgcaaaggacatctttaagcactacagcattcataatagtattaggctgacggtggagtatctgttcaatgagtatgatattacacgatccagccggaccatcaaacatatgctcaggaatcggaaatacattggcgaggtgtctggaaataagaattactgcccacctatcgtcgataaggaaacattcgagaaagtccagaacctgctggataaaaatatctcctccatcgcaaaacgaacctatatcttctccggcctggttgtatgttcttgctgcggcaaaaagatgactggacgctaccgaaagaggaaatatattaagaaggacggcaccgtgatgtactacactaagaaggtgtatagatgcaacgggaatacttataaacggaacaagtgtcctaataagatcaacatagctgaggagatactcgaagaatacctgcttaacaatatcaaggccgacgcagagaactttgaagcgaagcagaaaaagatcgcagtttcagcgccggaaaagaataacaactccaagatcctcaagaagatcgagcggttgaaaaaggcttacctcaatgaggtgataagtcttgacgaatataagaaagacaggaaagagctcgaacagatgatgatccaggtcaagcccaaagagacaatagttttcaagagtaattggttcaacaagaacattgagagcacatacagagacttcgatgaggaagagaaaagatttgtctggcgctcagtgctgaagaacctcatagtggacccacactccaagattaccattaactttcttaccaagaac

SEQ ID NO: 1362 - DNA, 1335 bp, unidentified
  source 1..1335: mol_type = unassigned DNA; note = Bacteriophage uvig_587924 from the Index of /pub/databases/metagenomics/genome_sets/gut_phage_database (ebi.ac.uk)
atgcgcgccgctttgtacattagggtgagcaccgaagagcaggccagacatgggctgagtctcagcgaccagagggtcgcactcgagagttacgccaaaagtcacgatatggccgtggtgggactctatgaggatgctggaatctccgccaggaagccatataagaaacggccggcccttttgagactccttgatgacgtgaaggccaagaaaatcgacatcgttctgtttatcaaactcgatagatggtttaggaacgtgggaaattactacgcagtccaggaaattttggagcagaataatgtagtatggcaggccactaacgaagactatgagacgcagacagctgctgggcgcttgaaagtcaatataatgctttccgtcgcacaggatgaagcagaccgcacatccgagcgcatcaagtttaccttcgaaggcaagagactgcgcggtgaagccataagcggcatggtgtccattggctataagattgaaaataagcggatcgttaaggatccagaaactgaggaagccgtgaccgcgttcttccagaagtacctggcatgtgggagcgtgtttcaggcacaagaccatttgagacttgagtacggcattgctctcgagtatcagcgggtgagcgatatgctgcgacgccctgtctactacgggtgttgttacggaatcgaaggttattgcccctcctatatcacgaaagaggagtttgagcggattcaaagcatgagacaccgagtgactcgaaggtctcccaaaaatcggatctaccttttttctggccttatgagatgcggtgagtgcggcgcttctctgggggcgaggaccgaaaccactggaggggtgcggttctacaactgccccgtacggtataacaggaacggcttctgtgccaactcaaggtcaatttccgagcgaaaggttgaacggtacctgctggatacagttgaggccaagatggaatctatccggcacgaggtttctaaactgcagacaatagagaccgctaaagactatagcagtgagatccaactgctgcgggcgaagatttctagactgaaagacttgtacttgaacgatctgatctctatagacgaatataaggccgacaagagtagcatggaggcaagaataatcgacctcgagaaaaaacaagagcctcttgctttccctaatttccccgctctgcaacacattctctccgatggttggaggcagctctactcagagctgtcagtcgaagacaagcgcgaattctggcgcattattatcaaggagatcagatggtacccagaccgacatctggaatatgatctgtcattg

SEQ ID NO: 1363 - DNA, 1419 bp, unidentified
  source 1..1419: mol_type = unassigned DNA; note = Bacteriophage uvig_151182 from the Index of /pub/databases/metagenomics/genome_sets/gut_phage_database (ebi.ac.uk)
atgaaaaatgatgttgcaatctatttgcgcaaatcccgggaggacgacgagctcaaagaggagacacttgcgagacatgagacaatgctgttggactattgcaagcggaacaacttgaatatcgtgaagatatacaaggaggtcgtaagcggagaatctatcgctaacagacctcaaatgcagagactcctggatgatgtgtctaggggcctgtatgcaggagtggtgtgcatcgagatcgaacggctctctcgaggaaatcaaattgatcaagtcgagattctggagatattcaaaagttccggcactaagatctacacacttaataagatctacgacctctccaaagaggatatagacgaggaatttctggagtttgcacttttcatgtcaaggcgggaatataagatcatcaatcgcaggctccagagaggtcggaaccagtcacgacaggagggctattacatagggagcatactgcccttcgggtttgataagatccggggcgagagagggtatattcttgttcctaacgacaatgccaaagtggtagaattcatttttaaccagtacctcgacggagtcaatgtcgccactataacgaactacctgaatgataatggtatcaaaccacagaaccacaacaagatttggaccccaccaacggtgcggaatgtgctcaaaaataagctgtatattggcatgatcaacaccaataataggggcggaactgtcaagggcaaacacgaaccgatcattgacgaattgaccttcaatagggtgcaggagcagttggctaagactcccaaagtaaccaatcgccgcaagcttagtaaccctctggctggtctggtctactgcagcgaatgcggtcgcacaatgattcgaaaaatcaacgcactgaaattcgaatatatcacatgtcccagcctgaagtgtaataccagatcactgaaactggagactcttgagtccattttgctggacgagcttaagaaggaactgaaggggtttaactactttctcgacaactacggcgaacagattaagacagaaaaggagaaggttgccgttgaactggccatcttggaaaccgaactcgagaaaaaattgaacatgatcgaaacggcttgtgagatgctggaagccgggatctacaccaaagaacttttcacaaggaggatttccgtgttggaggacgatattaaagccatgaaggagaatattagcaatatcaagaacacccctctggaggatgacaccagagcgtacaaggctatacccattctcgagaaggttctggaaaactataacgtgctcgatgccaaggagaaaaacctcttgctgaagagtattgtggagcgcatcgatttcactcgacttgaagatgacacttctctgaacatcaccctgttgctt

SEQ ID NO: 1364 - DNA, 1359 bp, unidentified
  source 1..1359: mol_type = unassigned DNA; note = Bacteriophage uvig_383745 from the Index of /pub/databases/metagenomics/genome_sets/gut_phage_database (ebi.ac.uk)
atgcaaaaggtcactagagctgtgttctacattagggtcagtcataaggaacaggtacttcatgggctgagcctgagtgcacagaagaaacacctgcaggattatgctaaggcacataaccttaaagtggtgaatacctacgtggatgagggagtctcaggcaggaagcccatccggcttcgacccgcactccaggagatgcttgccgacgcccaggagaatcaatttgacctcattctcttcatcaaaattgacagatacttcaggtcagttgctgagtaccacgaatgtcagaagatcttggataaacacaaagtgaagtggaatgcaatcaatgaggactacgatattacaacagcgagcggtcgcgcttttgtgaacatgaaactgacagtggccgaaatggaggccgaccaaaccggcgagagaattagggacgtaaacgattacaaggtcaagcagggtcagatgattacgggcgcctatccattcgggtttaaaattgaaaaaagagacgggagatcctacctgatccacgatcccgatactgagcacatcgttatagacatgatcgaacactacctcacttacaattctctgcgcggcgtaaccctgtacatcaacaagaagtacaacttgaacttgctgcaggacagcgttaaaaggctgttgaaaaacccttatttgtgtggacaataccgcgacaatcctaatttctgcgagccgtacataagcaaagagacttttgacaaaatgcaggaaatacggaaaaagaacatcaaggtgcagcgcaatcataatacctttctcttttcttctctgatcaggtgtgacaactgcaatgcccttctttccggctttgccaatcggttcaattctaatcgagtgtataactattatcggtgccggaatagattcaatcagaaaacatgtaactgcccaaacgtgtcagagcgaaagctcgaaaagtatttgttggaaaacatctccactgagtttcagaattacttcaagaagatcgagctcgaagagatgaagaacaaccagaagaacaccaagacggagatggctaagatacgggccgagatggaccgcctgaactttatgttccaaaaaaaccgaatcacaagcgcagtctataatgcggaatatgaagagctcgaaagtaggctgtccgatttgcacaccgtcaagacctctaagaaacgggatctggagcctattaaagaactcctggagtccgattttgtgtcagtttatagtacactgagccaacagaacaagcaggccttctggcgcgggatcataaaagagatcagacagctgggagaaccagatcattatgctattattttcttg

SEQ ID NO: 1365 - DNA, 1620 bp, unidentified
  source 1..1620: mol_type = unassigned DNA; note = Bacteriophage uvig_64089 from the Index of /pub/databases/metagenomics/genome_sets/gut_phage_database (ebi.ac.uk)
atgaaaaaagctgtcgcttatgcaaggttcagcagtgacatgcagagggaggagtctatcgatgcccaggtaagggcgataaagtactttgccagtcaatacggctatgatcttgctcacgtttacgctgatagagctcagtcaggccgatcagatgcaagagtagagttcaaaagaatgattgctgattccagcagcggagccttcgacaccgtcatcgttcacaaactcgatcgctttagtaggagctcctctgatgcaatctactacgaacggatcctcaatcataacggagtccagttggtatctgttatagaacggttggattctagcccggaaggccagctgatgaagatggtgattcttgggatgaatcagatgtactctcagaatttggcccgggaggtgatgaagggtttgaaggagaacgcctaccagtgcagacacacagggggcattcctcctctgggatacgacgtcgttgacggaaagtatgtcatcaatgagctggaggcccaggccgtgaggatgattttccagatgtacgcggcaggagccgggtatggcgaaatcatccaggcaatgtacgaaaatggctttaaaactaaacgggggaataggtttggcaagaacagcctgtacgaccttctccggaatgagaaatataccggggtgtacatttttaacaagagtgctagcgccgatatccggggtaagtataatcgccacgccatgaagcctgccgacgagatcattagagtagaaaatggcattccccagatcgtcgacaagaatctcttctggcaagtgcaaaagaagatgaacgacaacaagcataaaaacgcccgccataaggcaaaagtgagctatctgctgtccggcaaacttttttgtgggcactgtggacgagctatgacgggggaaatgcacagataccgcgaacgggagtatggatattacgtgtgctccagtcagaagaacaagaaaggctgtaacaagaagtctgtgcgcaaagagtggattgagcaggcagtggtggacgatattaacaatatactgtttaagccggaaagactgcaatctattgccgagaacatctacaaggcctcacattcagagaaaccagacgaaaggctcgttgaacttaaaaaacaagttacagagattgaccgcaaaataggcaatctgaccagagtcctggctgacggtcttgactcagacagcgtgcgagctgcggtggtggagttggaaaacgaacgacgaactttgtctgccaagatctatgagttggacctggtccccgatgcacagaggatgtccgtcgcggagattaagaactccatcagcaagatggcagatttctccaaaatggatgacagcggtaaaaagaggttcatcgaattgttcgttcaacggatctatctgtacgactcagatgacgggtttcgcatcagaactgtactgtctgtgaccaaccccgtggactctctggatattagtgatttccccgacttcagtaacataacaggatccgtgccctccccaccattcatctcagagaataatatccgctattttccactcggtatagtgtgcctcgattccaagcgaccttttcat

SEQ ID NO: 1366 - DNA, 1335 bp, unidentified
  source 1..1335: mol_type = unassigned DNA; note = Bacteriophage uvig_563074 from the Index of /pub/databases/metagenomics/genome_sets/gut_phage_database (ebi.ac.uk)
atgaaaagagtagccctgtacatgcgagtttcaaccgaggagcaagccttgcacggctactccctgcccgctcagaaagatgccttgcaccagtacgccaaggaccactctatgacggtggttggggagtacgtggatgaaggtatttctggccggaaaagcgccagcaaacggccggccctcgctcggatgctgcgcgacgtcgaagcaggcaagatcgaccagatccttttcattaagctcgataggtggtttagaagtgtcaaagagtattatagggttcaagaggtgctcgacagaaacaaggtgacctggcgcacaattctggaggattataatactgagagtgcggacggcatacttaaagtgaacattatgctttctgtggcgcaaaatgaggctgagaggaccggtgaacgcatcaagtttgtgctggataataaggtgcagaaaaaacaggtggtgggaaagcagccatatggctacaagatcgccattgtggagggcgaaaaaaaatccgtcattgatgaagagactgcccccgtggtacacgatatcttcaacaccttcgaccgcacaaatagcgcttccctgacaacgaagtacattaacgaaaagcatggaaccgacttcagcgcagtcttcatcaggagacttctccaccgaagcgcatatgcaggagaatatatggggataagcggatacaggcctcagtacatctcccgcgaacggtttgataaaaaccaggagatctttcgaggctcacacattaaaagaacccccacaggtagagtctacatttttactgggattctgttctgtgcccactgcggacatcggatgaaggggaaatatactacagttaagtattattgttgcccaagggctaccgatgactattcatgcgagaaccataagcatatatcagaactcaagatcgagaagtacctcacgagccacatccggagactcatgtccgaatacatcctggccgctgagaccaaggagtccgtcactaaaaggtcagatgcggcaagtgaggtgatgagtctgcgacagaagattgagcgactcaatgatatctacttggaggggaacatgaataaggagacctatcggagacggacagagcagttgaaacagaatctggtacaggctgaagaacaataccagcgctctcagcctaagaacgtttcccatctcaaggaaatacttaacactgactttctgagtgactacgacctgctgactgatgaaaacaagaggtctttgtggcgaagaatcatcacacgcatagaaatggacgaccaacagaatctgaaagtcttcttctct

SEQ ID NO: 1367 - DNA, 1443 bp, unidentified
  source 1..1443: mol_type = unassigned DNA; note = Bacteriophage uvig_256936 from the Index of /pub/databases/metagenomics/genome_sets/gut_phage_database (ebi.ac.uk)
atgaaaaagggcgccatctatgtaagagtgagtagcgaagagcaggccagagatggatatagcatcgatgctcagattaaggcgctgaaagactatgccattaagaacgatatctttctcgaagaacagtacatctacaaagacgaaggcattagcggccgcgtggcaaaaaaacgaccagccttcatggaaatgatcaagaccgccaaaagcaaaccaaagaaattcgatgtcatactggtgcacaagttcgacaggtttagcaggaatcgcgaggactcaatagtgtacaagtcactgcttaagaaagaatgcgggatcaatgttatctccattacagagcatctggatccagacgacaagatgtcaattattctggaggcttttctcgaagcaatggccgagtactattcaatcaatttgagcgaggaagttaaaaaagggcaactcgaaaaacactcccaagggggtttgcagaccaaccctagttttggctacaatgtggaaaataacaagctgatcattaacgagcaggaggagaagattgtgaagctgatattcgaatcttacgctatcgagaataagagtatgatggacatcgctaaaaaagtgaactctctcggaatcttgaccaaacggggcaacaagttcgaaaaccggactatctactatattcttaataatcccacctacatcggaaaactccgatacactcccggaaggaaaaatacctatgatttcaacgaccctaatacaatactggtcgatgggaaacatacgcctattataactaacgaactgtgggatttgacgcagttgaaactttctaagaataatatatggaaaaagccgaagagtcgcattgattattctattaaacactggtccaagggtatcatacggtgcaaagaatgtaattgtacactggttacatccggcgtcggcaagtataggtgtaatggatacaacaaggggaagtgctccaatcatacaaccatcaacattaacgaagcagagaacctcattctggtgcagatcaaaaaggactttaacgagggtacgatcaacaacattgtgtctaacaagaaggagaagaagtctatcaacgagtatgacattataacatccagtatcaccagcttggaagagaaggaggaaagaattaagcagtcctacatcaatgggatcgatactttggaggagtacaaacaaaataaggagatgcttttgaaggaaaaggagaaactgaccacaaagctgctgaccctggagaaacccagcattgagaagtataagaaggagataatcgagaacggcaagaaggtatacgagattctcactaacgacaaaatctcactcgaagagaaaaacgacatagtcaacaaacttatcaacaaggtcgaatatgatggagagattaataatctcactatcttttacaat

SEQ ID NO: 1368 - DNA, 1506 bp, unidentified
  source 1..1506: mol_type = unassigned DNA; note = Bacteriophage uvig_110275 from the Index of /pub/databases/metagenomics/genome_sets/gut_phage_database (ebi.ac.uk)
atgaataataagatctgcatgtatctgaggaaatcccgcgctgacgaggagttggagaagacactgggcgagggggaaactctttccaagcatcgaaacgccctcttgaagttcgcgaaagaaaagaaacttaatatcgtcgaaattaaggaagagattgtgtctggtgaatctttgtttttcaggcccaagatgctggaacttcttaaggaggtggaagctaaaaagtacgatggtgtactcgtcatggacatgcaacgcctcggaaggggcgatatgaaagaccagggcatcattcttgagacctttaagaacagcaacacaaagatcattactcctcagaaaacttacgatctgaataacgacttcgatgaggagtacaccgaattcgaggcctttatgagccgaaaagagctgaaaatgatcaatcgccggatgcagggcggtagggtgaggagcgtggaagaagggaattatattgccaccaatccgccatacgggtacgacataggtttcatcaataagaatagagttctgaaaatcaacgaatatgagtccaacgcaatcaagctgattttcaaactgtatctgaacgggaacggcgcttcttttatcgcaaatgagctgaataacctgggctataagaccaaactcggcaacaacttctcaaattctagcgttctgacaatcataaaaaaccctgtgtacatcggaaagattgcatggaagcggaaagacatcaaaaagtccagaaccccaggaaaagtcaaagatactaaaacaagagataagagtgagtggataattgctgatggaaagcatgaagccatcatcgatatgaacacatgggacaagacccaggagattcttaaagggaaataccacattccctatcagctgacaaactctcctgccaacccctttgccgggcttataacctgcggcgtgtgcggaaagaagatggtgatgaggaaagcccgaggcattaatagactgatgtgtatctacaaatgtggaaacaagagtactagatttgatctggttgagagtgactgttttgaggcactgaaagaacacttgaaaaactataccgctgaagtcgagaacgaacttatagaggaaaacaccaacatctacacttatcaagtttctcagctcaaaaaagaactcactactctgaataatcagcggcttaagctgtttgacctgctcgaacgcaatttgtatgatgaggacacgttcttggagcgcagcaaaaatatcaatgaccggatcgataccgtctcatccacgctcaaaagcatcgagaagttgctcaagaagaagacaaagagtagctaccaggaggatatacagttcttccaatccgtgctggacgcctataacgaaacagaggacattgcgaagaagaattcactcttgaagacgattctctacaagatagagtacaccaagctgaaccggtcaaaggagcacgtaattaaggtgtttccaaaactcagaaag

SEQ ID NO: 1369 - DNA, 1509 bp, unidentified
  source 1..1509: mol_type = unassigned DNA; note = Bacteriophage uvig_239325 from the Index of /pub/databases/metagenomics/genome_sets/gut_phage_database (ebi.ac.uk)
atgctggcatacggatattgtagatactcctccgatatgcagaacgaaaagagcatagagcagcaaaaaaatgagctggaggactacgcccagaagaacaacatcaagataaagaagtactacattgacgaagctaagagtggaaagtatgacacaagggacagcttccaagaactcatcaacgatgcctgcaaaacaaaggaaatccaggccgtgctcgtttggaaaaccgaccgctttgctcgaaaagcgatggattcattgtactataggaacaagctcgagaaattcggcattaaactgatttctataactcaaccaatcgacactgagacacctgaaggtaaacttatgtctaccctgcttgcggggatggatgaatacttttctcaaaatttggcttctaatgtaaaacgggcattgaaaagcaatgctcagaattgtcaattcaacgggggtatcgcacccctgggctacaatatcattaacaagcactatatcatcaacgagcaggagtccaagatagtgcaggagatcttcaatatgtacatcgacggcatgtcatatattgatattgcccttaatcttaacatgaagggctacaagacgaaaaaaaacaagccgtttgctaagacaagcgtcctttccatactggagaacgagaagtataccggaaagtacatttttaacaagggaacgaagaatagccatcggggcatgaggaaagacgccattgtctacgaggacgctatcccccagataatttccaaagagatctttaaaaaagccatggagcgacggaaaactaaaccacacgcagaaaatactgccaagcgagtgtatctgctcagcgggctgatcaagtgccagtgtggcggatcatacacagggtatctgtctacaaaagttaagaacgggaacattttcaagtatggctattataagtgcaacagacgggataaactgaataagtgtaccatgccttttcttaaacaggaactcctggaaaattatattattgagctgctgactaaaaaattgcttgcggaggacaacatgcagaagctggttgatcaggtaatccagcagtacaagaatctgcagaatgaagccaccgaggacgtcctgtcactcaagagcaggataaaagagattaagacccaaatggataacatcgtcgatctcatctgccgcgggatgggtaccgatgtcctcgcctgcaagcttaaagacctggagcagaagaagtataaccttgaggacgaactcaatttcaagaattccaacttcaacttcgacatcaaatcagaggatgtgatcaaaattttgaagcgcgatgtggatgagctccaggacagttctaaaagtgaacttaagaagctgatcagaaagtgggtgaagaaaatcgaagtgactaatgacttcctggacgtgtacttttactccgaagatttcttgcctcatcagatggttgcacgcaatggttttgaacccagtacctgtagagtg

SEQ ID NO: 1370 - DNA, 1509 bp, unidentified
  source 1..1509: mol_type = unassigned DNA; note = Bacteriophage uvig_578984 from the Index of /pub/databases/metagenomics/genome_sets/gut_phage_database (ebi.ac.uk)
atgaataatatttgtatctatttgcggaaaagccgcgccgatgaagaactcgaaaaaactttgggtaatggagagacgttgattaaacacagaaaggcactgctcaagtttgcaaagcagaagaacctcaacattgtggagattaaagaggagcttgtgtcagctgattctatttttcatcggccaaagatggtggaactcttgcaggaagtagagaacaaccaatatagcggcgtgctggtcatggacatccaaaggctcggacggggagacacggaagaccagggcgtcatcacccggatattcaaggaaagccatacaaaagttatcacccccaataagacttatgacttggatgacgattacgacgaagattacttcgagtttgagagtttcatgggacggaaagaatataagatgatcaaaaaaagaatgcagggcgggcgcattaggtccattgaggacgggaattatatcgctacaaatcctcctcttggatatgatattcactttatcaaccggtcccgaacccttaaaattaacgaaaacgaggccgagattataaagacaatctttaacatgtacatcaatggtaacggggcgagctctatctccaattacctgaactcactgggttataagactaagataggcaattcttttagcccaagcagtgtgctgatgatcatcaaaaatcccgtctatatcgggaaggtaacttggaagaaaaaggagattaaaaagtctaaagatcctaacaaggtgaaagacactaggaccagggacaaaagtgagtggctggtggccgacggaaagcacgaggccatcatcgatatcgacatatggaataggacacaggagattcttaataaccgataccatatcccatatcagctgacaaacgccccagtgaatcccttcgctggcctgataacctgtgggatatgcggcaaaaagatgacaatgcggaaactgagaggcatcgatcgcctcatgtgcacctataagtgcgggaatcgctctatacgattcgaacacgtcgaaaaggaggtcttgaagagtctgagatcctacctggaggaatacaagatggaggtaaacaggaaaccgaagaaaaatgacattgacctttacgtgaaacagatcactctcctcaacaaggagcttaacaccctgaataatcaaaaactgaagctgtttgatttccttgaaagaggcatctacagcgaagatgtgttcctggagcgctcaaagaacatcgagtcaaggatcacaacgctctcaaatgaaattgaaaacctggagaagctgattaaaaaggaggagaagaccatatcccagaactccattgtggtctttgaaaacatcattgatgcatacgagaagaccaacgacatctctctcaagaatcgcctcctgaagcaaatcgtttacaagattgagtacttcaaacgacctgaccagagaaacaatgatttcaaagttgttatatcccccaaactgctcaga

SEQ ID NO: 1371 - DNA, 1506 bp, unidentified
  source 1..1506: mol_type = unassigned DNA; note = Bacteriophage uvig_316826 from the Index of /pub/databases/metagenomics/genome_sets/gut_phage_database (ebi.ac.uk)
atgtctgagactacccagattggcgtcatctatgctagatattctagcgataagcagagggacgaaagcattgatggtcaaatcagagaatgcatggcatacgccgaacgggaaggcattaccattacgaatacatatattgacagagccctgtcagccaaaactgacgatcgacctgagtttaggcagatgatcctggactccaacaagcaggcatttgattatgtgttggtatatcagcttgaccgattttctaggaaccgctatgacagcgctatctacaaagcgaagctccgcaaaaatggcatcagagtcataagcgtcaaagaaaatattaaggacgacccatcaggaattatactcgaaagcgtgcttgagggcatggccgagtactatagcgcagagctgtcccagaaggtgatgcgcggaatgacagacaacgttcttcaggggaaatgggtggggaccgtagtgccatacgggtacaaactttccaacaatcggcagttggaaattaacgagcatgaagcgaacgtggttcggaaactgtttgatatgtacttgcaacggcataccctgtctgagatggcttcatacatgaatgcaaacggacaccttacccacaagggtaagcccttcaacaccaactcaattaaagccatcataagtaacgagaagtacatcggagtctacagttggggctcagaaagaatcgaaaacgccattcccccgatcattgataaaaatatcttcgagaaggcccagcacaagcggaacctccgcgcgaagaagaagggaaatagatccgaactttaccaactgtgcgggaaacttgaatgtggccggtgcggcggtaattatgttggcagtactggcacaagtaagactggggccatgcatcattattatgtatgtagcaataggcgccgcaaaaatgcatgtaaagcccagaatatccgaagagacgccctggacgatatagtcatctcacaaacgctggctatactcaacaagcctaatgtggttaacaagatagctgaatacgctgccagttccgggaaaaatttgcagtctgagacagtcgctcagattgatataatcgatgctcacatcagggatctgaaaaagtccctggacaattacatgactgctatcgccaatgggttcatctctgacgtgctcaagcacaggattgaaactaccgagcaagagctgaaggatcacatcgagatcaaaacctccttggagaacacaattatacctgtggagctgaccgaggatcacattcggttctttctgctgaaaatggcgaaagaaaaccccagcactttgcgcggacgagccaggatcatcgaggcattcgtgcaccatgtgacgatctatgaggaccatattgagatcgtgttcaactacaagaacgaactgagcgagttccacgacaagacactcgagtcctctctgttgaatgatctcgttacacagaagggttttgagccactcgcattc

SEQ ID NO: 1372 - DNA, 1356 bp, unidentified
  source 1..1356: mol_type = unassigned DNA; note = Bacteriophage uvig_86231 from the Index of /pub/databases/metagenomics/genome_sets/gut_phage_database (ebi.ac.uk)
atggagcggtgtgtgatctacgcccgcgtttccacccacgaacaggccgaaaatgattcactgaaacaccagatagagcgctgtcgcgcttatgccactgccaggggctacgaaatcgtgtccacgttgtccgatgtggagagtgggagcaacaacgagagagagcaatacctgatcctgaaggacatgatcaaagaatccgtatttgacgttctggtggtttgggaattctctagaatctctcggaatgctaaagagttcatcactattaccgaggaactgcagaatcaggatattgggctggtgtgcattcaacagaatatcgatacaagcacaattacaggtaaggccgtggcacacctgatagctgtgatatctgagcttgaaaaagacactattaggatgagagtgaaagataggatgatccagttgattaaaagtggaagatatgtatcacatcagccatttggctacaagtataataacaagctcctcgaacttgtcgaagaggaagccttgataatcaaagacatctttagccgatttcttaaaggggaatctaggtttatcattgcgaagcattacaacgtggatttcatcaagattgacaggtggctccggagccccctttacattggcaaacttgcatataagggaaccggcaaaaacaagctcaaagacgaatatatcctgtatgatgggctgcacacccctatcatcgacgaagataccttttacaatgtacaggctattctgaacaagaataagcgccatagaatcaataataacccgaactatattttctccggaattctctactgtgagtgtggagacaagatgtacggtactaagcagcgaaccactacatactatatctgcaccaaaaaaaggatcgaatctaagaaatcatgcaactcaaaaacaattaaaagtgaagagatcgagaaagtcgtcaaggaggaactgcgagcacgcctcaagaacaaggacattgcataccagaagaacgataaggagtccgagatgaagataaaaagcaacgagaaacaaattaaagagatggagaaccggattaataaggccaaagatctgtactatgctaatctgctgacgctcgatgactatagcaaagacataagtaagttcaaccagatcattgagcaattgaagaaagacacaagtatcttggagaagaagatcaataagcagtatgattctcggaaaatcaaggagatcgtcatgagcaagatagattccatagagtcagacaagatcaagttcaagaagatttgcaacgtcgcgattgacaagatcgtgattgacaaggagggcaaaatacaagtttacttcaatttc

SEQ ID NO: 1373 - DNA, 1491 bp, unidentified
  source 1..1491: mol_type = unassigned DNA; note = Bacteriophage uvig_125074 from the Index of /pub/databases/metagenomics/genome_sets/gut_phage_database (ebi.ac.uk)
atgaaatacctgatctacgctcgcgtgtccgagagggggagcgggttcgaagggcagactaccattccgatgcagatcaaaatttgcgaagactacattcgaattatgggaggcgaagtttttgatagtagatcagacgagttcattagcggtaagaatatcgaggatcggccggccttcagatctattatggaggagctgcggtccggtacggctgagtgggacgcaattatcgtgtacaagttctctcgaatcagcaggagcttgcgggactccttgaatattgtagctgaactgcaggagcacgataagggcttcgtctccgcaactgagcactttgactgtaccacaaccaccggacaattgttttttaacatgctgcagagtttcaacgaatttgaacggaagcggacagcggatactatccgcgataaaatgatgtctatcgcggaagccggcttgtggcctgcaggccgaacaccatatgggtacaaacgaggaggacggaaagataacaatctgtacgttgatgaaagagcagccgaagtaatcagggatatcttcaatcagtacttgtccgacacccctgtttggagcatagttcggaagtaccgcaatattatgagcagatctcgcattttcctgactctgaagaaccccgtgtatgtcggcgctattccatatggagggaagattttccctgggaaacaccaggctattataaacaaggacgtgttcgagagggtccaagctaaacttcccacaaaaaatggtaatatcagaccaaaggctcataggtacccttatttgcttggagggataatcttttgtcgctgtggccatcggatgacccccgagacagccaagagtggcagatatgcttactatcggtgcgtcgatgcagaatattgcaagcgcagaatttcagctgagaaagtggaaaaatccgtgatcgacttttttaggaatacaatgaggtcagaaagaatcatcgagaagacgctggcgcagatagacgccgatgccgcaaagcaggcagagaacaaccagccagagatcactagactcaagagcgtgataacaactgtcaaggccgagcgcgagcgaatttttcggatgctcctgagttctgaactttcccaatcactcgtgaacatggccaatactaaaatcgccgacctggatgaggagctctctggtcttaccgaaaggctcgtgcttcttgaaaaccaaaaaaagatcggctccgaagcccataacctcgccaaaacgctgttgctgagaacccgcaacttcgcggaggccctggagaccgccggctctatatccaaggaggagctgaggcagatcttgctggtttacatccagaaagtggtgtcaatcgacgataagacttgcgacgtaatagtcaagctcggaaaaagttctaccaaggacatggaatggtatacccagagtgtggagcccacaaccaggagcctcagctcaaag

SEQ ID NO: 1374 - DNA, 1668 bp, unidentified
  source 1..1668: mol_type = unassigned DNA; note = Bacteriophage uvig_337673 from the Index of /pub/databases/metagenomics/genome_sets/gut_phage_database (ebi.ac.uk)
atggaaaaattcgcatgcatgtatctgaggctgagccgcgaggacggcgattccacggaatccaatagcatatccaatcagaggcagattattaagagttatgcccgagataacgatttcaaaatagtggcagagtatgtggacgatggtttctccgggtccaattttgataggcctaagttcaagaaaatgattcaggacttggaggagaagaagttcaagatcattattgtgaaggacttgtcccgattcggaagagactacatcgaatctggcaagtacctccagaaaatctttccggagaagggtatccggttcatcagcgtcaatgacaactacgatagcgaaaacgccgacgtgtcagacactcatctgattctccctattagaaactttatcaacgatagttactgtagagacatctccatgaaggtaaagagttcaaaagagattaaaaggaaaaacggggagttcataggggcctttgctccctttggatataagaaagattctaaaaataagcacaagcttgtagttgacaccgaagttagtcacattatcgagagaatctttaacatgaagatagacgggtattcttctaaagctatcgctgattttctcaactccataggatgtgttacccccagcaaacataaggagaactctggagacaatcatactacaggcttcatcgtgaaagacagtaagtgggatgccaaaatggtgaaccgcattatcaccaataaggtctacattggcgtcttggaacagggaaaaacacgcaaactgaactataagtcaaaacgagaggtggaagtgaatgaggaagattggatcgtgatcaatgacagccacaggcctattattagtaaaagtatctacgccctcgcaaacaagatgatgctgagagacgtgaagcagagcgctgatataccacatatcctcagcggcatgttgtattgtaaagattgcggcagctcaatggttcggaggaaagtcaagtctaaaaatgggtataacattttctacatctgctcacactacaataacaagggggactgcacaagacactctattaaagaggactacctgctggacatgactctgttcgcactgaaggattacctgaaaaaatataacgagctgctgtcccaagtaaacaagctggatgtgtccaagatcacgtttaacatcgactttgagtcactgaatagcgaaaagcggaaatatgagcgcctccgccaaagcctttacatggatcttgaaaatgaattgataaccagcgaagagttcgagcgctttcggaagaactacttgatcaagatccgagaaattgaaaagcagattgcgaccaaaaagaatatattggcgaatctccaggagaaaatgaagaataaggactctcttgtctcagaaatagtgccaactgacctgtcatctctgaatcggttgactatcgtaagcttcatcgatcggattgagatcggagagaacaatgagatcaacttcgtgtttaacaatctggagaccgttaaccttctgaagacacttattaaagaagagtccgaatctaagagtgaggtcaagaaaaacctgatctccattaataaggtctttggtaatgccctcgaaaacaagacacccatgcaactcgccggcggcgtgttg

SEQ ID NO: 1375 - DNA, 1296 bp, unidentified
  source 1..1296: mol_type = unassigned DNA; note = Bacteriophage uvig_595969 from the Index of /pub/databases/metagenomics/genome_sets/gut_phage_database (ebi.ac.uk)
atgcgcgtggcactgtacatcagagtgtccactgaagagcaggctgttcacggacttagcgtagacgaccagaaagattctctgaagaaatgggcggaggagaacaagcacaaagtagtggactattacattgatgcaggggtgagcggaaggaagtctgtctcaaagcgccctgaacttcaacggctgctctccgacgtggaagccgggaagattgatctggtcgcttttaccaagctggacaggtggtttagaaacatcggggagttttacaaggcacaggaggtccttgacgcccatggagtggtgtggcaggccacttatgaggactacgagacagccaccgctgctgggaggctgaaggttaacattatgctttccgtggcccaggatgaagccgaccgcacatcagaaagagttaaaaggattatgcagcacaaacgagaactgggtctgtgtcctgcgggcaagacgcccatagggctcaaaagcgttgagtcccggctctgcattgaagaagagaccgcacacatcgcaaggagaatgttcgaggactacatagctaccggtagcgtgaaccacgtaaaaaagatgttgatctccgagttcggaatcatgcgagccaatcaccacattaagggagcactcagtaatgagcgctatgttggcttgaataatggcattaaagtgtgtgacgcactgattccacccgaagattttgcgcttgtccaaagaatgctgactgctcgcagcattcgaaacaacggctctaaacatacttggttgttcagtggcctggtctggtgcgcagagtgcggtcatcggctggtaacccatagtacgcgccagcgggggacagactacttctactatagatgtaaaaattatgagctcggaatatgcagacataagaagcggataaacgaagctgctttggaaaagtatctgttggcgaagctgcccatcgaggtccaagcccacaatgccaagctcaaggctggcaaaaccaaaccacccgtggatacagccgccatcaaaaggaagatggataagcttactgatctgtacctcgccgacctgatctcaagggagaaatatgaggtcgaatacacagccctcaaggagaaactgaatgtgccgccggagcctaaaccaatcaacgaggagctggtgatgtcattgcttgatgcctacgataagctccctccatctggcaaaaaggaagtgtggaatcggtttatccgacggatcgtggtcagtgaaaacggcgatatcttcttcgaacttgtttggttg

SEQ ID NO: 1376 - DNA, 1269 bp, unidentified
  source 1..1269: mol_type = unassigned DNA; note = Bacteriophage uvig_177087 from the Index of /pub/databases/metagenomics/genome_sets/gut_phage_database (ebi.ac.uk)
atgcgcgctgccctgtacgagcgcgtgagcaccgacgagcagcgaatccatggcctgtctctcgatgcacagagagaggttctcgaggaatatgccaagaaccatgggatggtcgtcgctggacactatacagatgcgggggtatcaggtcagaagcctttgagtaagcgccccgctttgaggcggctgctcgaggacgtggacgctgggaaaatcgatatcgttcttttcactaagctggacaggtggagtcgaaaggtgaaggaatactacaaggctcaggacattcttgacaggcacaagataccttggcgagccgtattggaggactacgagaccgaaaccccaagcggcgaattcaaggtcaatataatgttgtctgtgaaccagaatgaggcacaacggacatccgaaaggatcaaaactgtgttcgacgccaaaagaagtcggggtgaagtgtgttcagggaaagtgccctttggcgtgcggattagtgcagacaagtgcctggaagccgtcgaaccagaggcctcaattgtgagggatgtattccgcgaatacctggcggtgagatcctcttacatcgcgcaacgatatatggccaacaattacggagtggtcaggaacaccactgcctttcggagaatgctgcgcaatcagagataccggggactggttgtggatgaagccgtcttcgatgctgtgcaggaggtgctggcggttcgctcacagagaaatgcccccatcggtagagtgtacctcttcaaaggactggtagtctgtggcaactgtgggcaccacgccgccgcatatttctgcaaaaacgtctgctattatcgctgctcttacagggtgaacacaggccaatgtaattttgctaagcacgttcgagaagatgttatcgagagaaagctgctcgatggatttctgatcgccgcagagaggttgaatgcagaattgctggggagacgggctgctccgcctatagatcgcgccggtattaaacggaaaatggacaagcttacagacctttatatgagcgacctgatctccagggataagtatgaggtcgagtaccgggagctccaagctgcactttccgtgcccgatcctgaggaacagcgcccaattgatataggcgccgcaaggtccgcactggagatgtatggccagctcgacagggctggccagaaagagttttggagcagaacgattaaagagattaccctccatccagacgccggaatcagctttagccttcgacagttg

SEQ ID NO: 1377 - DNA, 1368 bp, unidentified
  source 1..1368: mol_type = unassigned DNA; note = Bacteriophage uvig_594539 from the Index of /pub/databases/metagenomics/genome_sets/gut_phage_database (ebi.ac.uk)
atggacaagaataagaaaatcacagttccaggactcctgcgcaccgcgatctacatacgcgtgtctaccgaccagcaggccaagaatggggattctatcggggaacaaacagaaaccttgactacgtatgttaatggaagggatgaccttattctgtccgggatgtacattgacgatggtataagcggtcagaagattaatagagatggctttacccgacttattggagatgtgtgtgcaggtcgaattgacctcatcgtcttcacaaagcttgatagatggtttcggagcttgaggcattacctgaacgtccaagccaccctggaggaacacggcgtgaactggatctcagtctcccagcctttctttgatacctctacacctcagggccgagcttttatcgccaatagtatggccttcgccgagctcgaagcacaaaacgattccgaaaggatacgagctgtgtttgaccacaagtacaagcacggcgaagttttgtccggcaaggtgcccctgggtttctccatcgtagataaacatctgagccccaacgacgacgccgctaaggttcttgccatttttcaacgcttcagtagaagcggcagtttgaatgacacagtacggttcatcgaatccgagtacggcattgtgatgtcaatcagcaacctcaagaaggccatcctcgcaaatgcaaagtacatagggatttttagggacaataccaactattgccccgccataatccctcaggaactgttcgacgatgtccagaggaagctgactttcaacgtgaagattagccagaaacacacttacatcttctcaggactggtgagatgcgcttgttgcggaagtgcggcttctgggtttcagcacagatcttctcactccggggtggtatatagatactcagcatataggtgtcgccaggcctttgctgtcaagcggtgccataacaagaagattttcatcgagaaaagcttggagacttatgtgctgcagcatatcaaaccagaacttcagaaagccatcatttcttacgaggttgctgctgcgcccgcggcagatcagaagcagaaacgcgccctgataacgcggaaaatcgagaaattgaaagagctttacgtcaacgacctgattagcctggaggagtataaagtagacaaggcagcatacactgcccagctggatgagctcccagccgaagctagtccagaaaaagacttgactgctttgcggagatttctggcactcgacttggacgccgtgtatacctccatgacaccggaggagaaacggtatctctggaggtcagtgattaaagagatccgggtcgatgagcaacgcaacgtgacgatcattttcctg

SEQ ID NO: 1378 - DNA, 1437 bp, unidentified
  source 1..1437: mol_type = unassigned DNA; note = Bacteriophage uvig_236070 from the Index of /pub/databases/metagenomics/genome_sets/gut_phage_database (ebi.ac.uk)
atggatgacctgaagatagccgccgcctatattagggtatctacagatgaccagaccgaactgtctcccgatagccagatcaaggtggttcgcgaattcgccaagcagaaaggttatctcattcccaaggaatacatctttagggacgacgggattagcggcagaaaagcaagcaaaagacccgagtttaaccatatgatcgctgtggccaaacaaactccttctccgttttccgccatcatggtttggaaattcagtcggtttgcacggaatcaggaggaagctattttctacaaaggcatgttgaaaaaacgcgggattgacgtgatttcaacatcagaaccgattatagatggacccttcggctcccttatcgaaaggatcatcgaatggtttgatgaatactactcaattaatttgtcaacagaggtcaaacgcggcatgacggagaaggttagccggggtggggctgtttccatcccagcatttggctacgacatagtcaacaagaagtatcaggtgaaccctatcaacgctccaatcgtacagcgaatttttatcaagtatcttaacggggtgggttgtagggccattgccaatgaactcaatgacctcggaatcaaaacaacccgcggcaataattgggagaataggaccatagagtatatactcaggaacccagtctacatcggaaagatcagatggaacccaaaacggcgcactatgcgaaattacgatgacaaggacattatgatcgtggatgggattcatcagcctatcatcgacaccgacctttttgataaggtgcaaaagaaacttgacgagaacaaggcgaagtatagaccctacatcacagatagacagaacggaaaagagtacatgctgaaaggattggtgaagtgtagcaactgcggggccactatgtctatgagttgtaacggcttgcagtgtataaagtatacccacggaacctgcaaggtatcccactatattcagctcaataagctcaatgaagtcgtgatcaacgcaatagatgatactctgaaatccggcgacttccaactcaaacctaaggagcagcctcacgaggagcctcaggaactgaacgtggaattcatgatcgagaaggagaatacaaaactcaaacgggttaaggaggcttacgaagagggtgtctacaacctggctgaattcaagcagcgcaaggagctgattgagtcaaaaattcactctttgcaaaagcaaaataagccaccagagcccaagctcgatcatctgcttgcgaaaaagaagctgatgagccggcgaaaagagatcattagcacgctgaaaagtaaaagtacccccgaggtggagaagaacgcactgctgtgcactttcatcgacaagattatattcaatagatccctgtcttccgtcgaactgttcttttgcttc

SEQ ID NO: 1379 - DNA, 1719 bp, unidentified
  source 1..1719: mol_type = unassigned DNA; note = Bacteriophage uvig_171405 from the Index of /pub/databases/metagenomics/genome_sets/gut_phage_database (ebi.ac.uk)
atgcagaaaaaccagactaaaaaagctgccctgtacattcgggtgagcacccactaccagattgataaggactctctgccgttccaacgcaatgaactgattaactacgcaaagtatgctttgggcattgatgactatgcgatttttgaggatgctgggtatagcggcaaaaacaccgacaggcccgcctaccaggacatgatgaggcggatccgggcgaaagaattttcacacttgtgcgtatggaaaatcgaccggataagccggaacctgcttgactttgctgccatgtatgaggagctcaagaagtttaactgcacctttgtgtccaaaaatgagcagtttgatacgtcttccgcaatcggcgaagcaatgctcagaatcatcttggttttcgccgagcttgagagaaaactgactgcagagcgagtcacatccatcatgtactccagggcaaacaaggggctctggaacggagccccaataccactgggctacaagtgggatgctaaaggcaagtaccctgttatagatgaggacaccgccgtcgtagtgagatatatctacgatcagtatgagaagatacacagcaccatgaagctgagcgataagcttaatagagaaaacatcaaaagtgctagaggtggggagtggacgggaacaactgtcaaagggatacttaggaatccattctacaaaggtacgtacaggtacaattacaagacccagaccgggaggattaagcccgtcgaagagcaaatcatccacgaggacaatcaccccggaatcatagacaaagaacaatgggaccgagttaacaagattttggacgagaattctactagatcagtagcccagctgcgatcaaacgttaagtacactcacatttttagcaaacttctgaggtgcggccagtgtggacatacaatgggcggcgggcttgacagggcaagaagcgacgggtatagacccagccgctattactgcacctcccatacatcaaaaagtggatgtacaaatggtgtgtatagtgatgtgtatcttgggcctttcgtcttcaactacatcgccaatctcgtgagagctcagcgcgccttgacagattctcagaagccacgagacctcgaaaggatgctcctgcgcggaaagttctttgataatgtggctggcattgagcagcaaggtttgcttgacacttacaatactattctgtacggatctggcgaggacgtgatgctgcagccctctccggaaattgcagcccagtccgcttccgaattggaactgctggatcgggatcaaaagaagtacgagcgcgcccttgaacggattgagcagctctatctgtattctgaggagtctatgccggaaaaggactatgtgcttaaacgcaacgaacttaaaacaatgctcgacaatatcgctgagcgacgcgccgaagtcaacagccggctgggtctggcacctgcctcaagtgatttcctcgagaaagcgacctatttctatctgaccaactctctgaatcagaagcgcagcctcgactttcgcaagatggtggatacctttgaacctaaaatgctgcaagatttcctctgttccgtgatcgaccatattgtcgtggttgatggacatgtggcctccatctcattcaagaacggcctgacaaataagttcatctacaaggcgacaaagcccccaaaaagtgccagtactaagcct

SEQ ID NO: 1380 - DNA, 1713 bp, unidentified
  source 1..1713: mol_type = unassigned DNA; note = Bacteriophage uvig_578207 from the Index of /pub/databases/metagenomics/genome_sets/gut_phage_database (ebi.ac.uk)
atggataacaacagcaacatcagagtggccatctacattagggtctccaccctttaccagattgataaggactcattgcccatgcaaagggaggatctgacaaactattgcaagtacattttcaacaccgaggattacgaaatttttgaagatgctggctactccgggaaaaataccgggcgcccagcgtatcaggagatgatgcttaagatcaggaaaaaacagttcacacatctgcttgtgtggaagattgaccggatttctcgcaatctgctcgattttagcaacatgtatgaggaactgaagaaatataacgttaccttcatctctaagaatgaacagttcgatacttcatccgccatgggagaggcaatgttgaaaatcattctggtctttgctgaactggaacggaaactgactagcgagcgagtgtcctctacaatgatttccagggccactaaaggcttgtggaacggggctaatgttccactgggatataagtggaacgaggagaagaaatacccttctcccgatgaaaaagaggcaaaggtggtccagtatatctatagcacttacatccagtgcaaaagttgcgccaaggtgtccaaaattctcaatgaagaggatatacctacaaaacgaggtggtaagtggacttcaaagacagttaatgatatcctccgaaatcccttctacaagggcacgtatagatacaattataaagagagcgccagaggcaaaaaaaaggatgagagtgaatggataatcattgacaataatcacgaagcgattatagacaaagctatttggcaactcgcaaatgaaaccttggacactaacgccgggctggtcggtagacgctacgtgggaaaaatacacacacatattttctcacggaaactggtgtgtagcaagtgcaagagtggatataatgctagcaaggataccatgcgcgaaaatggctacactccgagcaagtacgtatgtagtggtaaagtgcggaaattcatttgtgacgctaagctggtatccgacgtggtcctgggaccatttgtattgacccttatcaagaacattatcctcgccggcaatatgtgtatcgataccaccgatgaacttgaagatatcttgctggacggcagtcctttcgaagacgtgctttcaatcaaccaagaggacctggaaatgctctacgtggcattgtataaggtgcctacacagaagtcaaatatcacctactctcatattaaggacaagcagcccaagagtctcgaagaccaggaaaacgagtacgtaaagaagaggatcgagaagttcaaaaaagagaaaacgaagtacataaacgccctggagagacttgaggagctgtacatgtttagcgaagaggggatatctaaggtcgactatgttatcaagaagaaagagtatgagtctaaactcaacaattccgaagagaacctcaagcagttttatcgcatgaacgacacggagaagaacatccaggatatgacctttatcctgaattacgagaacatcatcttcaatcgggccatgaacgacaataatgagctggatttcaaaatgcttatgacaaacgtgaataacaaggttgttaaagacctcatcgacatggtcattaagaacatctatatgaaggacaaagcagtggacataatagagtttcaaaacggcttggcgctgcactttaattac

SEQ ID NO: 1381 - DNA, 1317 bp, unidentified
  source 1..1317: mol_type = unassigned DNA; note = Bacteriophage uvig_354904 from the Index of /pub/databases/metagenomics/genome_sets/gut_phage_database (ebi.ac.uk)
atggacaaaatcaagcgagctgcgctctacattagagtctccacagaagaacaggctagacacggatatagcctcgcggcacaactggaggatctgaaggcttatgccaccaagaagaagtataagattgtggacgcctatattgacgagggggtaagcgcacgaaagaaacccttcaatagaaaggaattcaaaaggctgctggaagatgttaaggagaataagatcgatacgatcctgtttatcaagctggaccgctggtttaggtctgtgagtgactactacaaagcgcaggaaattttggatgcacacaaggtggagtgggagaccactcaggagtcatataatacaactaccacaaatggccggctgatgttgaatatcaaactgagcgtcgcacaaaatgagagtgacatgactagcgatcgcataaagtttgtctttgcccagaagagagcccttaaacaggtgacttgtggtagtgtgctgctgggctttaaaattgagaacaagcacttggtgcattccgataaggctccgatagctaaagccatcttcgaatactatcttttgcaccaatctttctcctcaaccataaagtggctgaaacaggaataccagattacaatgtatcctgcatcacttaaaaggttgctcagatccgaactgtacatagggaagaaaggtgatgacgacgagttcactgacaggatcattgacaacgaaacattctacgctgtccaggatatcattaagcgcaacgtaaaacgcgccccttctggcaggatctatctttttacgggcctcatccgatgccctagttgcggatcttccatgagcgtgagcgttactgagcagaaaaaccacacctacatctattacctgtgtcccaggcggtacaacacctttgattgcaacgacaaaattcggatttccgagtcaaaacttgaagccagtcttctcaatacccttgccaagcagctggagggatatttcctgtccatcaccgccaaacaggagaagcccatcaagcataataacgccgccatcaaaaaaaagttggaacggcttaaggacctgtacctcaacgagctcattgaccttgatacatataagaaagattacaaggctctccaaaaagaacttataccagttatcatcaagccagatccaatccggataacgaaaaagaaggagcaaatctacgatgctattcaggcatacagctctctgtctaaagagctgaaaagatcattctggcgcagcctcatcgaccatattgacgtctctggggacatgcccgtgatttttttcaag

SEQ ID NO: 1382 - DNA, 1491 bp, unidentified
  source 1..1491: mol_type = unassigned DNA; note = Bacteriophage uvig_15514 from the Index of /pub/databases/metagenomics/genome_sets/gut_phage_database (ebi.ac.uk)
atgagcaatgcaattatctacacccgcgtctctaccaaaaaccaggcggaggagggctatagcctggctggccaggagaaggattgtaagttttttgccgagatgaataattactcagtcctcaaagtgttcgttgagaagggggaatccgccaagacacaggatcgcacagaactgcagaatctgatgaagttctgcatcgccaacaagaaaaacatcgacgcgataatcatttggaagattgatagactcacccgagacgtgaaagatttttacaacctgcaggatttctttgcaaagcttaacataaaggtgctgttcgccagagagaacaacggtgacagcgctggtgacaaacttacccggaacttgatgggcgttctcgcccagtacgaaaacgatcagaaggccgaaagggtgacgaatggaatgaaaattgcatttctccaagggcactggatgtggcgggctcctattggttatatcatgaagaatggaaacattgagcctgatccgaaaacggctcatcatgtcaaaaagatattcaagttgttcagcaccggaatgtacgagcaaacacagttgatcaaaatcatcgaggccgacgggataaagattaatacaaataggatgtgtaggttgctgaggaatccattgtatatgggctacatgcacaagaatacttgggcggaagagcctatcagggggatctttgagcccctgatttccgaagtggaattcaagaaggtgcaggacatccttaacggcaaaaagccagtaattaccgcatacaaaaggaataaccctgaatttccgttgcgccagttcatcacttgctctaattgtaaccagcccctgaccgggagtaagagtaaaggccgcaaggagcggtacgcctattatcactgccaccataaggactgttgcattaactttagaatccggaaggaaaagctcgagaagatattcgttgattatctgaaattcattaaacccgaacggaatctcctgaacctttttgaagcaactgtcaaagacgtctataacgagaaactgtctgtgcgattgaattcccagaaacaagtacaggataaactcgtggaacttaagaacagaaagtccaaacttatcgatttcagaattgatggaactatttcagaagacgactataagtttaaaacagaacaactggccgaagagatccaagagcacgaattccggctgcgcgagattgatgagatagacaatgacctctgcaagtgcctcaaatacgcttgtaagatcattgagaacatagatacactttggatcaacggcgacctcgacttgaaacagcgacttcagaagctgatcttccccaaaggactgatgtactactccaatgacttcagaactgccgagatctcaagcctgtttatcaaaaaggacgcttcactgaccagctataataacatggtgccaccaagtgagtttgagagtctgtctactccc

SEQ ID NO: 1383 - DNA, 1443 bp, unidentified
  source 1..1443: mol_type = unassigned DNA; note = Bacteriophage uvig_83898 from the Index of /pub/databases/metagenomics/genome_sets/gut_phage_database (ebi.ac.uk)
atgaaaatcgccgccgtgtacacacgcgtctctaccgacgagcaagcacgagagggatactcactggacgcccagctgaaggccattaagaaatacgctcagaacaatgatattcttatagactccaagtatatcttctctgacgagggcatcagcggtaggaaagcggagaaacgacccgccttcatggaaatgattaagcaggctaagagtaagccgcgcaaatttgacgtgatattggtccacaagttcgatagattctcaagaaatcgagaagatagcgtagtctacaagagcctgctcaaaaaagagtatggaattcctgttataagtatctccgaacctctggatccagacgataagatgtctgtgatcatggaagcatttctcgaagccatggccgagtactactctctcaatctttccggtgaggttaaaaaaggccagttggagaagcacagcaaaggagagcttcaaaccaacccgagctttgggtataatgtaagcgacaacaagctcattgtgaacgaagacgaagccaatgtggtgaaaatgatcttcgagcaatacgcaatcgacaatcttccaatgatgcagattgctcggaacgtgaatgctctcaatgttaaaaccaaaaggggtagacattttgaaaatcgcacaatctactacattctgaacaaccccgtctatatcggcaagctgcggtataccccaggacggagaaatcagtatgactttgatgatcccaacacgatcctggtcgatggccagcatgagcctattatttccatggatctgtggaacagtgtacagatgaagctgacaaaaaactcaatatggaagaagcccaaacagcacattgatgtcaatcccaagcactggactaaaggacttgtgaggtgtaaagaatgtggctgcactatggtgacttgcgggaaaacgaaactcaggtgtaacggctacaataaggggaaatgctccaactcttcaacactgctgatcgctgatgtgtacgaccttattatagacaacataaagcaggtgatgaagaatggcagaatcgagcatattgtccagtccaagaaggagaaaaaagaatctaaccagtacctgatcctccagcaccagctggaacaattgtcagataaggaacaacgcatcaaagaagcgtatcgggaaggggtggataccatcgacgaatacaaggagaataagaacatcattttgcgggagaagaataggctgctcaaagagatcgacaaggttgaaaagccaaaaactgagaacaagaagaaggagattatcgagaacgggaaaaaggtgtatgagatcttgaccgacgacaagataagtctcaaggagaagaatgaggtagcacatattctgatcaacaaggttgagtatgatcctactagcaatacactcgaactctattataac

SEQ ID NO: 1384 - DNA, 1473 bp, unidentified
  source 1..1473: mol_type = unassigned DNA; note = Bacteriophage uvig_246969 from the Index of /pub/databases/metagenomics/genome_sets/gut_phage_database (ebi.ac.uk)
atgattgccatctacagccgccagtctatcgacaagaaggacagtatttctatcgaaactcagatcgagttctgccggcatgaggcaaagggggaggagtataaagtttacagtgacaaggggtactcaggaaagaataccaatcggccaggttttgagaatatgatggatgatattaaacgggggctgatcaataaggtagtggtgtatcgcctggaccgaatctctcgatccatagtcgacttcgcagatttcatcgattctcttgaaaaatataacacaagcttcatcagcgcgacagaaaaattcgataccgctgcccccatgggcagagccatgctgtacattattatcgtgttcgcccagcttgagagagaaacaattgctgaaaggatcaaagacaactattatgagaggattaagcggggaggcattggtggcgggccagcgccttatggatttgatattagtaagattaccatcgatggaacgaaaatgtccagctacacccctaatgggaatatcgagacggtgaaaaagatatttgacatgtacacatctgcaggtgtaagccttgctgacattcagcggtacctcaaggagaagaacattaaaaccgcatcaggaaagccctgggataacacaaagctctccacccttataaagagtccgagctacgttaaggcagatattagcatctacaattactacaagcaaaaaggagccgtgatcgcatccccattggaggacttcaacggcgaaaacgcttgcctgctggtgggcaagaggaacagcaataccaggaagtattccgatatcactgaccacatcctggcggtaagcgctcataaaggaatcgttgatagtggcacatttctgctgtgtcagcaaaagctctcagaaaatcgccaaattaaaaaccttcataaagggaaatattcatggcttactggttttgttaagtgtggctattgcggctacagctttagtgtcaggaaaagccgcacttcagagggcgagactgcctacttttacgactccgggaagtacctctataagacgtgtactcacaatcagacccacagagtcaaagatgtggaagacgtggtggaaagtgagttgatacgcataattgagaagatagatttcaaagagaaggaggatacccccgtcaacaaccagaacatcaacaagatcaaagagatcgacgccaaaatatccaatttgatcctggctttggaagactgctctggcgtgtcctcctcatatatcaacactcgaattgctgaactggatatggaaaaacaggaactcctcgacaaaatttcttcagacgccctcaatagaaaaaagatcgccctgcctaagatagaggactataacaatatgtctttcgaagagaaaagattgctggccaagatgctcatcgacaaggtcattctgacagacgataagatagagatctcctacaaa

SEQ ID NO: 1385 - DNA, 1380 bp, unidentified
  source 1..1380: mol_type = unassigned DNA; note = Bacteriophage uvig_187146 from the Index of /pub/databases/metagenomics/genome_sets/gut_phage_database (ebi.ac.uk)
atgaaaaaccaaatcgtgcagaagaagataagatgcgccatctacacaaggaagtcagtcgccgagggccttgagaaagaattcaataccctggacgcccaacgcgaagcgggagagagctacatccagagtcagaagcatgaggggtggattgtagtggacaaacactacgatgatgggggcttctccggcggtaatatggagagaccagcactgagggagctctttgatgacatagagaatggaaaaatcgatatcgtggtggtgtataaggtggacaggttgagtcgctcactgatggacttcgccaaaattatcgagctgttcgaaaagcataacgtctcctttgtcagcgtgacccagctgttcaatacgaaagattctatgggacggctgaccctcaatatccttctgtccttcgcacagtttgagcgggagctcatctccgaaaggatgagggacaaaatgtccgccgctagacgaaaagggaagtgggtaggaggtattcctctcctgggatacgacattgtgcccgaaggtggggcaatcgaagttaaccatagtgaagctcagactgtgcggaaaatcttctcttattataccgagaacaggtcactgcttcagacactgagctatttgaatgaaaacgatatccgcactaagcaatggaaaacccggaaaggcgtgattcggggcggaaataagttttccctgacaactcttaaccaccttctgaagaatatggcatatattgggaagattaattctgggggcaagatctatgatgccgagtttgaggccattctcagtgaagacgttttcgtggaagtacagaaaataatggcttacaatgccgtcgagaagggtccacaggttcgaaacaagtataatgccttgctcgctggcaaagtttactgtgctaactgcaaaacagccatggttcacacctacactaaaaagacgggcaccaaggtctacagatattacatttgctctaatgctactaaacgcgggtggaagaactgtccccacccgagcttgagcgcgcccgaattggaatcttacattgtatctgagttggagcggatctccggagatgccaagctgagagacgaggtcatagacagcttttatgagaaagctaacgcagagctggcggaaacagtcaagaacgaaaactcagtgaagcgaactttgaccgaaatcagaaagaagtaccggagaggccgcattagatggtcctgtgctaagcgcaacaggatttttcgagagaggtgccgcaaaagcgcatctcgcggcaagagttggaaaacagcatacgccgcgggcaagacggatctggtgaagtttctccctataagcggtttctcagggggaatc

SEQ ID NO: 1386 - DNA, 1359 bp, unidentified
  source 1..1359: mol_type = unassigned DNA; note = Bacteriophage uvig_132785 from the Index of /pub/databases/metagenomics/genome_sets/gut_phage_database (ebi.ac.uk)
atggagtgtgttgcctacatccgagtgtctaccgagaaacaggtggaagaaggctatggtttggaaagccagcagcgcgacatcaaagagtactgccaaaaaaacaacatgatcatctcccactggtacatcgatgccgggctgacgggcatggaaatgtctaagcgcgtggcgctgcaggaactgatttcagatctcaagaaaattgacaaggttgtcatctacaaactggataggttggcccgggacagcgtggatgctctcaatatgatagagaagatcttcgttcctagaaacgttgaggtgttgtcagtacacgactttgccaagtataagactccccaggataagtttcaaactcagattatggcggctgtcgccgagtatgatcgaaataccatgctccttagaatgagaggcggtatgctggaacgcattaaagaaggatactggccgggcggtggaaacaccccctattgctactcctactctaaagagacaggcacccttgtccctatacctgaacgcaaaaaacaggctaatgaagcaattgatctcttcctgcaaggctatagcgacaataagattagagacatgctgggattcaaaagtgagatggtcgtgaggtcacttctgatctccccagtcaatattggttacattctctataaaggcaagatctacaaaggcaaacatgaacccatttttgaaattgataagtttaatcttgctcaggaagttcggaaaaatcgaagaaaaaagaagacaacctgcatcaacaaggagcccaaccttttgacagggctgtgttattgtggggtatgcggatgctcaatgcggtatcagaaatggacgcatgggaagcacaagatctattgttgctctagggacaaaagtatgagctatctcccaaattacgacgcaaattgtgacaatacacttgagtgggcagtcgatattgagaagcaggtggaggaggagattattaaaatatccctgaacctgagttctgagaagccagtggcaaagcagagcaagatcgagattctccaatcccagattaaaaaggaggagaaccggcgcaagaggttctttaatctgtacgccgatgggaacgatgacgtgctcctcagcatcaaggaaattaacaacactatcaagagtctgaaagaacaactggagactgagaggtctaacaccaatttgaaccggaagaaatcagtaacatacaagaacatcaagaagatcgccgacgtgtgggattccatagacaagaaggacaagaatataatcctgaagagcatcatcgacaaaatagtgatcgtgaatggagacatcgaaatacagctgaaaaacttc

SEQ ID NO: 1387 - DNA, 1539 bp, unidentified
  source 1..1539: mol_type = unassigned DNA; note = Bacteriophage uvig_293930 from the Index of /pub/databases/metagenomics/genome_sets/gut_phage_database (ebi.ac.uk)
atgataatcggcatctatccaagaaaatccgtgtaccgcgacaatagtgagtccatcaaggtgcagattaagctgtgcaaagagtatgccaagatcgtttacaaggggcagcagattgatttccggatctatggcaaagacgaaggtttctcaggaaaaaatactaatcgccccagtttccaagagcttatgagagatgtaaaaagtaatatcttgaacgtggtcatggtgtatcggttggataggatttctcggaacgtgagtgaattcagcgagatgtatgacattatgcatgcgcataatgtcacattcctcagcgtcaaagagtcattcgacactagcacccccattgggaggacagtgatgtacatactggcagcgttttctcagtttgaaagagaaagcacaagtgaaagggtcgccgacaatatgcattccctgggagccagcggaaagtggacaggcggtaagcttccggccgggatgtcttctatacgaaagaccgttgatggtaaggaacacagctttctggtggttaacgacgagagaatcggtctggttaaaatgctgtatagcatgtaccttgaggggtacacgatcactgctttggagcgctactgcagggatcatggatttcgaacggagtcagggaagttcctcagcacttcccagattcactgcatcctgagcaacccagtctactgttctaatggaaccgccgcatacgattactttaaaggccatgggcacactgtgcctgacaaactgttcttcgatggtacgaagggcctggtgtcttatggcaaaaccaaacaatcagagaaacggattgtgaacgacaagtacactatcagcgtcgggattcacgaacccgtaatagccgccgaggattggatcgccgtacagaataggtttggcgccaacaagttttaccggtccaacaagtataaggttggcattctcaagggagtgctgaagtgtaattgtggagcaagaatggatatccgcacctacgttaaaaacggaaaccagttttcttattactattgcgctcggatggcacgagaggggaaaaaggtatgtgataccggctatatacgcgtggatacaatagacgacgcttttatcagcaaactcatgcagattaagagtaacccttccatgattaaagtgagggccacagaactcgacttcgtggacattaataagatcgaagctgaattgaagtcaattgaccaggctatcgaaaacttgacaggcgcgctctcagaaaatagttcctccaccgccgcatcacacatcatcaaacagatcgaaaagctggacgctagcaaagtgagacttgagtcatccctttactccgccatgcaaaataacaagattgcacaatccgagaaagagaccaaggatattatctacaattacatctgctgtctcctcgagaagttcgagtctatgtcttatcaggagaaaaacgagctgatcaagaaggctgtcaaaaagtgcatttgtagtaacgacggcctgcacatcatattt

SEQ ID NO: 1388 - DNA, 1605 bp, unidentified
  source 1..1605: mol_type = unassigned DNA; note = Bacteriophage uvig_306774 from the Index of /pub/databases/metagenomics/genome_sets/gut_phage_database (ebi.ac.uk)
atggctaagcgcaagaagaaaagtatagattctagcgttggggtgtgttatgcaagatacagctcacaccggcaaaaagatgttagcatagagcagcaggtgaccgcatgtcaggctcacgcagcaaagcgaggcatcactcttatcgatagctacgaggaccgcgccgtttctgggcggtccgataaacggcctgctttcagacgcatgatggccgacgcggaaaaaggcgccttcgcttatgtgatagcttggaaatctaaccggattggaaggaatatgatggaggccatgctgaacgaggcgaggctgtccgaattgggagtgaaagtgctgtatgtcgaagaggatttcgataataccgccgcaggacagttctgtctcaggacaatgatgaacgtaaaccaattttactcagataacatggctgaggacatcagacgggggatgcgagataacgccctcaactgtaagatcaatggtaggattccatttggctataaacgaggagaggacggaaagttctgcatcgacgagccccgggccgcagtagttagagagatctaccgcagaatcgcgtctggcgagagctttgcctcaattgcggacgacctgaacgcccgaggtattcgcacctcacgcggccggcagtggaccaggacaagcttctgccgccttgtctcaaacgaaaagtaccgaggattgtatctgtatgaagacattagaattgaggaaggggtcccaagaatcgtgagcaatgagctgtttgaccaggtgcaacatgccctcaagacgaagaagaatcccaggggcgggaagaggaattccgcatgcacctatctccttactggaagactgttttgtgggtattgcaaaagtccaatgattggggtttgtggtacaggccgaaatggcatgcattactactacgcgtgcaagcagcacagaaatgaacatacctgcgccgccaagagcgtgcgcaaatatgagttggaacagagtgtggcacaggctattaagacatacgtattggtgcccgaggtgatcgacgcaatcgctgactccgccgtggcatacgctaagaaactggaggctgaatctccagtcgccgtgctggaagaccagctggccaacgtacaggcctctatcaagaacctgcttcgcgccatcgaatccgggatcttgacggagaccactaaaagtaggctccttgaacttgaagccgagcaggcagagctcactaggcaaattcgggtggcccagagcacactggtgaaggtcgataagccggccgtcgtggcttggttggactccctgcggcgaggcgaggtcgaggacgaaaaatacatagagactctcattaacaccttcgttgctgctgtctacgtctacgatgatgaactcaaaattatattcacacacagtggcggttctacaacggtaccccctgaagctatcaaaaatgcggatactgccaatctggatgactcctatccggtgcgactgtgcaggcaatggtggacttttgccgctcccggaagaaccgcaatctacatggcctttggccttttcatccttctgtgcccttatccttcccggcagggt

SEQ ID NO: 1389 - DNA, 1332 bp, unidentified
  source 1..1332: mol_type = unassigned DNA; note = Bacteriophage uvig_368839 from the Index of /pub/databases/metagenomics/genome_sets/gut_phage_database (ebi.ac.uk)
atgatgaaaggggcctgttacgtaagggtgtcaactgaaaatcagctggagaattattcaatcgaagaacagaccgaaagactgaccgcctattgtaaagcaaaggacattactatcgttaagttctacactgacggtggttattccggaggtaacgtgaaccgacctggacttcagcagatgctgggggacattgcggcaggcataattgatacagtgatcgtgtacaaactggatagactgtcaagaagccagaaagatacacttatgctcatagaggataagttcctcgccaaccacgtggattttgtttccattaatgagaacttcgacacaagcacgccgttcggccgcgctatgattggaatcctgtctgtttttgcacaactcgaaaaagaccagattaccgaaaggtttaccatggggcgagtgggtcgcgctcggaacggctactttcatggcggggcctatgccccaaccggatacgactacgctgatggcaatttggtggtgaacgaatatgaggctcttcaggtacgagagctttacgagcgcttcgccagcgggcacactcttcactcttgctggatctacatgcaggacaagtatacaaccaagtatggcggttggaagagtgagacactcgtcaggaatgtcctgaagaacgaggtgtacctcgggaaggtgaagtttaagggcaagctgtactccgggaaccatactcccattataagtcaggatctgtacgatcgggttcaacagatgttcttgaattcttccaaaagtgacgctgcgcagacgggaaggacctacacacggagcccttttaaggccaaaactcttctgtcaaatctcatctattgccagaaatgtggcgctcggttccacggagagcacggcaattactcttgctatagtagaactaagggcgacaagagatatgtcattgacccagactgcaaaaacaagaaatggaaaatcgaggagcttgatgcactggtaatacattatatcaccaacctcgacttcaatgaactgcagcctgaacccgacgctctgcaggagcaacagcccctgaagcccgattataacgcacgcataaccgagattgacaaacaagtcgagaagctgatcgagctctaccagatcggagggatcccaatcaatgtcatcagcgagaggatccaatccttggcgaaggaaaagaacacactgaccgaaattttggaggccccacagcctgaggcacttacgttgcaagatttgagggccgccaaagatcggtttgtgaatctcctggaaagcggagaccttcaggaaaaacgctactgt

SEQ ID NO: 1390 - DNA, 1077 bp, unidentified
  source 1..1077: mol_type = unassigned DNA; note = Bacteriophage uvig_105444 from the Index of /pub/databases/metagenomics/genome_sets/gut_phage_database (ebi.ac.uk)
atgttgcaagtgtccgaagactacagaattgcactttacctgagactgtcaagggacgacaaaaatgggtcactggagtctatgtccatcgataaccagcggaagtttctgctcgcttatgtccatgagaaaggttgggaggtagcccagatctatgcggacgacgggtacagtggaacaatcttcgaaaggccaaactttatgcgcatggtagaagacatagaggcgcacaaaatcaatatggtcgttactaaagacctgagccgactcggccgcaattatgttatgacaggacagtacaccgactttttcttccctaagcaccacgtgcgctacatcgctgtgaacgataactatgattccgctaacgaagataacgatattgcccccttcaagaatatcctgaatgagatgtatgcaaaggatattagcgaaaaggtgagatccagtcgaatgattaacgcaaagtttggaaagtatatgggatctcagcccccgtacggctaccttaagagtcccaatgataaacatattcttattccagaccccgaggtttgcgacaatgtggcctatattttccaggagtttgcaaaaggccagagcgtgagacatatcgcccaaattttgaataacaagggaggactttcaccacgggcctactactaccaaaggacagggaggaccaatccacatcctgaacagcggcaggtctggggttctatgaccatcatgcagatactgaaaaatcaggtgtatatcggcaacttggtgcagggcaagcgaaaagccctctccttcaagagtaagcagcgcatagtgacagagcctgacgattggatcatctgtgaaggcactcacgagcctctcattgataaacaaatctggggcgaagctcagaaagctatccaaaaaccgtactgccggacggtcaaaagcacgggtgagatttcactgttctccgggatagtcaagtgtgccgattgtggcgggactctgtcttttgttaccaagaacagcaacgggcacctctacgagctctacaagtgctctacctatagcaactatggtaagggcgtg

SEQ ID NO: 1391 - DNA, 1803 bp, unidentified
  source 1..1803: mol_type = unassigned DNA; note = Bacteriophage uvig_381374 from the Index of /pub/databases/metagenomics/genome_sets/gut_phage_database (ebi.ac.uk)
atggccaagcggaccagtgtcgaaaacagtattatcacgggtgtcatctatgctagatattcctcacactcccagaaagaagagagcattgaacagcaaatcgaagaatgcaccgcctttgccgtgactaatggaatttctgtggtaggcatctacgccgataaggccattagcgggaggactgatagacgcaatgagtttcagaggctgatgcgcgatgctgagaaacgcaagtttgatgtggtgatcgcatacaagtctaatcggatcagcaggaacatgctgaacgcactccagtatgagtctcggctggatagcttcgggatcaaaaccttgtatgcgaaggaggaatttgggaacaccgccgcagggaggttcgctcttcgcactatgatgaatgtgaatcagttctacagcgaaaatatggcagaagacatcaggcgaggacttaaggataatgccgccgaatgcaaggtcaacggctccctgccatacggttacaagaagggcgaggacggaaagtatgccatcgacgagccaagagccgcaattgtccgagagatattctcaaaagtcgtggatgacgttccctatgcggacattattaggtcacttaacgaccgcgggatactgaccaagacccgcaaaccattcaacaagaactctttcaaccgaatgctgaggaacgagagatacatcggcatctacgaacactccggcgtgagggtggtaggaggagtccctgcaataatatcagaggaggttttttatgctgtgcagaggaagctccaggaaggattgaacagtgacggcgccaaacgaaaatctaactctgattatcttctcaccggcaaactctactgtggcgaatgcggttctccaatggtcggctacgccggcacatccagaaatggaaccctgcattattactacacttgcaagagtcgaggtaatgacggttgtacaaaacataatgttagacgggacttcatcgagcagttcgtagttgacctgacccgcgcgtgtcttagccgggctgatgtgacagattggctggttagcgggtatattgagttgaagaagcaggcacaggagacttccgatgtcccagtgatggaggaggagctgagctcacgcaagaaggcactggataacatcatgaaagccatcgaggctggcatttttaatgaaacaacaagcgcaagaatgcgggaattggagacagagatacacgacctcgagaggtccattgcccttggaaaagctatgttcgaggaaccggtggacggggaaagaatgcggttttacctggagaagctgagaaacgggatgcccgacaatcaggcttacagaaaagaactgctgaggactatggtgaaagcaatccgcctttgggatgaccggattgaaattgagtacaacttcaccggaactgacggcgacggtaataattacagggtagtgactgaatttctcaaaggggattccgggtctgcttcaggcgtgcatacagaaccccctcaaccgcaccagataaaagagacctccatgagaatgagtctcctgttcggagtgaagacagtcgtggacagcaaccggggtcggctcgagacatgtcgcggaaagagtgcgatgcccctgctggaggctgataagggcatggccttgtttcctcaacctcaactcctccaggggtatgctaacgcggacctgcagaaattgaatgccgctcggtggttttgcttcaatccccgaagacctgcccgacgacaagccaacgttcccacgcctcttcgagagacg

SEQ ID NO: 1392 - DNA, 1812 bp, unidentified
  source 1..1812: mol_type = unassigned DNA; note = Bacteriophage uvig_330914 from the Index of /pub/databases/metagenomics/genome_sets/gut_phage_database (ebi.ac.uk)
atgtgtgaggaggagatcaagaatgccggtatctacattagggtgagtaccgatgatcaggctcgagcagggttctctttgccagagcagaaagagaagttgctgagtctgtgtgaattcaaaggctacaacgtgttcaaggtgtacgaagatgctggcataagcgccaaggatatggagcaccgccccaagtttcaggagatgctcaacgacgtcaaaacaggaaagatcaattacatagtggcgtataagcttgaccgagtaacccggtcagttagagatctcgaggagctgattaatattctcgagaaatataactgctaccttgtatgtgacagggatgacgtgaatacatccacagccaatggtcgcttcttcgttagaatgctgactgttctcagccaactggagattgaaattgtgagcgagaggactaagtttggcctgaacggtgccatcaaaagtggccatctgccgggggtggtgcctcttgggtataagaaagacgggtccaaaaagacaattatagatgaaacaacccgccatatcatcgagcggatttttaacctgtacctcgaaggaaattcataccagcagatcagcaacatctttaataaggagaaggtgctcaataagagctggcacgacaccgacatcgaaaagattatcaacaacaggatctacatgggcgactatgaacaatataaacggattgcaaagaagattggaagggatactgtgatctacatgaacgtagtagagcctataatcactcgcgcgatgtgggaagaatgccagacccagaagctggccaatcagagaacatacaccagaacacgcacctatctcttctttcaaaaactggtgtgtcccaagtgtggccggattatgaaatgcaaagggtctggcggcaaaaagaagaaatacatctattacaattgcgagttttgccacttcaacttgcgcgaagactatgttgaagaatacatgatcaaagccatctacgagttcttggaattcgagcagatgtgcaattcattcttccttcccattttggccgataagaaagacaaaaacactgatctgaatctggacaaagaaatcgaggggtatattaagcagaaggagaggataaaaaaggcctatctgacgggaatcgtcgagttgaaagatttcgaggaagatttgaagaagatcaacgaaaagctggagattttgaacaacaaaaagcaggagcttaacgaactggacgtccatacttttacaattgaaaaagttatggctagacgagacattgagaagatctctatcgacaacggttacaaagaaaaggaattctacaagtttgaatgggatattaaaacgaaggaggagaaacagcagttcatatctaagtacatcgacaacattgtcatagacaagaccgacacgggaagtttggatattaagcaaatcaactttaggtcctcattcatcgataaggcagtgaaacttactcaggtcggagcttacgactataaactgccatttgaggtgaatcacaaacaggaaatggtccttgtctcctccccaatgaagcgaaaacaagttaataagtatctcggttatctccgggaatattttgagattgagtatagagaggataagggggatagaaccgagaatggcatggctgtctttgatagcgcaatccctgacaattacgagctgctcaaagtgatccctatcatagacattaacctgtttaaaggaaaggacatcacctttggcctggtgttccggcccaccataaaagagataatcaatgaaaag

SEQ ID NO: 1393 - DNA, 1434 bp, unidentified
  source 1..1434: mol_type = unassigned DNA; note = Bacteriophage uvig_394534 from the Index of /pub/databases/metagenomics/genome_sets/gut_phage_database (ebi.ac.uk)
atgcctaaggtgaaggtgggcatctacatccgcgtttcaacccaagaacaggcaaccgagggctatagtatcgatgcccagaccgatagactcaccaactactgtaaaagtagagactggagcatctacaatacttacattgacgggggattctctgggagcaatacaaatcgacctgccctccatcagctcatgcaggacataaaagataaaaagctcaactgcgttctcgtctacaagctggaccgcctgagtcggtctcagaaagatactttgtacttgatcgaggacgtattcctgaagaacaagattgactttgttagcctgaacgagaatttcgacacatccagcccatttgggcgggctatgatcggcatcctgtctgtgtttgctcagctcgaacgcgaacagattaaagaaaggtcactgatggggagaattgaacgcgcgaagaatggcctgtggcatggagggggatttgaaccgttcggctataattacattaacggccagctgattgttaatgagtatgaagcgaacatagtccaggaagccttcgagctctttcttcaaaagctgcccatccacaggatcaatcgcattatctccgagaagtatggaaaagattttcacgagacagtgttgcggtcaatcttgtccactcgactttataccggaaagattagctatcttggcgggatctatgacgggcaacatcaggccattatctcagaagatactttcaaagctgccgagatgctgctggcttacaggaaaaagaagttttcaaactctaacccattcaaagcaacaaaacttttgggaggaattctgtactgcgctcactgtggcgccagatatcttgcaaagggtaattattctggtcacggcgataagaaagtatacaggccttactacacatgttattccagagccaaaagtacaaagaaatacatcgtggaccccaactgcaaaaaccccagttatgccgtggtcgtcttggacgaaatcattatcaacgagattaggaaactgttcatcgataaggagtacctgtactcagctaagaatgcaacggccacctccaacacggtcaacaagcagaagtccattctcaaacaaattgactccatacaaagccagatatctcggcttcttgatctgtatcagatagacggtatcagcatcgatgacatccaagatcgaatcaagaagctgcagcacgagaaggatgtgcttgaggagaccctttccaatcttaaaaccagtcagaaaaagaaactcacaactaacgaggtgctctctatggaagcaagcttcaatgaaattatggagaatggtaccgacatggaaaagcagactatcgtgcggacgctgatagacaagataattgtgcatgaggagctgaacagcttcgagattatatggaatttt

SEQ ID NO: 1394 - DNA, 1431 bp, unidentified
  source 1..1431: mol_type = unassigned DNA; note = Bacteriophage uvig_582769 from the Index of /pub/databases/metagenomics/genome_sets/gut_phage_database (ebi.ac.uk)
atgaatcgcgtcgccatctacgtgagggtctccacgaacgagcaggccgcagaggggtattctattgctgagcagaccgaaagatgtagaaaatactgtgaagcaatgaaatacacagtgagcagaatctacaccgatcctggctttagcggtgctagcctggacagacccgctatgcagcaaatgatcgaagacgcgaaggaaggtaggttcgacaccgtactggtgtacaagctcgaccggctctcccggtcacagaaagataccctgtacctgatcgaggatgttttgctcgcccataatgtgagctttatcagcatgtccgagaacttcgatacgtcctcaccatttgggagggccatgataggtattttgagcgtgttcgcacagctggaacgggaacaaattaaagagcgcatggaaatggggcgcatcggggcggccaaggagggaagatggcgcggcggatcaggtgttcccataggctatacttatacagcaggcgatgaggggatcctgaagatcgacccctacgaggctatgcagataaaagaactttatgatctgtggctccaggggatctctacaaacgaaatttgcaaaaggttccgggctaagggatataccaccaagtacggcgggtggtcttatgccggaagtatcccgtgcattattacaaaccctgtttacatcggcatgcagcgctacgatggcaaggtgtttccgggccttcaggaacctatcataacccaggaggtctatgacgcggctgttgcagatctcgagcgcaggcggtcacaaatgtcagacaaccagaggattgcatggcggggcaaaagtctgcttagtgggctgattttctgcggacaatgtggcgcccgatattttgtaagtacttgtgtgcggaccaacaggcaaactcacgagaagaagacatatcgatattacatctgctattcccgcgatggcaattcctccatgaaaaaatccgacaattgtactaataagagatggggtaaggaggagttggaacacgtggtgcttgaccaaattctgaaaatgtcttacgatgtcgacaagattaagccaagaaagccaaagacagatggacagaaggccatcgcctctcgaatcaaagtgatcgacaagcagataagctccctcctggacttgtaccaggtaggtggcatcccaattgaccagattggaactcgggtcaaagcccttacagacgaaaaggaccgcctggaactctctaccgccaaagagacggggaaacctgtgagtttgtcagaggcaagaaagatccttagcgccgctccccagatcattgagtgcggaagtgacgatgacaggcgattcctggtcagcaagcttatttctaaaatcaccattgatggagatgatatagctataacttggacgtttact

SEQ ID NO: 1395 - DNA, 1617 bp, unidentified
  source 1..1617: mol_type = unassigned DNA; note = Bacteriophage uvig_578663 from the Index of /pub/databases/metagenomics/genome_sets/gut_phage_database (ebi.ac.uk)
atgaaggccgctatctactcacgaaagagcatgtttacaggcaagggtgactccgttgagaaccaggttcagatgtgcaaagactacggtaatcgccttaatatcgatgagtatatcatctatgaggatgagggctattccggcgggaacatcaataggcctaagttccaggagctgctgcaggacgtgaaggagaaaaaatttgatgtgctgatttgttataggctggataggatatctagaaacgtggccgacttcagtagcactcttgagttgctgcaggacaacaacattagcttcgtaagtatcaaagaacagtttgacacgagcacccccatgggcaaagcaatggtctacattgcgtctgtgtttgctcagctcgagcgcgagactattgctgaacgggtgcgcgataatatgctggagcttgcaaagagtggtagatggctcggagggcagacaccactcgggttcgaatctgaaaagattagttatttcgacgctgaaatgaaagaacggaccatgtataaactgagccctgagcccaaagaactggagctcgtgaagcttatctacaacaagtatctcgagaccggatcaattcatctgacccttaagtatcttttgagttctaacattaagggaaagaatgggggcgaatttgcctcaatgtccgtcaatgatattttgcgaaatcccgcctacgtcaaaagtaacgaaatggttctggattatctggagaacaaggggatgaatgtgtgcgggaccgccaatggtaacgggatactgatctacaataagcggaactccaagtacaagaagaaggacattagcgagtggatagccgccgtcagcaagcacaaaggcattatcagtgcgaacacatggctcgaagtccaaaaaactcttgataaaaactccaaaaaggatacaccacgccaaggaaccagcaagaaagctctgttgtctggagtgctcaaatgttcaagatgtggcgctccaatgcgagtggcatacggcaggaagcggaaagatggaaccagcatctactattacacatgtacgatgaaagcccactctggcaaaactcggtgcaacaaccctaatgtgaggggcgactacttggagaagaatattatcaccgaacttaagaatctgaatagcgaggtggtcatcaaggagctcgaaaaatgcaagaaacagctggcggccacaacagagaactcaattatcaagaacgtttccaaagagatagaggagaagaagaaggaaatggactccttgctttctcaactctccaaagtggaatctccggtggcaagcgaattcatcatctccaaagtcgattcactgggaactgaaattaaggacttggagatatcactgactaagaccaccgacaaaaagaaggagaattccaacatagagctgaacattgagatcgtacttcaagcacttaacgagttcaatgacttctttaatagcgtagaatctctgaaaaatgatgaactcactatacagcgcaaaagatacctgcttgaaagagccgttgatgagattacaatcgacggagaaacgaaaaagatcggtatcgacctgtgggggtccaagaaaaag

SEQ ID NO: 1396 - DNA, 1497 bp, unidentified
  source 1..1497: mol_type = unassigned DNA; note = Bacteriophage uvig_103894 from the Index of /pub/databases/metagenomics/genome_sets/gut_phage_database (ebi.ac.uk)
atgaagcaatctaaagctaagatttctgttgatatacggttcgccttgctctgcattatccgcaaagtcaacagagttaagtgcgtgatctatgtgcgggtatccactgatgaacaggcgaagcacggctacagcatcgccgcccagatcgaaaaactcgaagcatattgtattagccagggatgggagcttgtggccaagtttgtcgacgacggctactctgccaaggatcttgaacgacctcagtttcaggagatgatggaacaaattaaggcaggaggaattgatgtattgctcgtgtacagactggatcgcttgaccagatccgtgagtgatctttatagtatactgaatgagcttgaccagtacaactgcaagttcaaaagtgcaaccgaggtgtatgacaccaccaacgccatgggcagattgttcatcacactcgttgccgccatcgcccagtgggaacgagagaacacagctgaacgggtgtactttggaatggataagaaagctagactcggggaatggcccgggggcacaccacctttcggttacaagatcgaagaggaaaaacttatcatcgacccagaggaagtcaagacagtacgagagatctttaagctgtcaaagacgcttggcttctacactatagctaagcaactgacgaccaaagggattccaacacgaaatgggggagactggcatgtggattccgtcagggctatcgcgaacaatccgatctacgccgggtatattcgctggggcgacgacggcaggcagaacaagaaaccccctagagagcaaaagctgtatgacgggatccacgagcctataattgatagagacgagttctggggactccaagatatcctcgacaaacggaggacttttggcggtaaacgcgaaacaagcaagtattacttttcttctattctcaaatgtgcacggtgcgggcatagcatgtctggtcataaaggaggtaatggcaaaaaaacttacaggtgttcaggcaagaaagcgggaaaaaactgtacctcccacatcattctggaggacaatatagttaaagccgtgctgaccgaattcgagggtcttgtcagggatatctatagcgatgtgaagacgtccaaagagcccatcgaacggctgagcgtcttgaactccgaactgtccagtgtgcagaagctgatgaaaaagaagaagaccatgtacgagaacgatattattgacatagacgagcttatcgctactacctcagagttgagggagaaagagaaggagctgattcgcgagatcaagaacattcagaaggaggacaaaaccgatactgacgaactgaagtatattatcgaaaatatagatactctgtgggatcacgcaaatgactacgagcgcaaacagctgatgacatcaatattcagccagctgatcatcgacacaaatgatgagtatagggggtcaaagtacccccgggacgttattattgtggcagctaag

SEQ ID NO: 1397 - DNA, 1446 bp, unidentified
  source 1..1446: mol_type = unassigned DNA; note = Bacteriophage uvig_263922 from the Index of /pub/databases/metagenomics/genome_sets/gut_phage_database (ebi.ac.uk)
atgatgaataccattaataaggttgcaatctatgtcagggtgtctaccaatgttcaagccgaggaggggtactctatagacgaacaaatcgataagctgaaatcatactgccaaatcaaggactggactgtgtacgacatctacaaagatgggggattcagcgggggcaatataaacagacccgcacttgagaaaatgataatcgatgcgaagaagaagagatttgatacagtgctggtctacaaacttgacagacttagcaggtcacagaaagataccctctttctcatcgaggatgtgttctccaagaacgacatttcttttctgagcttgcaggagaacttcgacacatccacacccttcggtaaagccatggtggggctgctgtccgtgtttgcccagctggagcgggaacaaattaaagaaaggatgcagctgggaatgattggtcgggcaaaaagtgggaaaccaatgatgtttacaaacgtttcatttggatacacctattctcccaagactcaacagctgacaattaaccaagctgaggcagttattgtgaagcagatcttcaacgaattcttgggtggcatgtcacctctccgcctgatggcctacctgaatgagaataatattctgcgcaacgggaaggagtggaattatcagggcatccagagaatcctgaggaatcctgtctacatcggcaaaatcaagtataacaacgtaatctatccgggcttgcacgaacctatcatagatgaggaaagctattacaaagcacaaaaactcttggatgctcgacaggacgagatgcgcattaaaggaaagaatagacagttcaaagctaagtatatgctcagtggaacggccaagtgtggctattgcggtgctcccttgaggattaagattggaaacaagcggttggacgggacccgccttaaagtatatcagtgttgtaatcggtatccacggaaatacgctgtcgtcacttacaatgacaacaagaagtgcaacagtggcaattaccagaaagaggatcttgaaagctacgtcatagccgagattcgaaagctgcagttgaagccagagaagatcgacaagctttttaacaaagtggcgaaaatcgacactgtgcagatcaacaagcagatagcctccattgacaacaagatcaatcgcctcaacgatctgtatttgaacgacatgattgacattgataaactgaaggctgacgccgagaagttcaaggaacagaagcgagttctcgagaaagaactggataaggatctgaaaatacaggaacaggagaagaataaggaagacttcaaaaagaccatcggctttaaggatgtaacgaaactcgattacaaagaacagtcctttatcgtgaagagtctcattgacaaaattctggtgaagaaaggcttcatcaaaatattgtggaagatc

SEQ ID NO: 1398 - DNA, 1599 bp, unidentified
  source 1..1599: mol_type = unassigned DNA; note = Bacteriophage uvig_156514 from the Index of /pub/databases/metagenomics/genome_sets/gut_phage_database (ebi.ac.uk)
atggcccgcaagcgaattaatacccctgaggccacaggtgtaatctatgcccggttttcaagccataatcagcgggaggaatccatcgagcaacaggtagctgaatgtaacacatttgcgttggctagcggcatcaaaatcgtcggtgtctacagtgactctgcgaaaaccggaagaactgacaggaggccgcagttccagaagctgcagcgcgaagcccagaaaggggagttcgattatattatagcttataagtccaacaggattgcccggaacatcctcaacgccctgatgtttgagaacgaaatggagaagctcggtattaaggttgtttacgccaaggaagagtttggcaacaatgcagcaggtaggttcgccctccgaactatgatgaatgtgaatcagttcttctccgagaatatggcagaggacatcaagagaaaccaagctgataacgcccttaattgcagagctaatggaccagctccatacggatacaagacaggcgctgatggaaagttcgtgatagatgagatgagggcacccattgtgcaagagatttttaataggacagctaacgccgaaaaattcgtcgagattagtgaagatctgaacagaagaggaattaaaaccaagaacggtaacgagtgggggaaaagttccttcttcaccatactccacaacgaacggtacacgggggtgtatatctttaatgacgtccgaatcgagggagggatgcccgtgatcatcgaacggtctctgttcgaccgcgtacagaaaattatgaagacgaagaaaaatccccagggcagaaagcgggcggacgatggtatctacttgctcactgggaagcttttctgcggcaagtgcaaaagtcacatgattggaatgagcgggacatcaaaaaacggcgactcccactactattacatctgtaacgagaagaggactaatggcacttgcgataaaaaggcagtccgaagaaactttctcgagaacgaaatcgcgaaagccatccggcgctatatcttgcagcctaatgtgatggaatggattgtccaacaggtcttgagctttcagaaaggcgacgtgcgacaggttgagattgcaaatatgcaagagaggcataaggaagtgaagaaggcaatagccaacgttatgattgcgatcgatcaggggatcatcacagcctctaccaaagagcacctgcaggacctcgagtctgaaagagcccaactcgacgcccgcatactcgttgctcagtccgaagctggcaaggcagtgacccgcgagagcctgcttgcatacctggagcactttcgcgctgcaaatgtggaggataaggaatgtcagaaagagctgttcgatacatttgtgaaagccgtgtatctctacgacgatcatatcacgctgatatttgacattaatgacggaactaccgaagacgtcgaaataagcatggatgaggtggagcaatcactgtgtgaaaacgttcgccttaatagcgtggtaggccaccagaccgcttcttgtcggtctcagatcctgggcagggcctcaatttgcctggcctcattccatgacggggtgatcagatcc

SEQ ID NO: 1399 - DNA, 1425 bp, unidentified
  source 1..1425: mol_type = unassigned DNA; note = Bacteriophage uvig_454524 from the Index of /pub/databases/metagenomics/genome_sets/gut_phage_database (ebi.ac.uk)
atgaagacaacaaacaaggtggccatctacgtcagagtgtctacatcataccaagcggaagaaggttacagtattgacgagcagaaggacaaactggaggcgtactgcaagatcaaagactggaaaatctacgatttttacattgacgggggcttctcaggatctaacacaaaacggccagaactcgagagactgattgatgatgccaaaaggaagcgctttgatatcgttcttgtctacaaactggatcgcctgtccagatcccagaaagacactcttttcctgattgaagacgtttttctgaagaatgacgtcgccttcatcagcttgcaagaaaattttgacacttccactcctttcggaaaagcatccattggaatgctgtcagtattcgcacagctggaacgagaacagatcaaggaacgcatgatccttggcaaagaagggagggcaaagaaaggtaagaccatggcatggacaacgatccccttcggctatgattacagcaaagagaccggaatcctcagcgttaaccctacccaggctcttattgtcaaaagaatatatgaggagtatttgaatggcaagagcgtggtgaagattattagagacctgaacgccgaagggcacgtgggcaggaagaggccctggggcgagacaatcaccaagtatctgttgaagaatgagacgtacttgggaatagtaaagtatcggggccagaaatatgaaggtcagcatgaaccaattataagtcaggagctgttcgacctcgttcagctggagctgaagaaacggcaaatagatgctctgaagcggaacaataacccccggccttttcaagctaagtacatgctctcagggctccttaagtgtgggtactgcgggggcagcctgggactctatgtgacctccaaaaaccggaaaggcaaggcctaccagcgataccagtgccgccaccgctttgacaaagataagagtaaaaggtgtaattctaagtggtatgataagcaggaactcgaggaaaaagtaattgagaggctcagcaagatcaaactggagccaaagtatagaaaggagacacttgccaaaaacgatgagactatgaaggtggaggaaattaaagagcagctcaagaagcttaacaataggttggaaaaattgactgagctctatctggatgaaatcatcacccgaaaagagctgaacgccaaaaatgagaaactgaagaccgagaaggctttcctcgaggaacaattgaagtccaaaaagaagaataccatcaatctgagacagcgcaaacttgctcgattgctcaaggacttcaacccggagaagctgtcttatgaagatgcctctaagatagtgaagagtgtgattaacgagatcgtggtcacgaaagaggagatgactataacccttgacttt

SEQ ID NO: 1400 - DNA, 1563 bp, unidentified
  source 1..1563: mol_type = unassigned DNA; note = Bacteriophage uvig_204816 from the Index of /pub/databases/metagenomics/genome_sets/gut_phage_database (ebi.ac.uk)
atgattgcaatctatgcccgccagagcatagaaaagaaagactctgtgtctattgaagcccaaatagagaagtgtaagtactactgcgagaatcaggactataagatctacaaagatgccgggtatagtgggaaaaacatcaatcggccacagttttcaaaactcttggaggatattaaaagtggcctgataacaaaagtcattgcttatagattggaccggatttcaaggagcattgctgatttcagccagttgctgattcttttcgatgagcataacgtggatttcgtttccgccaccgaaaattttgacactaatacgcctatgggccgggctatgatcaatattgtcatgacctttgcacagttggaacgcgagacaatagttgagcgagtgacagacaattattactttagggcaaataatgggtattgggccggaggttatgccccttatggctatgaaatcaaacacattatcgggaacgacggaaaacggcacagtgtgcttgtcgaaaataaggacgagtccaagatagtgaaagagatctatgacatgtacattaaccagaatatctccatgcgcaagatcgctcaacaactgaactaccagaatattcccaccaaaaaacagagtggaaactggggtatcaatgcggtaaacgcaattctgtctcgccccatctacactgaagccaccactaagatctacgattacttcaacaagagaggtacctgtattacgaataatatcgagcattttgatgggactaaaacagcgaatctgtatggcaattccaagaaaaacaacaacgtgaaagccctcaggaactatgatgaaatgtttctgagcctcattaattgtgttccactgatatccaatgaagattggttcaaggtacaaaatattaaaggcaccaaaaagaacctgcccccgagaactaattcatctaaaatctcatttctgtgcggactggtgaagtgcgggaagtgctctagcaatatggtcactcagggctgtaaaaacaggtacggaatacagtactactacttgatctgctccaccaagcgaaaccttggtagaatcaagtgcgacaacaagatgattgacatatcaaaacttgaggatattgtgatcaacgacattaaaaagcacttcaatagtaacgagatcgagacgaagatcgagaagtacatgaagaacaacaagaaggaaaacatcaacctccttaagcagaaggaggagttcgagaataagattatcaagatagacattcagatacagaacctgatcaattctatcgctgagggcaacatcactattagcaaatacatcaaccaaaaaatcgaggtcctcgagaaagaaaagcagaacatcagcagccaactttccaccataatcgaaaagaacaatattacacaggacaattacctgatcgagtatgtgaagaacattaatgaaaaaatcaacacaaaggatttcgaacagctcaaactgctctgtcatacaatcatagacaagattgttattaccgacaagaacatcgatatccactacaagatt

SEQ ID NO: 1401 - DNA, 1512 bp, unidentified
  source 1..1512: mol_type = unassigned DNA; note = Bacteriophage uvig_396721 from the Index of /pub/databases/metagenomics/genome_sets/gut_phage_database (ebi.ac.uk)
atgaaaatcgccatctactctaggaaatctaaagagaccgacactggagagtcaattcagaatcagatcaacatttgcaaagactacttcaacaggcaatacaacaattgcgtgtttgaaatcttctacgacgaaggcttctctggcggtaacattaatagacctgatttccaaagattcatgcagagtatcaagctgaagaaatttgatatcctgggcgtctacaagatagaccgcgtgtctaggaacaccctggagtttctcacggtttttgaagagctgaaacagtataacattaagctggtgtccgtgactgaggggttcgatccctcaacccccggcggcaaaatgatgatggatgttcttgccagcatggccgaaatggagcgggccaatattgcacagcgggtcaaggataatatgctcgggcttgcaaaaatgggccgctggagcggcggtactcctccaactggatataaacccaaagcctatatcaatgaatttggaaagaaggagatgtatctggagctggacgaagtagaatctgacataatctacaaaatctttaatctgtccgctgctggttgtactacatatgcaattggaaaagaggtcaataagaatccaaagaccatactgaatatattgcgaaaccctgtatactgcgaatccaacgagacaagcaagaagtttcttgaaaacatgggatacaccattatgggtgagcttaacggcaacgggtatatgacatacaataagcggccgagatccaatgggaagaaaatcgtgtcagactatatgcttgctgttgtgagcaagcataaggcaatcgtaaccgctgagatgtttatcaaagccaataagaatcttacagatcgcgctccaaccaaaagaccccggaagagccaagggacctttttgtcccacctggtgaagtgtgggaagtgtggtggcggaatgttcgtggcctctggaaataagttgaaagacgggtcaaaaaagctctatttccgatgcactaaccagaagtacaataagacatgtgatgccaagtggataagggtcgacgaaatcgaacgattcgttctcagcgagctctacaagttcagcctcgacaaaaataagctgaacgagtatatcaacagtaacatcaatctggattgctacgataacgacataaagaagctgaagagtcaggtgaacaagctcaatattgatattaacaatctcacagagaaactcttgttgcttgacggcgcggcggtcaagatcgtcaacgacaaaatcaaccagatctccaacgagcgcgaactcaaaaaagaaatgctcttcgaactggagtcaaaaaagatagaactgaccgttaacagtattaatgtggacgagctttataacaacattaagaaacttttggtgatcttcgatttgattcctattgatgagcagcagattctgatcaatcaactgatcacgtccattgagattagtgacaacgataaaacactgatcttt

SEQ ID NO: 1402 - DNA, 1410 bp, unidentified
  source 1..1410: mol_type = unassigned DNA; note = Bacteriophage uvig_593897 from the Index of /pub/databases/metagenomics/genome_sets/gut_phage_database (ebi.ac.uk)
atgcgcgtcggtttgtatacccgagtgagtacacaggaacaggctcaggaaggttactccattgatgcacagctggagcgacttactgcctattgcaaggccaaggactggcatatagtccatacctatacagatgccgggttctcaggctctaatttgaacagacccgctatgcaacagctgattaacgacattgactctgatacctttgatacagtcctggtgtacaaacttgaccgcatcagccgcagccagaaagacacacttttcttgatcgaggatgttttcctgaagaacaacatcagttttatctctgtgaatgaaaattttgatactagtactgcattcggtcgagccatgattggcattctgtctgtctttgcacaactcgagagagagcaaattaaagaaagaactcgcatgggacttgaggagcgggtgaggaagggcaaacatcactcatttgctccttttggctatcggctcaaagataaagagctcgtgatttgtgaaccagaggccgacgtagtcaggatcgtttatgacatgacactgcagaataagaccgcaaaagtaatcaatgactacgttgtggaaaactaccccgaatacaaggcgctgttcactaccaagaataacaaggtatacgacataatccacaacatcacgtacggagggtacgtcaagtttggagataaaatatccaaggggtcacacgaagctataatcgatgatatcacctatgcaaaagtgcagaaactgctcaaaaagaaggccgagatttgggagaccagcaggacgaagcggaccggcactcgctcctactatttgctcacaggattcgtcttctgtggaaactgtggggcccggctgagagttatcaagcccagcagcgggggcaagtactcctgctactcacggatcggcaacccttcctatatggttaaagaccctaactgccgactcaaagtgtatgagttgagcgaactggacaacattgtgcttgatgagctgaaaaagctcaagtctgacgaggaatatttcaactccctgtgcagaccgaatatagtggaaaacaaggctgataagatcagtaaagaactcaacagaattgagatccagatcaataagctgcttgacctgtaccagatggacgacatagatgtgtccctgttgactaatcgcatgaagcagctcaataataagaaaaagaagctcgaaaatgagatcagcgcttcaaaacaagactctttgccaaaactcacgtacaggcaggcgctggacattctcagcgatctcgattcctacatcgagaaaggtgccacagaccagttgagggagctgctgcaaatgctgatcgacaggattaccgtgtatgatgatcgggtggagattaagtggagtttctct

SEQ ID NO: 1403 - DNA, 1305 bp, unidentified
  source 1..1305: mol_type = unassigned DNA; note = Bacteriophage uvig_440207 from the Index of /pub/databases/metagenomics/genome_sets/gut_phage_database (ebi.ac.uk)
atgataaaaggggcttgttacgtcagggtgagcactgataatcaactggaaaattacagcatcgaggaacaaaccgaccgcctgcgggcctattgtaaagccaaggacattcacatagttaagttctacactgacggtggatactctggaggtaatcttaaccgccccgctctgcagcagatgcttacagacattgattatggaattatcgatctggtcgtggtctataagctcgacagactgagcagatcacagaaagataccctcaccctcatcgaagactgcttcctctccaagaacgtagactttatcagtataaacgagaacttcgatacttccaccccattcggcagggcgatgattgggatactgagtgttttcgcccagttggagaaagaccaaatcactgagcggtttacaatgggccggattggaagggcaaagagtggctatttccatggcgggcctaccgctcctacaggttatgattacatcgatggcaatctcattgtcaacgagtatgaagccatgcaggtgcgcgatctgtacgcccgatttttgaagggctattccgtgtacgactgttggcagtacatgcagaaaaaatacacaacgaagtacggcggctggaaatctgaaacactcgtgagaaacgtgctgaaaaacgaggtgtataccgggaaggtgaagttcaaaggcaccatctaccatggaaaccatcccgctatcatcccagaggcacagttccgccaggttcaggaactgttttcctcctctcaccgatctagtgataccttcaaaaggtccccgtttaaagcttcaacccttctggcaagcctgatctactgtggcaagtgcggagcccgatttcacggggagcacgggaattacagctgctatagcagaacgaagggtgacaaaaagtacatcatagacccgaattgcagaaacaagaaatggaagatcccagagttggacgcccttgtcacagattatattgcccggctgaatttttcagaccttgagaataagactccctccccacaaccccctatcgattactcagctagactgggcgagatcgataggcagataggtaagcttattgacctgtatcaggtagggtctattcccattgagaccatcagtaagaagattgaaatcttgagcaaggaaaagtcaacgcttgaagaagccgcaaggcaaaaaagcaccccttcctcttcactcaaagagatgattactgcgcgcagcacttttatgtctattatcaaaacaggaacattggaagagaagcgggcatgc

SEQ ID NO: 1404 - DNA, 1473 bp, unidentified
  source 1..1473: mol_type = unassigned DNA; note = Bacteriophage uvig_578394 from the Index of /pub/databases/metagenomics/genome_sets/gut_phage_database (ebi.ac.uk)
atgaacaataacctggttccactgagcaatagcgccatcaacgaactcgtggacctgtacgttcgcgtaagtacccttgaacaggcggaggaggggtatagcatcgccgagcaggaggctaagcttcgggcttactgcagcgcaatgggatacaccgtgtacaacgtgcatatcgaccctggatattcaggtgcctccttggataggcctgggattaagaaaatcatctctgacgtccgcgcagggaaagttaggaaggttatcgtctggaagctcgataggctgtctcgaagccagaaggacacaatggtcatgctggaggatgtgttcctggagaataagtgtgattttgtaagcttgctcgagtctttcgatacatccactccatttgggagagctatagtgggcttgttggccgtgtttgctcaactggaacgggagaatattaaagaacggacggccatgggcaggcaggcgcggattaaaaagggctacttccacggctcccatgcaccccttgggtatcagttcaaatcaggctgtaacgacttggtgattgacgagtattcagctaatatggtaagagaggtgttcagactctttctttccgggggctccatcaatggcatagcttcccacatgatctgcaagtacggaagcaacagatacgagtggaataacacttcagtcaggcgaatcctgaggaatcccgtctatatcgggaatgtcactctcggagataaaatctacgaaggcattcatgaatccattataagcgagagcgagttctacatggcctctgctatactggagcacaacaagagtttggacaagcgcaattattcttattccaccggcaagtttaaggccgataacctgctgaccggtctgctgttttgcggagactgtggtgctcgcatgtacgcgagaaaggtgtcaaagagtaaaaagaagtatatctgccactcagtggcacggacttccaaacctatgattaaaagtgacaattgtaccaatcgcctgcacccgttcacagtgggacaggtagacaacatgatcattgacgagatcaagaaattgtctctggatcgagactacttcaagagtattctggcagatgtgcctcccaaactggacgaccttcaaacgtaccgcgaaaggatagaggaaatcgaaaaacagattaaccggatgctcaacctctatcagactggaattatcgacatggatgaggttatggatagagtgaatccactgaaagatgaaaaggacaagcttgaaacacatgttaaaaaacatgaagacgcccccgtcggcatttctagtgaagaggcctgggatcttgcctgtaccttggaagatgccatctctgcaggttccaacgaagaggtgcaccgaatcatccacaccctcgtggacaagattgtcatgctcaacgatgagataacaattcactggagcttttgccaaaac

SEQ ID NO: 1405 - DNA, 1425 bp, unidentified
  source 1..1425: mol_type = unassigned DNA; note = Bacteriophage uvig_370045 from the Index of /pub/databases/metagenomics/genome_sets/gut_phage_database (ebi.ac.uk)
atgaaaattgctgtatacgtgcgcgtgagtactctggagcaggctgagagcgggtactcaatcggtgaacagacggagaaactgaagtcctattgtaaaattaaggactggcaggttgccaagatatacaccgaccctggattttcaggtagctccctcgatcggcccgccatgcagcagctgattagcgattgtaagctgggtgttttcgatgcggtcctggtttataaacttgatcgcctgagtaggagccaaaaggacacgttgtacctgatcgaagacgtgttcaacgcctacaacatccatttcatgagcctgtccgagaacttcgacacctctacaccattcggcaaagctatgatcggactcctttccgtgtttgcccagttggaacgagaacagatcaaagaaagaatgcagatggggaagcttgggagggtaaaggcagggaagattagcgcctggtctaacgtcccttttggctacaccaaggtcaaggattcctatgacgtggatccacttagagcaggcatagtgaaacggatctacgcagattacctcgcgggcaagagtatcactaagatcatgaaggaactgaaccgcgagggccacataggaaagggagtggcttggtcatatagaacagttcggcaggtgctcggcaacgtgacctatactgggagaattatttttaaaggccaggtatatgacgggctgcataccggaatcatctctaaggctgattgggacgaggtccagagggtgttgaagatcagacagttggaccaagcaaaaaagtctaataatccccgaccctttcaagcccagtacatgctttcaggattgctgaagtgccactattgcggcgccaccctcgccatagccaagagtcatacaaagaatggccctctgtggaggtatgtttgccccacaaggcacgccgggaagtaccaccgaaataacgcagcccgctaccgcataccgccagtgaattgtgagcttacttataagtataaagacgatctcgagaaggaggtgttgcgggaagtcaaaaaggtggcgttgaatcctgatgccgtagtcgcatcccaggatgacggtcagcaaactattgataaacaagcaatcaaagctcagctggccaagatcaaaagacagcaggcaaaacttgtcgacctctacctgcttagcgatgacctgaacgtcgaccagctgcatgatagggcagagaaactcaaggtgcaggccgatgctctgcaggctcaactgattcacgataccaagaaagcggacgctttcaaaaaaacagctaccgacgccaaacaaattgaccaacttgactacgaccaccagacagccattgtgcggatgctgatcgatcatattaatgtttctaatactgacctcgacatctattggcagatt

SEQ ID NO: 1406 - DNA, 1326 bp, unidentified
  source 1..1326: mol_type = unassigned DNA; note = Bacteriophage uvig_93245 from the Index of /pub/databases/metagenomics/genome_sets/gut_phage_database (ebi.ac.uk)
atgaacaaggtgatcagatgtgcttgctatgtgcgggtctccactgacaatcagttggaaaattactctatcaaagagcaaaccgagaggctgactgccttctgcaaagcaaaagactatttgattgttaagttttacacggacggcgcattctctggaggcagcattaacaggcctgcgttgcaacagatgctcggtgatatcgaaaaagggcttattgacgcagtcatagtgtataagctggatagattgagtagagagcagaaagacaccctgatgctgattgaagataagttcctggccaatcatgtcgactttatctccctgtgtgagaattttgataccagcacaccgttcggtctcgcaatgatcggcattctgagtgccttctcacaactcgaaaagaaccaaataactgaacggttcaccatgggtaggatcggaagagccaagaacggactcttccacggcgggtcagttgctcctacaggatacgactatatcgatgggcagctggtgattaatgagtatgaagcgctgcaggtgcgagacctttatacccgattttctaagggctactccctgcacaactgctggcagtatatgcagaaacactactacacgaagtacggagggtggaaaagcgagactcttgtgcgcaatgtcttgaaaaacgacgtctatatcggcaaggtgaagttcaacggacaatcatatcctggtatccacgagccaatcattccagaggaactttttcagactgtgcaggacatctttgaacatagtcggcgcgatatgcccagctttaaacgaagcccctttaaagctaacacactgctctctgggctgatctactgtggcaagtgcggggccaggtgtcacggcgaacatggcaactacacatgctattctaggagcaaaggagacaaacggcagattaaggatccagattgcaagaacaagaagtggaaaattgaagagctggacgttctggtgataaagtacgtctcagagctcgactttgaggagacagaatctgttgaagtaccagtacagaccaaggtggattacgggaaacggatctccgagattgaaaagcagctttccaagcttatcgacctctaccagataagtgatataagcttcgagacaatctcagagaagattgagaaactctccaaagagaagaatgccctgattgaggaatccgaaaaagagctccccgagcagaccagtaatgccgatcgcttgaagttccaagagagattcctggctttgttggataatggccctctgcccgaaaagcgcgcttgtctcacccagctg

SEQ ID NO: 1407 - DNA, 1377 bp, unidentified
  source 1..1377: mol_type = unassigned DNA; note = Bacteriophage uvig_151615 from the Index of /pub/databases/metagenomics/genome_sets/gut_phage_database (ebi.ac.uk)
atggagcaggtgaccgctggttattccctggaggctcagcaggaaaaactcaatgggtacgcagcctaccagaagtacactcttctcccgccatacgccgatgaaggtttctccggagcctctctgtcccgacctgcgctccagaagctgattggagacgtgaaagacggtaagatagacattgtgctgatctacaaactggacagactctcaagacgggtgcgagacgtcattgatttggtcgaactgtttgcagaacacaatgttacactgtattctcttactgaaaatctggacgtgagttcaccttttggaagggccgccttgaaaatgtctgcaacattttccgaactcgaaagggagaccattagggatagaatgatgatggggaaggatcaacgcgtgaagcaaggaaaagctctccctactagagttgccccctttggctaccggtacgacattcagaagaaacggtttgagatcgtgccagaggaggctgaaatcgtgcaaaaactgttcgagctgtatatctcaggcagctacaatttcagacagttgcatgactacgctcgcgcccattggaatcatccctatttcggcgagcgcaaccctctgagctgtaaacccatcatacaccggattatgtacgccgggtatatcatctataagggcgaactgtataaaggaaccaacttcgaccctatcatcgagtaccagacatacttgcaggcgcaggaagtcgtgaagaggcacctgacgcaaaggcaatcacccaactctccatatctcctgaccgggctccttgtctgtgcaagatgcggcaatcgatatgtcgggaagctgtatgatcggaacgtacttcagaaaaacgggaccaaaaccacaaagtacaagtaccgcgcttatggctgcgctgcgagggtgaagcgcgacaagaattaccacccagtgaagtgcgataacgatatcttccccgccgaagaactggacgagattatagagaagcgactgaaacgcttgaaattcacacagtttgttgcaggcggacaaaacctggtcgacccgttgctcgaggagaacgttgagctgaagagacgggccgaaaagctgctggatttgtatcttgacaatggtcttacgaaagaggagtatttgagcagacgcgataagcttgagaaaaagattgttcagaacgaaaaactcatacaggaggagacaagtcggccaagtcggcccaatactactattgacaatttgaaggagcgcattgcagcctacgataccctcgatagggtagagaagcagaaccttctcaacagcttgatcagccagatatccatcgatggcgaaaggatcgtagtgaagtggcgagtcaaa

SEQ ID NO: 1408 - DNA, 1473 bp, unidentified
  source 1..1473: mol_type = unassigned DNA; note = Bacteriophage uvig_327878 from the Index of /pub/databases/metagenomics/genome_sets/gut_phage_database (ebi.ac.uk)
atgattgctatatacactagacaaagcatagacaagaaggattccatttcaattgagacccaggtggagatgtgccagaaggagattaaaacccaggggctcgagttcaaaatctacaaagataaaggcttctctggtaagaacaccgatcgccccgcatttcagaatctgatggcagatgttaaacaaggcaatatagatacaattgtggtgtacagacttgatcgcatctctcggtccgtcctcgatttcgcaaacatcatcgatgtacttcagaagcataacgttagttttatctcagcaagcgaaaagttcgacacttcaacacctgtcggaaaggccatgctctacatcgttatggtgtttgctcaattggagagagaaacaatcgccgaaagggtcaaggataattattaccagcgaggtgagacaggcgcctggggcgggggaattgctccctttggatattctaataccaagataaccatcggagggaaaaaagtggcaaccattcagcaaaacgacgacattgagctggtgaaacagatcttctacgaatacgccaacacggacaagagtttgggcaatatcgcgagtgatctgacagagaagcttaatgtcatgtggaataatatcaagctgtccaggatgttgcactcaccagcttatgtgcaagccgatgtggacatctacaactattacatagcgaagggatgtgttgttgaatctgacatcagcttgtttaacggagttaacggtctgaatgtatacgggaaacgggaccggggcgccaataagtataacaacctcaaagatcatcacattgccgtgggattccacgaaggtgtaatcagctccgatctgtggctgaagtgccagtacaagctggacaaaaacgtccagatcaagaacaatggcaaagggaaacatacgtggctgaccggcctcatcaagtgcggctattgtgggagggcaatgactgtcaaaacatacaaagagacaaagtattttaattgtagcggcagggccattaagatgtgcgacgccgaagtggtaactcactatgtgagtgacattgaggagctggtgcaccagaagatgattaactatgtggagaacttctccgactgtaagataaaagacatcgagaacgacaatagacaggagatcaatagcctgaaagccgaattggtgcagatcgagaaagatatagaaaatatagtgaataacctcactgtggctaacactacgctgatggagtacgcgaataagaagattgaggaattggacaacaagaaaaagcagacccttgacaagattaacaagctgaacgtcaccaaagacgtcgaacttaagatcccgaatcttgacgggtggaataactgggatattgaagctaaacgcgacgtggctaagactctcatcgaaaaagtctacgtttataaagatcgaattcatatcaagtgggcctat

SEQ ID NO: 1409 - DNA, 1575 bp, unidentified
  source 1..1575: mol_type = unassigned DNA; note = Bacteriophage uvig_176611 from the Index of /pub/databases/metagenomics/genome_sets/gut_phage_database (ebi.ac.uk)
atgcaaaagcggcggaccaagtacgcttcttcccaaggcgacaatgccgtgatctatgcccgctattcctcccacaatcagaaggacaccagtatcgagcagcagatcgaggtgtgcacgaagtatgcgagagataatggctaccgcatcacgaatatctacgcagatcgggcaataagcgggaaaactgacgctcggccacagtttcgactcatgatgcaggatgcacgcgagcacaagttcgatgtggtgatctcttggaagtccagcagactgggcagggatatgctggacgccatgacaaatgacattatccttcggaacctgggaattaagtgcttctacacagaggagaacttcgacgacaccgctgccggacgcttcgctcttagaaatatgatgaacgttaaccagttctacatcgagaacatggccgaggacatattgcgaggcatgagagacaatgccaagaaatgtagagtgaacaatggctcacctccgctgggttatcggcggggtgatgacgggaagtatgagattgtgccagaggaggcagaaaccgtcagggaaattttcactaaggttttggctggaatggccttcgtggacattgccaacgaactgaatgccagaggcataaaaacgaaaaagggtgctccctggggcaggtcatcttttagccgcctgctgtctaatgagaggtacatcgggacatataagtggtccgatattgtaattgaaaatgggatgcctgctattatcgacagggaggtgtttgaaatggcgcagaagaagataaagggggagcgacccctgcggagacgacacaacgaaaacggcgactacctgctgactggtaaacttttctgcggcaagtgcgatagccccatgactggcatgagcggaacctccaaaagtggagctaagcatcactactatgcatgctatagcgcccgcaaagatggttcttgtgataaaaaggccgtcaaaagggattgggtggaaaagactgttgccctttttatcaaggaacatgtcttgagagatgaagtaattgagtggatggtcgaccaatatatggtgtaccagaaagcaaccttcgagagccagaggataatggaaatgcgcaatcaattgaaagatgtgcaatcacagctggacaaccttgtagacgctatcgcaagggggatctacactgactccacaaaggacaagctcctgaaactcgaggcggataaaaaggagatagagcaggacattcgcctggccacatataaccttaaagaatacgatagggagcacgtgaggtgttactttctcagttttaaagaggggagtgttgaatccaaagactatctcaagcggctctttgaccagtttgtcacaaaaatctacctttacgatgatgaaattcgaatcgcattttcaggaaccaaggatgattctcctgttagcttcaaaattatcgacgaagcggaggaacttgctgtctcttccgtcagattgagtagtgcctcaagccatcagaacaacatcattagaaccctctgtcgacttgtgatgggatcagacctg

SEQ ID NO: 1410 - DNA, 1605 bp, unidentified
  source 1..1605: mol_type = unassigned DNA; note = Bacteriophage uvig_154256 from the Index of /pub/databases/metagenomics/genome_sets/gut_phage_database (ebi.ac.uk)
atgctgactgtttttctgtcaaacggaaagggcgggagcatgatcgcaatctacacacggcaatctatcgagaaaaaagattccctttctattgacgcgcaggtgaaggcttgtgcagactattgtaaggctcaagggtgggagtacgagatctacactcaggaccacggcttctccggaaagagtctcgatcgccctgggtttcaggctatgatgtctgccgtaaggtcaggccaagtgaataagatagtgtgctataaacttgatcgaatatccaggagtgtgtcagatttcgcccagttgttgcaggagcttgaacagtacaagtgcgacttcatcagtgtcactgaaaattttgataccagcagccctattggacgcgctatggtgtacatttgtatggtttttgcacagatggagcgcgaaaacatccaggagagagtcaagtcaaactactattaccgcagcggcctcggcttttggggcgggggtcctgcaccatacggctaccagcttaaacggcagcaaatcgcgggaaaggtgcacactgtcctcgagcctgatcccaacgaggctccgtgggtccagaaaatgtatgagtggtatctggagcccggagggagcgctatgaagattcttcgactgttgacagaaaaccaggtacctacaaagcgaggctacaagtggacttccagagttctgatggatgtgctgagcaaaccactgtacacccagaattccatggacgtttacaactacttgacgcaatctggtgccgtgattagcaacccaccggaagattttgatggtacgctgagcgtggacctctatggcaaaaaagattcttcccaatccaaacataaacggtgcagaaaaggctctgatatgtattgtaatatttctctccatgaggccatcatcgacagcgacacctggcttcaggtacagtacaagatcctggccagacccaaaataggaggccgcacaggaacgtcaaagaatagttggttcaccggtctgatgatctgtggtgtgtgcggtagacatgtttctttcacacacagtgccaggacagccggatactatatctgcagctccagaaaaaattgtgggtggaatagttgctcatcaaaaccagcttccaaaaagaagttcgaccctatcattgtcaagttcatccgggaccactatgatagtcccaagaccaaggccgccatccagcaggccaagctggcagccaaaaccccacaggtgtctattgagcggaacaatctgcagatggaactggcaaccattaataaccagattgacaacctcctgaccagcctcgcgtccgggaatgccgtgatgtctaagtatattaatgacaagatcaccgagctggatgcgaagaggactcccctccaagccaagctcttgcaactggacgcaacttcatccgtcaacgatgaacttaaaaggttggaaaggatagaatgggctatggaacagcttcccctggtgtatacagaagacaccttcgacttgtctgtacaggtcagtcaggctttggtgaacaacatagtctttaatgcagacggggaggtgacaattagcttcgccata

SEQ ID NO: 1411 - DNA, 1533 bp, unidentified
  source 1..1533: mol_type = unassigned DNA; note = Bacteriophage uvig_596302 from the Index of /pub/databases/metagenomics/genome_sets/gut_phage_database (ebi.ac.uk)
atgccaaagtataatcctgaggaacttttgcccgctgtggcatactaccggtattcacctggaggcgggcaaactgagcagagtattgaggggcagcggcgagactgcatggcttacgccaaaagtcacgggtacgttatagtgaaagaatacattgataggcatcttaccggtcgcaacgacaagagacccgcattccagctgatgatgcaagacgcggagatgcattgcttcgacacactgattgcatggaagaacgacagaatctctagaaaccgccgcgatgccctcaactataaagatcagctgcggaaatgtggcgtgcagatctgttatgccgagatggatatccctcacggccccgaaggaatactgatggaatccctcatggatggtctggccgagtactatagcgccgaactggcgcagaaaattagacggggaatgacagagtctgctcacaagtgtcgcgccctcgggtctataccgccttttggtctgagagtcaataaggaacaccggtatgagccggaccctaccactgcaccatacgttaggtggatcttccagcaatatgcccagggtgtgcagattactgagatctgctatgccctcaatgcaaagggcgtgcggacctcaagaggcaatgaattcaacaagaacagccttaggacggtgctttcaaatgagaagtacattggcgtctacgaagccaaaggaattcgcacagagaacgccatcacacccatagtatcacaagaattgtttgatatggtccaacagaggataccccaaaacgcacactacggacggaaactcaacgggccaaggcagtttcccctctccggtattgcatactgcgcaatctgcggcgctcctttgatcggggatagcggaactggcaagaatggaaaacttcacacctactatgcgtgcacagcccataaacataaacacgggtgtacgaagaaaaacattagacaggccaaacttgaggagatggtatatgacgccaccgctaatatggtgctgtgtccgagcattacaagagccattgcaaagcaagtggaagccagcgcagctgccgacactagtcatgctgaggagatgcaggctgtgcaggcccacctcaaggacatagaaaagcggatcaataatatcctggctgcgatggaagaaggctccttttcaaaggctgtctctagccgactgaccaccctggagaccgaacagtctcgccttgagaagcagttgaaaaaccttaggagggtaaagcccaatatcactgcgagtcgcgttgagtatatgctgagcacaatgtgccgaaacccagctgagcagcagcctgaccacctgaagcgactcctgcaggttttcgtggagaggatcgatttgtccgaggaaactatgtccatcacctacgctatcactaagaagtccgccgtcccaacctctacagccgacaatccaaccgtgaaaacgctgcattacatcgatattaaacagtgttccacaatcgcatgctacgggggc

SEQ ID NO: 1412 - DNA, 1431 bp, unidentified
  source 1..1431: mol_type = unassigned DNA; note = Bacteriophage uvig_118876 from the Index of /pub/databases/metagenomics/genome_sets/gut_phage_database (ebi.ac.uk)
atgattagggccggcatctacgcccgggtgtctacacgcgaacaggcggaggaaggatattccatcggatcacaaatcgacaagcttactgcctactgtcaactccacgattatgagctggttgaccagtacattgaccccggtttctccggtgcaagcctggagagacctgcaatgcagcggttgctgaaaaatgtgaaggagaagaagctcgacgtcgtaatagtgaggaagctcgacagactgtccaggagccagaaggatatactcacgctgatagaagatgtctttctgccaaacaactgcaacttcgtctcaacaacggagagctttgacacccagactcctatgggcagagccatgattggcatcctgagtgtctttgctcagctggaacgggaaaccattcgcgagcgaaaccaggatggaaagaatgaaagggctaaaacaggaaaagctatggcgtggagtaatccgcccctgggatacaattacgttgataagcactacgaggtgtcagagtatgaagctgccatagttcgcaccgcctacaatctttgcctgcaggggttgagcatgaacaagatcaagaagtatatcgacgagaaatttgactactctctcacaaagtacaagaccaaggatgggaaaatccatcttgcgactatcaagcgcatcctgagaaatcccctgtattatggggtaatcacctggaaaggcaatctgtatcttggggagcatgaggccctcatcactgaggaaatgttcaatgccgtgcagaaacagctccagctgaacgcaaaaaacgccttgggccactccaagaatccttttcggagtacgcgactgctgaccggccttttgtggtgtggcgattgcggtgccaggatgcatgctcagtctaggaagcgcgtgaacaacgacaggtggtactatatgtgttacagcgtgtctaagaaatctgcaaagtatatcaccggggaatgccacagcggaaatttcgatggggaaactctcgatcaaattgtttacgaccagattagagctttgagcgacaataccaagctgttggagcaaaccatgttgtccaaagagtcttcagtaagtgaagagtttttcgaagccaaacttacttccattgaatccaaacaacagaagctggtggacctctatctcgatgataagctggataaagctatgttggaatcaaaaaacaaggcattggaggaggagaaacagaaaatactggataccatggaacgcaataagcagaaccaaaacaagccaacaaaacgagaggtccgaaaaaaccttaaacagttcattgacatctacgagacaggcgagcttgacactaagaaagcaattctgagaactctcattgaccggattacagtgacaggcgatgacgtgcggatcgactggaccttc

SEQ ID NO: 1413 - DNA, 1383 bp, unidentified
  source 1..1383: mol_type = unassigned DNA; note = Bacteriophage uvig_375705 from the Index of /pub/databases/metagenomics/genome_sets/gut_phage_database (ebi.ac.uk)
atggataagaagaagatgaggtgcgccatctacattagggtgtctactactgaacaggcgatggaagggtatagcatcggagaacagaaagaacgcctggaacagtatagctcagctatgcagtggaccattatgggggagtacatcgatccaggctattcaggcagtaatatgaaccgacccgaactgaatagattgatttctgaggtgaagaactatgatgttatactggtatacaaactggatcgcttgtcacgcagccagaaagacactatgttcctgattgaggacgtcttcctcaagaatgacatcgccttcgtaagcatgaatgaaagcttcgacaccggcacaccatttggacgggcagccatcgggcttctggctacattcgcacaactcgaacgagagaatatcaaggagaggatgtcaatgggaatgaagggaagggcgcgcaaaggatattggaaaggtaccagtaggccacccattggatacgactattccgacgggaacctgattattaacgactacgaggcaatgcagattagagagctcttcagcattactgctaacggaatacccgggatgacctacaatgtgagaaacatcggtcggtacttgagcggtaagtactctaataagtatggcggctggacagactcaagtgggatcacgtacaccatccaaaacaaggtgtacatcggcatggtgaagttcaacgacgagtacttccctggccagcaccaacctataatcgatgatcttctgtttgaaaaagccaatgaccgcttgaacacctatcttagtacttttggagcccatgcaacctataacaagtacatgctctccggcatcacatattgtaagctgtgcggtcgaccgtattacaggcggaactcccaagtcaaaaaacatggctccaaaaaggaatatggctactacagctgtcaggggcggaaagccgatgtggagatcaagtgccctagcaagatctttagacaggatgagctcgagcaagccgttattgagcaaatcgagtccttgaaatctacaaactggacggctcaggagaaacacgaggatacagcagctttgcttcagcagctgaagcagatcgattctcggcaggaacgccttatagacctttatagttttgggtctattcagaaaaatcagattgatgataaggttagagaactgaatctggagcgggagaaggtgaaagccctcctgtcttcacgaaatactctcgacaccgacgagataattaatatggcttccaagatccacgattccgactacgtcgtcaagtgtgacatagtatccatactgatcaaaaaagtggaggtcgacggtgaaaacattagagtgtactggaacttt

SEQ ID NO: 1414 - DNA, 1563 bp, unidentified
  source 1..1563: mol_type = unassigned DNA
atgaagaaagtcatcacaattgagccggccaaacaggtctctcataaggtggatctgccctctttcactaaacgaagagtggctgggtacgctcgagtttctacagaccacgaggaccagactactagttatgaagcccagatgaagtactacacagactacattaacaacagatcagattgggagttcgtaaaaatgtattctgatgaggggatttctgggacaaataccaaggcgaggatcggctttcagcgcatggtggaagatgccctggacggcaaaatcgacctcatactgactaagagtgtgtcaagattcgccaggaacaccgttgactccctctctaccgtgcggaaattgaaagaagcgggggtagagatctacttcgagaaggagaatatctggacattcgacagcaaaggagaactgctgatcaccatcatgagcagcctggcccaggaggaatcacggtcaatatctgaaaacgtcacatggggacgcaggagacagcttgctgaaggtcaggtgaccttctcctattcccaggtgctgggcttcaagaagtctgatacgggaggttttgagatcgatcacgaggaggccaagattgtacgctacatttttcaccaggtccttctcggcaacaaccccaacaagatagcaagagagctgaccgctcaaggaatcccaaccccacaagggaaaagacagtggtcctatggcaccgttaaaaggatgctcaggaacgaaaaatataaaggggatgcactcctccaaaagtcattcacaaccgacttccttaccaagagtacgaagcctaacgaaggcgagctgccccagtactacgtggagaacaaccatgaggccattatcaagagggaggtgttcgatcttgtgcaggtggagcttgataagctcgagaagaaacggcagactagcaatatctttacaggtcgattgttttgcggcgattgtggttccgcctttggcagcaaggtctggcacagcacaagcaagtacaaacgaactatctaccagtgcaatgcaaagtataagggcgaacataagtgtcggactccacatgttacggaggaagagattaaggggtggtttctgtccgctattaatcagctgctgagtaatcgcgacgaaatcatcgcaaataccgaactcttgatagacatggctaaggacacatcccctctggaatctcggatcgacgatttggaacatcacctggagacaattagacaggacatagaggatttggtcgaccggaatgcgcggaaagcccagaaccaagacctttatcaagaacagtatgatactcttgttaccgcataccaagaaattcagaaagagctccaagaggccaccagtagccttgaggagcagaaaagcaggagtatttcactggacggattcatccaagaactgaaacaacaggactcccttattaccgactttaatcaggaactgtggcagactagcgtggagcgcctggatattaaagtggataagcacatatcccttacgtttaagaatggagtccgcatcgatttg

SEQ ID NO: 1415 - DNA, 1452 bp, unidentified
  source 1..1452: mol_type = unassigned DNA
atgactgccaccctggagcgccacctggacacccctcagcaagaagctcttagagtcggcgtttatcttcgcatgagcacagataaagagttgggcatagatcgccagcgggaagactgcctggccctggcagagagactgggctgggtgcctgtggaatacattgacaacgatcgctccgccaccaaggaaaatgttaaacgagaaggattcgacgcactgagcgacgacatcagagatggacgaattgatagtatcattacatggaggtctgacaggctgtatcgcaaaatgaaagatctgctccccctcattgaccttatccagggcgtgaacaagactgggaagcggatcccgatagagacttgtcagaccggtctcatagatttgactaccgacgcgggcaggatgaccgctaagatcctggccgccgttagtgagaatgaaggcgaggtgagaaccgcccgccaaatgcgggcctacgagcaaatagcggattccggccgaaggttgggcgcccctgctttcggttggactagggacccaagagatccacagattgtacctgaagaggctgcagctattcgcgaagggtatgctgacgttcttgctgggtgcactctgtactccatcgctaagaaatggtcagatgctggcctcaggaccacgcgggggaatgcgttcgtcggcagcgtggtgggaaaaatcctgagatcaccccgaaatgcagggctcctcacatttcgcgacgagatcgtgggtgagggtacgtgggaacccatagtggatcgggagacatgggaggcagcctgcgcggtgctcgaccagaaaaacacaggccaaaaagggccgagagtgagaagcaccttgctgtcaggtatcgtccggtgtggggcctgcgggaacaagatggcagcaggaaaaaactctaatggagagcccatctacaagtgcaagcgatacgaggtatgtaagcatggagttacccgagtccggaagaaggtcgataagtatgtggaaatgagcatggtcgctaagcttgaacagcgcaagtggattgtgggaacacaggtagacgctgagcaggccaagggcctgcacgccgaggccgaggctctcagagcccgcaaagcctcttttggtgaagctctggcagacggaacgcttaccccagcgcaggtaaaagatgcaactgacagggtcaatgttaaacttgaggaaattgacgccaagcttgcaaggctcacacggtctagagtgtttgatggcttgctggggcacgacgacttggaaaaagtgtggctgggactggatctcgagaggaagcgggccattatcgagtccctctgtgataaaatcgtcatccagcacgtgggacagacagggaggagtgccgcaaagctgcccctgggccatgccattaagatccactggcatgacccatccaacgat

SEQ ID NO: 1416 - DNA, 1239 bp, unidentified
  source 1..1239: mol_type = unassigned DNA
atgagcgtcaagaaaatcagggtgaacaatcagaagcacaagcagagaatatgcgcgtatattcgcgtgagcactacaaatgggtctcaactggaaagtctggaaaaccagaagcaatactttgagaacttgtacagcaatagggacgacattgacttcgttggagtttatcacgataagggcattagtgggtctaaagacaaccggcctaatttccaagctatgatagaaaactgccggaaaggtatgatagatgttatacacaccaaaagtatcgcaagatttgcaaggaacaccgtcacagtactcgaaattacccgggaacttaaggcgattggcgtagatatcttcttcgaggagcagaatatccatacactgtccagcgagggtgaggtcatgttgagtgtgcttgcatccattgctgaggacgagctcagatcaatgtcagggaaccaaagatgggcctttcagaaaaaattccagcgcggagagctggtgatcaatacgaaacgatttctgggctacgacctggatgagaatggggagttgatcattaaccccgaagaagctctcattgtgcgacagatcttcgccttgtatctggaaggatatggaacccatcgcattgcaaaactgttgaatgaaaaaggcgtagccactgtgaccggcgctaagtggcatgatacaactatccggcagatgttgagtaatgagaagtataacggttctgtcctgttgcagaagtactttcacgacggcgtgaacgggcctaagaagctcaaccagggggaactggagcagtattttatcgaggacaatcacgaggccatcatatccatggaggactggcaggccgttcagggcaaactcaactcccggaggtggcaacaaggaaggaacaagacttacaagttcacaggccttctcaaatgtcagcactgtggtagcaccctgaagaggcaggtgtcatacaaaaagaagatcgtgtggtgctgtagcaagtacatcaaagaggggaaggctgcctgcaaaggcatgcgcgtgccagaagtcgatatctccaattggacggtgacttctccagtgaccgttatcgagcgcgacagagatggagagaagtattactcaaataccggacaggaatctgccgatcagcgaagctcttccggccaggaagagaaccaaagctcaagaattctgtcctctgtccatcgcccccgacggacagccatcaaactt

SEQ ID NO: 1417 - DNA, 1689 bp, unidentified
  source 1..1689: mol_type = unassigned DNA; note = Bacteriophage uvig_582533 from the Index of /pub/databases/metagenomics/genome_sets/gut_phage_database (ebi.ac.uk)
atggaaggaaagcctgatatgaatattatcccaattgacctctccgcactgacagatgcagaaaaggccctcttctttgagtatagggatgtgctgtcagctagttggacagaagtggtgtgcttttaccttagatattcaagtgaccggcagacagaacagtctattgaggggcagctcagggatctgctcatgtactgccgcctgcatgcttatcgggtggccgcaatctacgtagacagagctatctcagctcacgcctccatggagaagaggccagctttccaaatgatgttggccgatagtgctacgagcgtttggaagacagtgctggtctataaacttgatcgatttgctcgcaatagagaggacagtatggtcgcacgcatccggttgcgaaaaaacggctgtcgagtggaatccgccaaagaaaatatctccaagaaccccgagggtatcatcctggagtccgtattggaagggattaacgaatactactcagaggagctgaggcagaaagtcatgcgggggaaccgagagtctgcgatgaaagggcagacactgggaggcgtaacccccttcggctacaagactgagaataagagacttgtgcccgacccaatgacagcacctgtcgtgcaagagatctttactagatatgctgcaggtgatagacttgtttccattgcaagggatttgaatcaacggggatacagaactaccaaggggcacccgtttggcaagagtagcttcaaaaccatattccgaaacacgcgctacataggcgtgtacaagtatatggatatcacgaaggaggacccctctctccgaatagtgagcgacgagcagtgggaggccgttcagtctaaactttctgacactgccagcgcgcctggtaggggaaaagccagaaacccctaccttctgagcgggaagctcttctgtggccactgtggcgcccccatggtgggagaatgcgggcggggcaggcatgggcagacctactattattatagctgcgcgaacaggaaaggaaaaaaatcttgcgacaagaagccagttccaaaagagtggattgagcacattgtcgctgaagatgcggccgcattgctgaccgatgactttatcgaagacgtggcggagaaagctgcccagcagagcgaggcagacttccgggctaacacacgcatccccgcactggaatcacaaatagccgatatagactcacgcattaggaacttgactaaggccatcgaaacttctggtagcgccctcgacgttctcgtctcccggctgcaagaacttactacacagaagtcagcccttgaagcagagctgaggagtgaaagtgccggggtaatacacctgaccaaagagatggttattttctttctggagggcgtgagagataagatcattcagccggagaatcgcgacgccatcctcatccgcatgttcgtcaactctgtgatgctctatgacgatggacctggcttctttaagttcgaaaccgcctacaatctgaccggcattcctcagaagacctacaagatcccgattaattccgcctccgctgagttgcaaaagtgttccgattttggaagaagcggcgtgccactggacgccaacagcaatcagattcaggtggtcggtctgatctttatccagaccaaacggcatgctttgcct

SEQ ID NO: 1418 - DNA, 1110 bp, unidentified
  source 1..1110: mol_type = unassigned DNA
atggtccggagaaactcaaagaccacacatcagcagaaaaagattagggacgcattcgtaagtgaacgcacagtggagattatacccgctaagcgagaattcacagatgtgaagacgaaaaaactgcgggtggccgcctattgtagggtttctacctttgacgaatctcagtctgggtcatttgagctccagaaacagacctataccgagcggataaactcaaatcccgactggattatggctgggatctatgccgaccagggcgccagcggcactagtatcaaacgccgagagcagtttcagcaaatgttgcacgactgcagatcaggcaagatagaccttattatcgtgaagagtgtatctagattcgcacggaatcaactcgattttatctcaatctaccgcgagctcaaggccttgtctccacctgtgggtatctacatcgaggacatcaacttgaacactctggataccaactccgaattcatacttggtattatggcaatcgtggcacagggagaatccgagcagaaatctgcttctatcacgtggagtgttattgagaggttcaagaggggtatcccaatgattcccacccataatcttctgggctacactaaagatcagtatgggcgggtagtcatagacgagactgaagccaagatcgtcaggcttatctatgatagctatatcgagggcatgacagcgagcgagatcgcttccacactgatgacaaatcacatcccgaccgtgacaggactcgaacgctggactagcctggcggtgtacaacattctgaggaatgaaaagtacaagggagaaataatcatgcaaaaaaccttcaccgtggactgcttcagccataagacgcggaagaacaatggggaaaagcctaagtacagactgaaaaatggaattccatccattatccctgagagcagatgggatttggtccaagagttgctgaaacagcccagacgcaaaagcaagagtactagcgagattttcgttcctaaactgtacattaagaaactcaagtccggcaaacttcgagattttgtggttctggatccatcctggaagtccgaggacattcacgaagtctttaaa

SEQ ID NO: 1419 - DNA, 1506 bp, unidentified
  source 1..1506: mol_type = unassigned DNA
atgcgcgtcctgggaaggcttagactctcccgctcaaccgaggagtctacctccatcgagagacagcgggaaatcgtgacggcatgggcgcagtctaatggtcatacagtggtgggttgggctgaggacgtggacgtatcaggaagtgtcgatccattcgataccccctcattgggcccttggctggacgagagaagaggcgaatgggatatcctgtgcgcctggaagctggatagactcgggcgggatgcgatccgcctgaacaagctttttgggtggtgccttgaacatgggaagaccgttgcctcatgtagcgaaggcatcgatctgagcacccccgtgggacgactgatcgccaacgtgatagccttcctcgcggagggcgagcgggaagccattcgcgagagggttaccagtagcaaacagaaattgagggaagtcgggcgatggggtgggggcaaaccacctttcggctacatggggatcccgaaccctgacggacacggacatattctcgtggtggaccccgtcgctaaacctgtggtcaggcgcattgtagacgacattctggatggaaaacctctgaccaggttgtgcacagaactcactgaagagcgatatctgactccggcagaatactacaatacacttcgcgctgggtccccacggcagcaggccgaagacggagaagttacagcaaagtggcggcctactgccgttagaaacctgctgagaagcaaagctctgcgcgggtatgcgcatcacaaaggccaaaccgtcagagatgctaaaggaatgcccgtacagctcgccgagccactggtggacgcagacgaatgggagttgcttcaggaaattcttgaccgagtacaagctaattggtccgggcgccgcgtggagggagtcagtcctctgtctggtgtcgctgtctgcattacatgtgaccgcccccttcaccacgacaggtatctcgttaagcgaccctatggtgactacccatatagatactatagatgtagggaccggcacggcaagaacctcccagctgagatggtggaagagctcatggaggagagcttcctcgcaagggttggcgattatcctgtccgcgaacgggtgtgggtgcaaggggacactaattgggctgatttgaaggaggccgtggcagcttacgatgaactcatgcaagcagccggccgggcaaagagtgccacagccaaggagcggcttcagaagcagctggatgccctggatgagaggatagccgagttggagtccgcccccaacactgaagcccattgggagtacagaccaacaggtggtacgtacagagaagcatgggcagctgccgatgctgacgagcgcagggagatactgcgccggagcggcatcactttggccgtaggcgttgatggggtggagggccggcgatctaagcacaatcccggagcactgcactttgactttagggtgccggaagagcttacgcagaggctcggcgtggcg

SEQ ID NO: 1420 - DNA, 1416 bp, unidentified
  source 1..1416: mol_type = unassigned DNA
atgcgagttcttggccgcgttcggctgagtcgactgaccgaggagtccacttccgtggatcggcagagagagctgatcgagaagtggagcgaaatgaacgaccatacaatagtcggctgggcagaggatgttgacgtctctgggtctattgatcccttcgaagccccacagctgggaccgtggttccaggaggataaacgaggtgactgggacattctggtcgcatggaagctggatagaatcggcaggagagctatcccccttaataaggtgtttgggtggatgctcgaacacgagaaaacattggtttgcgtgtctgataatattgaccttagcacgtgggtcggaaggttggtggccaacgtgattgcaggtgtagcagaaggcgagctcgaagctattcgagaacgaaccaaagcttccagaaagaagctcctcgaatctggaaggtggacgggcggccccgtgccatactggctgatcccagagaaacttccagagggcggatgggtcctgagcctcaacaccgagaccgctcccatactgagacgcgcgatagacgaggtactggacggtaccgccgtgcacaccgtcgccgaaaggctgaatgaccagggagtgcctagtcctggcggaaaaaagtggacttcacagactctctggaggatcttgcagcacaagtacttgaaggggcacagcaccgaccgggggaaaaccgtgcgggactcatccggggtgcccatcagtaattgtgaagccctgctcacaccatccgagtgggaccggttgcaggccgtcctgacacagtggaagctgcccgaaacttcaaacagggtgaagaacacatccccgcttttgggcgtagtggtgtgctatatttgcgataagcctctttactacagaagctacacccgcaattatgggaaagggctgtatcgatcttactattgtagaaaccaccgcactcctggaatcaaggcagatatgctggacgaatacttggaggagaatctgatgcgcgaggttggcgacaaaaatgtactcgaacgctacttcgtgccagctgagaaccatcaaatcgaactggatgaagccatccgcgctaccgaggagctgactgcgctccttggtacgatgaccagcgccacaatgcgcagcagccttactgcgcaactggctgcactggattcaagaatcgcctctttggagaaactccccacatcagaaagtaggtgggagtatcgggaactccctcggacatatagagagatgtgggaatccgacgacgatcctcaatttcggagggagcttctgcttaagagtggaataactctcgccgccacaatgaccgggggccagaaactgcatctgcatattccggatgatattcttgaaaggatggctcttaagggtgag

SEQ ID NO: 1421 - DNA, 1659 bp, unidentified
  source 1..1659: mol_type = unassigned DNA
atgacctgcttcaaggcagtggtagaagtgacatgtgttactactgaaggcgggtttatccttaagaaagtcacagccatcaaggccaagaatacggtcgtcaataaggagctcttgaaaaagcctagggtgtgcgcctattgtagggtttctaccgataactcaaagcagctggaatctctggaaacccaggtgtcatattacgagaactatatcaagaataagagtggatgggaatatgccggagttttcaaagacgaaggaatatccggtaccgggattgctaaaagagcagactttaacaagatgctgaaagcctgtgagttgggcaagattgatctgatcattactaaaagtatctcccgattttctcggaacacagctgattgtctggaaaccgttcgatacctgaaaaagttgaaagtcgctgtctacttcgaaagagagaatatcaatactctgggcgctggaagtgagttgatcctcagcgtgctgtcaagcctggcccaggatgagtcaaaaaacatctccgaaaatataaagtgggcattccagaaaaagttcaagcaggggaggatacagatcaacaccaagcggttcctcggatacgatgtcgaaaatggaatgttgatcattaacaaggaagaggcaaaaatcgtgaagagaatatacaaagaatacttgtccggctctagcctgtctgagatcaagaagggtctcgagaaggataaaattaaaaccgtaaccggccttgacacatggcaaaatagcaccatcaagaagatcctgtccaacgaaaagtactatggtgacctcattcaacagaaaacaattaccgtggactacctgactcacaagcgaaaaaagaacaatggtgaggctcccaagtatgagataaaaaatcatcataaggggatcatcagcaaggaggattttctgaaggttcaagacataatgaaaaaacgggccgctgagttcggcaatctgccagaaaacagaaacaagtatacacgccgctacgcgttttcagggaaaattatttgcggcaattgtggcgctgtgtttaaaagaaggacctggaacaacaagagtaagtacaagaaaattgtgtggcaatgctctacatacattaacgaggggaaaaacaagtgcgatatgaaagcgatagatgacaacactctcaaagcggtgtttgtggagatgtttaaccgcctgtatgaaaataagaacaacttcttcaaagcctttatcgacaatatcgacaaggtattgaaggagtccgcaaagtgcgagaatgtgtccaagctcgataaggagatcgacaacgccaatgaggaaattaagaaacttataaggcagcagattaagggacagctccaggacgaagtattcgacatcaagcacaaaagccttaatgaaaagttgcaggagcttaaggcaagcaaaaacactgtggcctttaacggcaataagtataaagagattctgaaacgcagtaaagagatcgaacggattatcgagatgcggaagagcacacttatcgagttcgatgacgatattttcaaaaatctcatcgagaaaattgtggtcgttacgccgactcatcttgagtttcacctgaagaatgggatgaaagtgaaagaggaattcacgaaaaag

SEQ ID NO: 1422 - DNA, 1458 bp, unidentified
  source 1..1458: mol_type = unassigned DNA; note = Bacteriophage uvig_364726 from the Index of /pub/databases/metagenomics/genome_sets/gut_phage_database (ebi.ac.uk)
atgagaagagtggtgatctatgtcagggtgagcacccaagagcaggccacagagggctattcaataggagaacagctcgagcggcttcggctctattgtcaagcacatggctggattcttgtggaggagtacgtggaccccgggtattcaggggcaaatctcgatcgccctgcgataagtaagctgatatccgacatcggctccggtacattcgacactgtcctggtttacaaacttgatcgcctgagtcggtctcagaaagacacaatgcaccttattgaggacgtgtttatggctaacaacatcgactttatctccatgagcgagaatttcgacacttcaaccccacttggaagggctatgattggaatcctgagtgtattcgcccagctggagcgagatcagatcaaggaacgaatgggaatgggcaaagaggccagggcgaaagaagggaaatggcagggaggttccactgtcccagtcgggtatgagtatgacgtttccactggggaactcatcgtgaatgagtacgaggcaatgcaggtgcgcgaggtgtttaacctggtattgtctggtatgccttacaagaccatcgctaataagcttaccgccaagggctacacctataacgccattagcgggcatgttgggatatgggatgccaacagaatcaagtacgtgttgactaacaagctttacatcggctacataaggtacaaggacacctggttccccggcacacacgaacctattatcgatacagagacctttgaaaaggcccaacttctcttcaaggagcgcagcgctagtaacgtcatgcacattaagaaacgccagggccagatttcatacttgggaggactgctgtattgcaaaaaatgcggcgctcgctacgctcgaaactcaggtaggaaatggaaaaacaatgagccacctctctactattcttgttactctcggtctcacaaagtgccgaagatgataaaggaccccaattgcaaaaataagacctggcgcatggcagaactggataatattgtttttgcggagatcaaaaaattggccctggaacccgaatatattaccacaatcaaagagagggaaaagacgaagcaagacacgtctaataaggccgatatattgagaaaggaaattcggaaaatcgaagagcaggtcagcaggtttctggatctgtatggtctgggcgccttcactatcgagcaagtcactgcaaaggtgcagccactgaaccagagaaagcaggacattgagcaggagctcacggagctggtgacagacgaaacaattttgtccgaagacgaaacccgggagatcgtaagaaattttgaagaggttttggagcggagcgatttcaacgaaatccgaatgaccattgatagcctggtaagatacattgaactcaacgatgatactgtgtacatccattggaagttcaca

SEQ ID NO: 1423 - DNA, 1440 bp, unidentified
  source 1..1440: mol_type = unassigned DNA; note = Bacteriophage uvig_118757 from the Index of /pub/databases/metagenomics/genome_sets/gut_phage_database (ebi.ac.uk)
atgcgcaccgccatctatgttcgggtgagcaccctggagcaggcgcaggagggctattctattgacgagcagatcgataagctgaaaaagtactgtgccgcgaaggattggaacgtgtatcagatctacaaagaccccgggtttactggctcaaacaccaataggcccggactgaatgctttgatcagcgctgcaaagcgaaaccttttcgacactgttctggtgtacaagcttgataggctcagcaggtcccagaaagacaccttgtacttgatcgaagacgtgttcgggaaaatgggcatctcatttgtgtccctcaacgagaacttcgatacatctacaccatttgggaaagcgatgatcggaatactggctgtattcgctcagttggaacgagaacagattaaagagagaatgtcaatgggcaagctgggtcgcgcaaaaagtggcaaggcaatggcctggaacaagagtccttttgggtatcgctacgaaaacgggaactacgtgatcgaacctattgaggcccaaattgtgaagcgaatttttgatgagtacctgagcggcaccagcataaccaaaataagagatcacctcaacgaagaaggacacattgggaaaaaagccgaatggccctatagatcaatcagatccatcctggataatgcaacatacgctggcttctccaagttcaaggaggaactcttcgaaggaaatcatgaagccatcgtcactaaagaagcatacttcacaactcagaaagagctggagatccggcagaaagaggcttacaagaagaataacaatccccggccattccaggccaagtatatgctcagcggtctgatgcggtgcggaatttgcggctctacatttgaagtcaatctgcgaaatgtgaggaaggacggaacgagactgaaaaagtatcgctgtgcctcccattctagcaaaagacacaattacaccattaagcggaatccaaacggttgcacttctcctacttatgacatggaggaactcgagaacgccatattggcccaaatcgagaagcttcggattaatacggatataattcaggagaagagtctgacgcagtccgatgtcgatacaaattcctacgagatcaagcttaagcagctcaatagccaattggagaaattgatcgacctgtaccttgacatggagatccctaagaaaaccttggagattaggaaaaagtccataatccacgagatcgacagtattgagacaaagctggagagcctcaaagagaacaacaacaaccaggtatctgtcaaggagcttatgagggaactgtctaacattaagagttcagtttataccctcccatatgaccaacaaaagaatctggtacgcaaattgattaagaatatagtggtctatccggaacgcatggaagtgcattgggtttttgaaaaa

SEQ ID NO: 1424 - DNA, 1389 bp, unidentified
  source 1..1389: mol_type = unassigned DNA; note = Bacteriophage uvig_442496 from the Index of /pub/databases/metagenomics/genome_sets/gut_phage_database (ebi.ac.uk)
atgaagcgcgttgctctctacatgagagtgagcacacaggaacaggcagagaatggaaattctctggaattccaaaaagaaaagcttgaggcctactgtaaactgcatgaatacaagattgtgggagaatacgttgacgctggggtcagtggcgccaagtttaatcgccccgctctcgaccgactcaaggatgatgtagaaaaaattgacgtggtactcatctacaaacttgacagattgtcacggagcatcaaggataccatgcttctgatcgaggatttctttaaaccgaacaagatagacctgatatccctctctgaaaattttgataccacacaggccattggtatggcgaccgtgggaatgctttcaacttttgcacagttggagagagacacgattaagcagaggatgatggccgggagggtgcaggccgtcaaaagtgggaagtatgtgtgcaaggtgccatatgggtacattaaagtggaagacaagctcataaaagatgagactactagggagtgcgtggagttcatctttaaaaaggccttggagggtcaaagcctgtacgagattatgtactctctcgaaaaaaacggctatggccagtataggaaatggtcaaccagcctgatccataaactgttgaagcggcccgtctaccggggccacaccacaatcaataacgttttgatgaaaaacacgcacgagccctatatttccgaggaagagtttgtattcatgaacaagctgttctccgataggaagtgccactcttcaaagagtaggcgcaataagctgccagcaatcttccgaggtctcatacattgtcctacctgttatagaaaactgtaccctttcacaagaacttttaaaagcggaaagtgcactactttctatcggtgcaacttctgtgggcgcgaaaaaaatattcacttcagcttcagtgaacagacattcgagaagaagcttctgaactacctgaagtttgactttagcatcgacataaagaaagccaaaacaaccaaagtggactactcaaagaagctgtccgtcctggaacacaagaaaaacaagctgcaacgggcttggctcaatgatttgctcagcgataatgagctcaaaaacctccagaaagagatcgataaccaaattcaacttatcaatctgaagcagaaggagtatcatgacagtctggttaatgcaaaaaagcagaagaacatttctggcattgtggcgaacttcgagaacatctattcttccctggatattgacaagaagaccgagtttctgaataccatcattcaggacatcaagacaactataaccatcgagaagcgaggcaaagtccaccgctccaatatctccatcacgaacatcatctttaaa

SEQ ID NO: 1425 - DNA, 1446 bp, unidentified
  source 1..1446: mol_type = unassigned DNA; note = Bacteriophage uvig_425122 from the Index of /pub/databases/metagenomics/genome_sets/gut_phage_database (ebi.ac.uk)
atgaaagccgcaatctacgtgagagtttctactatggagcaggcggaggagggctactccctggacgagcaggtggacaaactcaaaaagtactgcgaaatcaaaggatggaacatctacaaaatctatcgcgacggcgggttctccggagccaacactgacaggccaggccttagcgagatgattaacgatgcaaagctgagagctttcgataccgtactggtgtataagctggataggctgagtaggtcccagaaagatacattgtacctgatagaggatatactcgcagctaatgacattgcctttgtctcattgaatgaaaactttgatacctcaaccgctttcggaaaggcgatgatcgggatcttggctgtgtttgcacagctcgaacgggagcagataagagacaggctgctcatgggtaaaattggcagagccaaaagtggcaaagccatggcatggggcgttccgcccttcgggtatgtgctgccagaatctaatcgcgagaagtatgagatagttccagttgaggccgagatcgtgaaaaaaatctaccacgattatatcgctggaaagcttgtcgccaaaatttgcgatgaacttaacgcagagggtcatatcgggaagcgggaaccttgggtgcacgccaacatgaagcggacccttaccaaccctgtctacgccggattcatccgctatcgaggtgaagtgtttgaagctaaccacgagcccattgtatcaaaggagacattcgatctggtgcaggaacagattgaactgcggcagacacgcgcctatcaaaagttcaataatcccagaccatttcaggccaagtacctcctgagcgggttgatcaagtgcgggatctgtggcgcccggtttgaggtgattcaatataagccacgagcagacggctctaggattcgctattacaagtgtgtgagttatagcccgaagaatcatgctcctagcatgtggaagaactccgacggttgtacctctcctaagtactaccttgacgatcttgaaaaagaactgctcagcgaattggaaaaattgcgggacgaccccagcctgatcacgagttatgtctcaaaaacgaatcagattgacgtgagcggactcaaaaaacgactgaagacactcaacaatcaactcaagaagctcgtcactctgttcatcgacaacgattttcctaaggacgtaatagagtccaagaagaagatcatcatggacgagaagaaactcatcctcgataagattaatgaggctgaatctattaaacccgaggtctctactaatgaagttattgacgagctgggccagataaagatatccatgttcgatctggattacgaggaacaaaagagaatcgcgaggaaactgatcaaagagattattctctaccccgacaaaatggagatccattgggcttttgccatt

SEQ ID NO: 1426 - DNA, 1431 bp, unidentified
  source 1..1431: mol_type = unassigned DNA; note = Bacteriophage uvig_151019 from the Index of /pub/databases/metagenomics/genome_sets/gut_phage_database (ebi.ac.uk)
atgaggattgccctgtaccctcgggtcagcacacaagaacaggctctgaatggccatagcatcgacgagcagattgagcgcatgaataagtactgtgaggctatggggtggcaggtgtataagacctatacagatgcagggtacagtggagctaacacagatcgccccgcattgaaaaggatgattaaagatatcgaggccggcaagatcgacaaagttctggtgtataagcttgatcggctctcaaggagccagctggatactctgtatctgattgagaaagtgtttctggccaacaacacggactttgtgtcaatgagcgagaattttgacacctctacgccatttggaagagccatgatcgggattctggctgtttttgcgcagctggagcgagaacagattaaggagagaatgatgatggggaaagaagctcgcgcgaaaaagggtctctaccatggaagtaattgctaccccataggctacgattacatagatggacacttggtcccactggagttcgaagccattcagattaaaatgatattcgaaatgtacgcagagggcaaggcccccttgactatcgccgaatatctcaacaacaatggctataagacccgatacggacggtggaacgacatcacagtccgaaagatcctgagacgaaaaacttatcttggatatatcaagtaccacgatgactggtacaagggggaacatgaagccttgatcagcgaggatctcttcaacacggtacaaaagatttttgaccagcgcaccgaagattattcttactataaacggagggagggcagagtgaatagttatctcggtggcatgctcttctgtgactgctgcgggggcaagtattccaagattatatcaaacagtaccaagaacggtaagaagtatcgcaatacatactataagtgcaattctaggaccttcaaaaaaaggacactggttagagaccctaactgtaagaataagacttggaaaatggatgtgcttgacaacctcgtcttcgacgagatcaaaaaacttgcccttgatccggattacttgaaaaagatcaagaccccacaggagaatgacaatcgccaatccgtcatagagaaccagatcgagtccatcaagattcagattaataagctgatggatctttacacaataggtggaatgcctgtggacctgttgcaagagaaaatccacgacctgaataaccagcaaaagaaacttgaagccgagatcgaaaagatcgaagacgaaaaaaaggagaagatcaccaacgcagacgcgatgaaaatgatcacttccttctccgatgtgcttgagcggggcgactactctgaaatcagagcatcactcactgctctgattgaaaaaattgtgattaaaggggaggacataaaaatctactggcggttcgta

SEQ ID NO: 1427 - DNA, 1404 bp, unidentified
  source 1..1404: mol_type = unassigned DNA; note = Bacteriophage uvig_570177 from the Index of /pub/databases/metagenomics/genome_sets/gut_phage_database (ebi.ac.uk)
atgtaccaagacataacaacggtctgtggctacgtgcgagtttctactgagaatcagctcgagaactactccatcgaggaacaaactgtcagaatccgctcttattgccaggcaaaggggtggcacctcgtccaaatctacaccgacggcggttatagtggagggaatacgaatcggcctgcgcttcagcggatgttgagcgacataagacagggaaaaatgcaggctgtggtggtgtacaagctggaccgcctgagcagatcccaaaaggacacactcactctgatcgaggaccatatgttgtcagccggcgtggattttatctctattaacgaaaatttcgacacgtcctcaccttttggacgagcaatgatcggtattctgtctgtatttgcccagctcgaaaaggaccagattaccgaaaggttcaccatgggcagaattggacggtccaaagccgggtactatcatggagggcccaatgccccacgaggctatcagtacgtggatggaaccctgatcgtagacgaattcaaagccagccaggttaaagagattttcagactgttccttgatgggaaaagtatcaacaggatagctcggcagatggagcagaaatatggcggcaggtggaacgccgcaggagtccgcgtgatcctgcttaactcaacctatataggtaaggttaagttcgcaggcgtcgagtacgatggtcgacaccaacccctgatttccaaagaggactttgaaacagctcaaaagctgctgtttagccccgcacgcgatgcgaagaaaaattcagcccagaaaaatccctttagggctgagaccttgttgtccggccttattctgtgcagtcggtgtggtgctaggtattccgggtgtcacggacactacaagtgctactctagggcgaaggggaacccaagatatgtgaaagatccaaactgcaagaatgataactggatcatctctgaactggatagtctgactatctcttccatacgcgaactcctggataacaatgacctgctcgacgcagctatcgagaatgccagaccttctctggaggacagcgctaacgaaatagagataacaacccatctcaaagagattgaagcccagattaaccgattgctggacttgtaccagattgggagcatcccgactgagacactttcaagccgcattcaaacacttgatcaggaaaagacagccctcaccactttgctcgagaacaaggaggactcattcgaagagcggaagcaggcctttctggagaacatccagaatttcagggaccacttcgacgatagcgatctcgatacccagaggcttctgatccggagcattatcgaatccatcagtgtggatggcagaaatattagtatccagtggcgcatt

SEQ ID NO: 1428 - DNA, 1629 bp, unidentified
  source 1..1629: mol_type = unassigned DNA
atgacaactgtgtcactgtatgcccgagtctctagccggcagcaggctcaggagaatactatcgaaagccagattgtggaactcgagaggagaatcgggtccgatgggcatgaactgctggatgaacataagtttgtggacaatggctattcaggctcaaatcttgagagacctggattggaaaacctcagggatagggttgcagagggcaagatagataagatctacattcacagtcccgaccgattgagtcgaaagttttcataccagatgattttgctggaggaattcaagaaggcaggatccgagatcgtgtttttgaatcacaagttcgacgataatccggactcccatctgtttcttcaaatccaaggcgccattgcggaatatgagagagcaaaaataatggaaagaaaccgccggggaaagctccacgctgccaaggcggggtgtatcagcgtcatgggtcgcgccccatacggataccgctacatcgccaaacatgttggtgagggcagcgcccagtttgaagtcgatgaagaggaagctaacattgtccgaaaaatcttttctcgagtgggacaggaaagagctagtattggggaagtggtgcatgaactgaataagatccctgtgataacccggaccggaaaacggtattggaagagaagtacgatttggaacatgctgaagaacccagcgtacatcggtcaggccgcctacggcaagactaggacatgcagcaaaccacaggtaaagaagtccaagaaggggacctgtggcaaactgaagtccggccggttcaactccgacaaagaaaattggacgtatatccccgtccctaagatcattaatgagcacctctttgattcagttcaggcacaactgaccgagaaccgccagcgagcacgggttagacagcgaagggagacatatctgctgcaagggcttatggtatgccagcgctgccaatacacatattgtggcaccaaccacgtacacaagaaaagcacatactactactataggtgttctggcaccaatagctctaagtttaatgggaacaagatctgcgataacaagagtatcagaacggacattttggacggtgttatttgggaggaggtgaaaagtattctcaaagagcccgacaggatagctaatgaatatcagcgcaggctcagcgaaaacaagaaaccccttcacaatcagactcgggagaaacaggagtctaaactgcggctgtctatcaaaaagttcatagacagctatgccaaaggattcatctcacaagaggagttcgagcctcggatcactacaatgaaacagcatctcaaagagattgaagaggagaaggagcgcaccctggatcaaaaaaaactgcagcaggaactgagtctcgtgactgactccctcaaaaacttcagctcctccgtggagtccaagcttgaccaggtggactggcagacaaagcagaacattatacgcatgttgatacatcagatcgagatcaaccacaaccacctgtacatcgtcttcagaattaaaagcctcgccaacttcgatcagaattcacacaataggattatgcaatgctgcacctcttctcaatactgttggcttgctggt

SEQ ID NO: 1429 - DNA, 1314 bp, unidentified
  source 1..1314: mol_type = unassigned DNA
atgagaatcggcatctacgcacgggtgtctaccaaggaccagcagagcacccctatgcaaatcgcaaatcttaaggagtatgctagattgagggagtgggacgttgtgcgcgtgtatgcggagaaagaaagtggcgcatctgatcgccggcccaaacactccgagctgatgcgcgaagcaagacagcgcaaatttgacgctgtcctcgtgtggaaactggaccgctggggcagggatttgcggaatatagtgaactccctgcatgagcttcagcagctcggcgtgagttttatctcttttaaagagagcattgatatgacgacatcacatgggcgggccatggcttcaatgatcgcggtgttcgccgcctttgagagagagcaactgactgagcgggttaaggccggcgtggccgaagcaaaacgcaaaggcatccagatcgggaggccaacaaaaatcgacgagaagatagtcaagaaagcccacaagctgcatgagagcggatatacatacgctaagattatggaggagcttaaaattgggaggggtaccgtgtacaagattctgggaaactcatctgccaaaaaaggccggcccgtaagattcgaagcgcaaaaatattttgcttcctccttcaaaaacatcctgagcaaccttattcagaaaaagattaacttggtccaggaaataccccgggtattcgaagagaaatacctcgacaacaggtacagaaatagcctcatagcaaaggataagccgaagaagaagaggaccattaagaaggagaatacagtcatcgacgacaagatagttacaattaagctggtactcagggatatccgccctcagatttggcgagaaattaaggctaaggcatctactaccttgcacgaactgcactactatatccaggccagcttgggatgggaagcctttcacctgcataagttttacacctatgatgaggacgaagacataactctgatgcagctcattcacagaaataataaggagttcctctacgagtacgacttcggagataactggcagattgatatcaaaatcgggttctccaaggaacagaaacgactgttgaaaccagtttgcactgccggagctagggccgctccccctgaagattgcgggggtatctacggttattaccaaatcctgcgaacgatgagacaacgaaagactaaaagttataaagggcaattgacctgtggtgtcaagttcgaaccaaataagttcgataagcgaaaggtgaacaaggacctgcaggaatgggtgaagagtcttaaagagtcagagcag

SEQ ID NO: 1430 - DNA, 1455 bp, unidentified
  source 1..1455: mol_type = unassigned DNA
atgacaaagaaggtggcaatctacaccagggtctctactaccaatcaggcggaagaagggttctctatcgatgagcagatcgacaggctgaccaagtacgccgaggccatgggctggcaggtgagcgatacctacactgacgctgggttctcaggagcaaaacttgaacggcctgccatgcagaggctcattaacgacatcgaaaataaggcgttcgatactgtgcttgtgtataaactcgacagactttctcgctcagtacgggatacgctctatctggtgaaggacgtctttacgaagaacaagatcgatttcatcagcctgaatgaaagtattgacacaagttccgctatgggatctctgtttttgacgatcctgagcgcaatcaacgaattcgagagggaaaatattaaagaacgaatgacaatgggcaaactgggccgcgcaaaaagtgggaaaagtatgatgtgggcaaaaacggcctttggctactatcacaataaggatacaggtattctcgagatcgtgccactccaagctactatcgtggagcagatttttacagattacttgtccggtgtatctctgaccaagctgcgcgataagctgaacgaggccggacatatcggaaaagacataccttggagttatcgcaccttgcgacagactctcgataatcccgtctactgcggatacattaagtttaaggacagccttttcgagggcatgcacaagcctatcataccttatgaaacttatctgaaagtacagaaggagctcgaaaaacgacagcagcagacatatgagagaaacaataatccacggcccttccaagctaagtatatgctttctggcatggcccggtgtggctattgtggtgctcccctgaaaattgtgctggggcataaacggaaagatggctcaaggactatgaaataccactgcgccaatagattcccaagaaaaaccaagggtattactgtttacaacgataacaagaagtgcgactccgggaactacgacctttccaatttggaaaataccgtgatagataacctgatcgggtttcaggagaacaatgatagcctgctgaaaatcataaacggcaacaatcagcccatactggacacctccagcttcaaaaagcagatttcacagatagacaagaagattcagaaaaactcagacttgtacctgaatgactttatcacaatggatgagctcaaagatagaacagactcccttcaagcggagaagaaacttttgaaggccaagatctccgagaataagtttaacgacagcacagatgtcttcgagctcgttaaaacccaactgggatccattccgattaacgagctttcttacgacaataagaagaagattgtgaacaacctggtcagcaaagttgacgtgaccgccgataacgttgacatcatcttcaagtttcaacttgct

SEQ ID NO: 1431 - DNA, 1560 bp, unidentified
  source 1..1560: mol_type = unassigned DNA
atgggcattactaaactgcaagtgagagcactggttggagccagagtgagccatgtgcagggagaagaaaaaacgagtcatctcacacagcggaccaagggcgaatcctacgcggagagccagggctggacagtggtgggagggtttgaagacctcgatgtttctgcaattaaactgtccccttgggacagacctgatctgaaacagtggcttgatgaaaaggccgatgattgggatgccctcatcttttcaaagaccgaccgcgtgtttagatccgccaacgactgcgtaaagctcgcggagtggtgtaaagaccatcgcaagattcttgtgctggttgatgatggcatcaagcttgattatttcaatccggaggatagtaaggacgctttcgctggtgccatgagtaaggtattcttgatcctcgcatccgtatttgctgagatcgaggggcaacgctttgtgcaacgagcaagggaccgcgtggcttatctgaggccaaccgaccgctggggatacgggaaccctccatacggctttgtggtggtcgaccatcctactggtgtcgggaaagcacttggccacgatgagggggatcaggccgtcttgcacagaattgctgacgaggtactgtctggaaattcactggtctctatatgtgtcaagttgaatgacgagggcgtgctgtcacccagtgacaggacacgggttagggcgaagaaagaacccgagggttctaagtggcggccgcttactatgaaacgattgctgaccagcccttctacccagggaatcaagatggcaaaagaacgacccgtactggatgctcagggggagccagttcgggtcggtccagagagcttcgacgcagagacatggaagcaattgggtatagaacttgctgaccgggccactgaaccctctaaaagacgacattcaaccaaccccctcttgggcgtggctaagtgcgctatatgtggcttgaatatgaggcagcacggaaagaccacgaagtacgggtcatatagatactataattgcatcggacaccccattgcttgcccaaaagttagcatcgtcgcggagacggccgaggacgccgtctacagtattttcctgaactcccacagcggcaggagagtgaaagagagggtgtggcaggccgggagtgatcacagcgccgaacttgatcagactttgcgcaccatcgagagcctccgagaggaccgagcggcagggctgttcaacgaccccgaagacgctaagatgtatcaacagcagatggccgctttgctctccaagcgcacagccctgtccgatgcccctatcatcaaagccggctgggtcgaaatggagactgaccggacatacggtgaagtgtgggagagctcaaccgaagaggaaaagcggaaaatgctcgtggacgcaggggttgtcctgtgggtgaccaaccggaatgactattacgttggtgatctggataagctccttggagagggcgacggcggcgaagagttcctggcatccacagtgctggccaaagccggaattacttctagg

SEQ ID NO: 1432 - DNA, 1422 bp, unidentified
  source 1..1422: mol_type = unassigned DNA; note = Bacteriophage uvig_323824 from the Index of /pub/databases/metagenomics/genome_sets/gut_phage_database (ebi.ac.uk)
atgaaagttggcatctattctagagtgtccacacaggagcaggctcgcgagggttattcaatcggcgaacaagtcgagcgccttaagaattattgcgccgctaagggttggatcctctataagacatatacagatgcggggtttagcggtgccaataccgatcgccctggcatgcagcagcttatatctgatgtggctgacgggaaaattgatatggtactcgtctataagctcgaccggttgtcacggtctcagaaggacactcttttcctgattgaggacgtgttcatcaagaataacgtcaatttcgcgtccataacagaaaacttcgacacatctacaccctttggaagggcaatgattggaattctgagcgtgttcgcacaactcgagcgagaacaatttcgcgaacgaagcatcatgggaaaagatgcacgagcgaaggaaggactgcaccatggagggggcgccccaactgggtacgattacattgatgggcaacttattattaacaaggaggaggccgagttgatcaaagaagcctaccggttgttcctggaggacgacatgaccatgatgggcatcgctgctaaactgtccgtattttccgagaagttcaaatacgatcacagaataagaaagatgctgactaaccccctgtatgccggctggacccattgcagggacgaattgtacaagggacagcacgaggcaattatctctcagaaggtgttcgataaagttcagaccaaactgaagatacgcgccgagaacaatccgcattatcggaacgcttttaatagaacgagcttgcttgccgggatactgtggtgtaagaaatgtggcgctaggtatttcaagagagtcaggcggtgcgagaaaggcagcaaggtctactactacaataagtaccagtgctacagcaggtccagctacaagaacatggttagggataaaagttgtaaaaataagatctggaccatggaagtattggacaaagcggttattggtgaaatcaaagccctcgtggcaaatccagcagaagtggacaacataatcaaactgaaccagagtaataacaacataacggagaagaaggaattttacaagaaacggatcaaggagattgagaaacagatgaacaagctgaccgatctctattccattgatgggattgacatcgactttgtcgccaagaagatcaccgccctgaataccgataaaaaacgcattgagagtgaaatgaacgctatcaatgaacacaaacctctgatctcagcagaggacgccaagaaacgattgtctggaatctcaaacattctggacaatggcgagttcactgaaaaagtgaaggtgattactagtctcatcaatagaatcgaggtggacgacgatgacatctacatctattggaactttgtg

SEQ ID NO: 1433 - DNA, 1551 bp, unidentified
  source 1..1551: mol_type = unassigned DNA; note = Bacteriophage uvig_314864 from the Index of /pub/databases/metagenomics/genome_sets/gut_phage_database (ebi.ac.uk)
atgaccagaaaggtcgctatctatctgagaatgagtttggatatggatgggaagggggctgggatcgagcgacaacgagaggactgccgcactctggcggccaataggggctgggaggtggtggacgagtacgtcgacaattccataagtgctagcaagagtaatgtccggcggcccgcttatgacaggatggaggccgactacgaagccggccgcttcgataccatcgtctgttggcactttgatcgactgacaagacagcctatgcagatggagcagtggttgaaccgagctgaacagggcaacctccaggtcgtgacgtgtactggggactacaacttgaccgatcataccggaaggctcatggtacgcgtactggcagcagtggccaggaatgagatagagaacaagagtgcccgccaaaagcgggcgactatccagaaggcacataaaggcggtccatctgcaggtatacccccgtacggctatgatgacgaatacaacgtcatcgaggatagagccgagaccgtgaggggaatttttaaggcgattcaggccggcgtttctatggcagacatcgtgcgagccctgaacggtgaggccggacgcgaccacgaggtgccgtggctcaagccttgcccttcccccggggtggtgagatggcagagagataacgcaaaaagagccgaacggggccttgagcctaaagctaagctcaagaaaacaaggtggacccaccacatggtcctccggatcgccattaacccctcctacgctgcttatcgcatgcatatgccccaagatattcgggacaagccagagcaccgaggagctgggtcagaaaccgctccaggaaagagagcgtgtatagttagggacgatgatggggaacctgtgcagggacaatgggaaccaattgtcgataaggacctgtggtggtctgtctctgagatcctctgtgaccccaagagagataaaaggcggcacaatagaagcggcagggccggtcttggcagcggcacatacatctgcggcgaatgcggtcattatatgactacgcttgggcagtcctataggtgtcggcaatgcggaattacacggcgctcagccaaaattgatcaactcgtgtgccgcgtaatcgaacgaaggctttcccgcgaggacgcagttgaggcgctgacggcacggtctaaaccaactgaagaatcaaaagccatagaggaacagatccgcgaccaggaagccaagattaaaagagctgaggcagactacgacgacggagttattactggccgggatctgaagcgcaatagagacaaggcaacagcagaaatcgagaatctccgacagcagcaggtggctaccttgccagaggccactcagtccgtactggtgggaatgagcgaccccgccgagggcttcaagaaatcaagcatggtgaccaaaaggagcatcatcgaagccctgctggaagttaaagtgtataaagctgttcgcgggcggaaacagttcgatcctggtacagtggatattgtgtggaagacagacgcc

SEQ ID NO: 1434 - DNA, 1596 bp, unidentified
  source 1..1596: mol_type = unassigned DNA; note = Bacteriophage uvig_31244 from the Index of /pub/databases/metagenomics/genome_sets/gut_phage_database (ebi.ac.uk)
atgatcgctactaagcccacccaggaaaagaccgtgaaaacagtgtactgcctttacagggtgtcaaccaaagggcaagtggacaaaaacgatattccaatgcagaagcagagctgccgggagttcgcagagcaccagccggggtgggtaatcaagaaagagttccaggagaagggagtgtcagggtttaaggtctccgcaaacgacagagacgcagttcaggaacttaagacagccgccgaaaacaaggagttcgatattctgctcgtgttcatgtttgacaggattggacgcatagataatgaaacaccttttgtcgtagaatggttcatccagcatggtatcgaagtctggtccgtgaacgagggtgagcaacggatggattctcatgtggacaaactcatgaattatatccggttctggcaggctaacggtgagtcccaaaaaaccagcatgagggtcaaaacgcggcttcaccagctcgtggaggacggaatctacacaggcgggtgcgcaccattcggatatcgcctggtgaagagtggcgtcgttaacaagcggggaaaagaactgcttacattggagatcgaccctatcgagaaggagatggtgaagaccatctttgagaagacggtcaaggacggctacggatcttatgtaatggctcaatatgtaaacgacaggaagatgttgacccacaatggggctaagtttcaaagcaataccattaagagaatactccagaacccaatctactgtggttactataatcgaggcggtgttaccagcaagagagtgaaagagttgcaaatcattgacgatgccgtgtttgatgaagctcagaagatcctcgaacagagaaagtacacaaacgaggaaaaaacacagctgtctcgcaccgcaaaaagttctaccatgcttggcggcaatatctactgtgcccattgtggcaaaaagctgtgcgctaattccttcgttgacaggtacacgactaaggacggaactactcacgatggcggcagacggttccgatatctgtgttccgggaaagcaatgaaacgcaacgaatgcgatggccagagcgtgtacagtgcggcgaaagtcgacgaaatagttctggacgccttgcacaagtgttttgataaaatcaaagccactcccaaagatgccgccatcgaaaaaaagtacaggacgcagatttcccagataaagaccgaaatcaaacgactgaataaggaaactgagactctgaagcgcaagcttggggagctgaccgaggagattgcgaatagcttgctgggagattcaaagttcactcctgatgtgctgtctatggccattgagactacaaaaacaaagatagccgacaatgtccagcgaattgccgaaaagcagaatcagttgaacgacaaagagacagatatgaacaagattgactattattacgaggaatttgttagttgggctgatgagtttgataacgcacccgctgaaagacaacgcatgataatttgcaaactcttcaaagagatcctcgtgggcagggggtattcagtccaaattctgatggacagctcttatgagcagtttctgatt

SEQ ID NO: 1435 - DNA, 1524 bp, unidentified
  source 1..1524: mol_type = unassigned DNA; note = Bacteriophage uvig_328850 from the Index of /pub/databases/metagenomics/genome_sets/gut_phage_database (ebi.ac.uk)
atgatttgtgctatgtatctcagaaagtcaagggcagacctcacagccgaagctcgcggcgagggagaaactcttgcaagacaccgggagactctgatgagggtcgctgttcaacaaaatctgatcgtgaccgacgtgtacgccgaggtcgtctctggcgacacaattgccgagcgccctgagatgcagcgcctgcttcgagctatcgagcgcggcgattacgacgctgtgctgtgtatggatatcgataggctgggcagaggtgacggcggggaccagagtattatcttgaaggccctcaagtatagcggcactatcgtgattaccccatataagaactatgatactaggcgggagatggacgaggagttttttgaatactctcaattcctggcacgaggagaatacaaaagaatcaagaggaggatgtgggcaggtagggtcgccgctgccaaagaggggaaatggctgtctcccaaagcaccttttggatatcggcgcgtgagactggaacatacaaaggggtggacccttgtgccagatcctgccgaagctgacgcggtccgatccatgttcgaatggtacggatctggcgaggtggggaagaacattattgccaataggataaacgcaatgggattccgcaccctgtctggtgtcaactttactagctccaccattgctaacatcttgaacaatccagtctatctcggcaaaatacgctggtgtaatagaagaaagcgggtggacatggtcaacggaatggaagttgtgacccgaccgcgctcagacgagtgcatgattatcgacggacttcaccccgccctcatcgataatgatgcatgggacgcagtacaagcgcgacttgcaactcaccaggacagccatgtgaaaaagtccgccaacattgttaatccgcttgctagcattatggtgtgcggtatatgcgggaaaagtatgctgttcacacccgagtacacccggaatgatatcgttgccacctacagatgtagaactgctgggtgccccacctccgggattaacgtacagtgcgtttacgatgcccttctctacacgctgaagtcatggtcagcctacgtgaaggaggatgaacctagcgcaagcaaaagtccaaaaaatcagtccgccatcgtggccgcaaccgcccagctggcgcagctgaacaagcagctgacaaggttgcaggatctcctcgaaacaggcgtctacagtgctgagacgtatctggcccgcagcaaagttctgaatgatagaatcaatgacactatttcagagatcgaccgacttaaacaacttcaggctacagatgaacgggcggcgataatcaggctgaagcccaaaatcgatcatgtgcttgacgtatgggacatatctacggccgaggatcagaacacattgttgcgacaggtgctccggaaggtagtgtatcacaagacccaccggtgtttccggaatgacaacccagccgattttttgtccctggactttttccctgtgctcgaa

SEQ ID NO: 1436 - DNA, 1518 bp, unidentified
  source 1..1518: mol_type = unassigned DNA; note = Bacteriophage uvig_323858 from the Index of /pub/databases/metagenomics/genome_sets/gut_phage_database (ebi.ac.uk)
atgccgaagaaagagacaacggcccctgtcaaggctgttctttacgtgaggtattcctccgatagacagcgagaagagtctattgagggtcagattagagtgtgtgaggattatgccagacgcaacaatatggtgatcgtacacacttacgctgatcgggccatgaccgggcggtcagatcaacgaccagaatttcagatgatgatccaggctgctgccactcaggcctttgacgttgtactggtgtacaaactgaataggttcgcgcgcaatagatatgattccgccaagtacaaacataaacttaagaagtacggagtgcacgtggtaagcgcgatggaaaacattgccgatgatccctccggtatactcttggagtctgtgatcgagggcatggccgagtactattccgcagaactcgcagaaaatgtgatgcggggcatgaccgaaaatgccctggaatgcaagtggagcggtggactggtgcccctgggatacaaattggacgccgaccatcaccttgtcattgacgaggccggggcacctatagtccggaggatctaccagatggttcttgacggacgaacacccactggcatcattaatgagctgaatgccgctaactgcaggacgagtaccgggcgcccatttggaaaaagttccctgaccaccatcttgcggaacgaaaaatacataggcacatatacatggaatcatattcgcaaagaaaacgccattccagcgatcattgaccggaaaaccttcgaggccgtacagaagaccttgcagtatagaaaaaacaatcacgtgaaagtgtgcagcgagaacttcctgctgactgggaaactgttctgcggtcaatgtgggagcaatatggtgggaactagcggcacatcaaagtacaagaatacatattattactatgcatgcaccaagcacctcaagaaggacgggtgtacagctagaaacattcgcgcagataaactcgaggagcttgtgtgcagcgttactacaaggattctctcttccaaggaggctgtgcatgctatagcgcgacaggctgttgaggcacagaaaaagcagaaggaaagcctgacggtccaatcactgaagaaccaggccgctgaaatcaacaagaagctcaagaattgtgtccaggcagtcgaatctggcctgatctctgtgaccatcacaaaccatatcaaggagtacgaaaaaagactgacggagcttaacgaggcaataagtcgggaggaattgttgagcggcaagagtaaactcaccgagaagcacattgagtttttcttctactctatcgcccaaaaaatcaaaactgcagacaagtataagtcaatacttctctcttcacttgtcaggtgtgtcattgtgtgtgacgactacatcgagatccagtataactacaagaatgaactccctcttctgcaaaaccccgtgcgcgttaaaagttccaacctgaatggcatggtcactcaggaaaggtttgagctgccaacccct

SEQ ID NO: 1437 - DNA, 1659 bp, unidentified
  source 1..1659: mol_type = unassigned DNA; note = Bacteriophage uvig_520818 from the Index of /pub/databases/metagenomics/genome_sets/gut_phage_database (ebi.ac.uk)
atggcccggaaaaaagctgagaaagccgagggcaatatttgcgtcgtgtacgcgcgatacagcagtgccgtccagaatgacgccagcatcgaacagcaggtgggcgaatgtagggaatacgctgcagcccacgaccttaaaatcagcgagatctatgcagatagggccatttctggcagatcagaccgcaggcctgaatttcaaaagatgatccggcacgcagaggccgggagattccagatagtcctgacttacaagagtaaccggattgcccgcaacatgctggatgctttgagatacgaggaaagacttgagaaggccggagtgaaggtggtgtattgtaaagagaactttggagacaatgctgcgggccgaatggcactgaggatgatgatgtccctgaacgaattctacagcgagaacatggcagaagatatcacccggggcatgaaggaccgcgccaaacagtgcaaggtgatgggcactatcccgttcgggtacaagcgaggagaggacggttgctatgcaatagatgagagtaaagcagagattgttcgcgaaattttcaggaggtacgccgaaaacgagacacaggcctccattgctgaggatctgaataataggcgcatcttcacgcaacagaaccggccttgggggaagaactctttccataccgtgttgactaatgagcgatatatcggggtttacaagttcgccgatatccggatcgaaaatggcatgccagccattattgacaggtcccttttcgaaattgtccaggagaaggtgggtagacggagagaagttgcaggtagacggagggagtccaccgagtatttgttgaccgggaaggctttttgcgcgaagtgcggagcacctatggtaggggtctctggaacaggcaagggtggatcactctactactactatgtatgtaagaaccgccaggagcaccataattgtaaaaaggagaatgtgaggaaagctgccgctgaacggcagatagccttccgcctgaaaacaattgtcctcaagcccgaggttatggaatggatgatccaaaacgtcctgcgctttcaggaggaagctaagaaacagtccgatcttgctagctaccaaaatagactcgtggaggtgcgacgatctctcgacaatctgatcaaagcaatcgaggcaggggttttttcacaaagtacaaaagctaggttggatgagctggaggcagagcaaagagaactccagggtataatcagtgtggagcgaagcaagctgaacactgtaaccagagagcagattgagtattacctggagtcctttcgcgatggggacgtgaacgaccccgcgtatcagaaaagactttttaaggcctttctggtgaaagtgttccttgacgacgataagtgcaggatcgtgtataattatgcggatggcctcgacactctggaatttcccctgacgctcgacgatatagaatctgctgacgtctccgccgaatgctcttataacgcttgtagcggcgttccccacacagaatcacagagccggttcggcatttttgtatcaggcaagcggcacgccagacagatatttttcccaaaaggagccgaaaacccatgccgcaccgggcgcaagtacggaatcatccattggctttgtctt

SEQ ID NO: 1438 - DNA, 1713 bp, unidentified
  source 1..1713: mol_type = unassigned DNA; note = Bacteriophage uvig_199031 from the Index of /pub/databases/metagenomics/genome_sets/gut_phage_database (ebi.ac.uk)
atgaagactaccgaccaacctcaagtgaaacagtatgtgatctactctcgaaagtcaaagtttaccggcaaaggagaatcaattgagaaccagatcgagctgtgtcgccaatatatcgccatgcatttcggggaggatgaagctgagcatgcgctggtttacgaggatgagggcttttcaggagggaacttggaaagaccacagttcaaacagatgatgaaggatagtcagaagatcgagttcgccgcaatcgtcgtgtataggcttgaccgcatatctagaaatataggcgacttcgccaaacttatcgaggatctcggtgaccggcatattgactttatcagcattcgggagcagttcgatacctcctcacccatgggcagggccatgatgtacatcgccagcgtattcagccagttggaacgggagacaattgccgaacggatacgagacaacatgcacgaactttcaaagaccggcaggtggttgggcggcacaacgccaactgggtatgctagcgagagcctcagttccgtgactgtggacgggaaagttaagaaggcttgcaaactgaagcctatacccgaggagattcagctggtaaaaaccattttttccgtgtttaccgaatccggctccctctccaagactgaccaatacttgctggagcacagatgcgtaacgaaacgggggaagcaattcacaaggttcgccatacgcggtatcctgacaaaccccgtgtacatgatcgctgatgatactgcataccaatatctcaaagaaaacaatgtggacttgttcgctgaacctagcgaatttgacggagaacatggaattatggcctacaataggaccttgcagaggccgggcaaggcaacacagattagaccgatggaggattggatcgtggccgtggggaagcaccccggtattatctctggggcaaattgggtccgggtccagtcaatgctcgacgtgaacaagagtaagagttacaggcggccacgcagtaatgttgctctgctgtcaggcctgctgcggtgtggagaatgtggagattacatgcgccccaaactcacaggtcgaaccaatgcaaacggggaacttatctacacgtacatgtgctctactaaggaacgatcccacggagcagtctgctccatgaagaactgcaatggaaataccctggatgctaaaatcgtggaggaaattaggaaagtggccacagacaagaaggatttcggccagcttctgagtaaaacgaaaaaagttattaacgataacaaggcaagctatgaagctgaactgacattgctggtaaagaaccacgcagaaacagaggccagaatcaaacgcctcgtggagtctctctctgtcgcctctgaaacttccgctaagtatgttatggagcagatagacgagcttcacaggcaaagcgagcaggagcagactagaatcgccgagcttgaaaaactggcgagacagtccaatgccctgagccagaatctctttttctatcgagatatgattgaatcttttgcggacacagtcgatagcaccaccatcgaggagagacgccgcttgcttagaaccattgtgaaaaaggtcgtttgggacggaaagaacgtgtacgtctatctttttgcggaggacggggagctgaatctgcctcctatcggccagttgatgtgtccaagtggtgaggacagcgag

SEQ ID NO: 1439 - DNA, 1620 bp, unidentified
  source 1..1620: mol_type = unassigned DNA; note = Bacteriophage uvig_17362 from the Index of /pub/databases/metagenomics/genome_sets/gut_phage_database (ebi.ac.uk)
atggacaatgttgttatctatgcccggtatagtagcgataagcagacagagcagtcaatcgagggacagctgaggtactgctaccagtatgccgaacagcatgattatcgcgtggtcggcgaatacatagacagggcgattagcggtacaagtgatcggagaccccaattccagcagatgatttccgacgcggagaagaaacagttcaaatatgtgcttgtctggaagttggatcggtttgcaagaaatcgctacgactccgctatctacaaaacaaagcttaaaaaatctggagtgaaagttctctccgtgaccgaggggatcggcgatggggacgagagcattattttggaagcagtcctggaagcgatggcggagacgtatagcagacagctgtcacaaaatgtgaagcgagggatgcatgagtccgccttgaaaggcttgtctaccggcgggaccgttccctacggttataaacttagagatggtaggcttgttattgatgagcctgctgccaaaaatgtcaagtttatctttgagcagtacgcagctggggtaggaaaaaaagcaatcgccgatgcacttaatgcaaaaggttgcaagactgccaccggcagagatttctctgtggtctccctcgcacacattttcaagaacaagaagtacattggaatctaccactacaacgacgaaatagaaattgaaggaggatgccccgctattgtggacaaggcactgtttgacaggtgtaccctgagggcagagcaaaatcgccgcgccccagccaaagggaaaggcgaagtcgattacctcctgaccgggaagctcttctgcggcctgtgtgggtccccgatggtgggcgatagcggtaagggcaagacaggtgctgtctactactactatacttgcgccaacaggaagaagaatggaggagtgaaggcctgtccaaaaaaacgagaggacaaagggtttatcgaatggtacgtggtagagcagactctgaagtatgtattggatcccgaacgcatagctttgatcgcggaacgagtagtggctgcctataacaaggattttagtgccgacgctgttgccgatctggagaggcagctcgctgctgctggccgggagatggacaagctggccgattctcttattaacgccgcttctcctcgactggtcgagtcaatcaacaagaaggcagaacaactggacgcccaaatagccgaactcgagaatgaactctcaaaacttcggatatgcgcggcagcacgcctgacagtggagcaggtcactgcttggcttaaaagtttttgcaacggcgatcctctggacctcgagtttcggcgcagaatcatcgacgttctggtgaacgctgtatatctgtacgacgacaaggtgttcatcttctttaacgtgaagaacggcaaacagataagctatatcgatttctgtgccgacttcgcagacgaccctccagaaggcgagtcaagcactttcaatgcctgtgggtctccaaaggccgcctttcggggatgttttttcctgtgcgtgttcatcgccgaggtgctttttaccgctgccattctctgtaagttcagacagattacggtgtacatctat

SEQ ID NO: 1440 - DNA, 1542 bp, unidentified
  source 1..1542: mol_type = unassigned DNA; note = Bacteriophage uvig_135797 from the Index of /pub/databases/metagenomics/genome_sets/gut_phage_database (ebi.ac.uk)
atgtcaatgaatgccgtcatctatgctaggtattcttcacacaatcagacagagcagtccattgagggccagctgcgagactgttacgattacgccaaacgaaatgacttgacagtgatcggtgagtatattgacagagccatttccggaaagacagatgaccggcccgatttccagagaatgatcgaggatgcccccaaaaggcagtttgaaagggttctggtgtggaaattcgatagatttgcccgcaacatgttcgattcagtgacctataaacatgagctgaaaaagcacggagtaaaggtgatctccgcgatggaaaacattggggagggcgacgaaagtgttctgctggaagccatgctcgaagccagcgcagaatactactctcttgacctcaagaagaagatagcacggggtatgcgggaaagcgcactcaaagggaagttcgtgggaggcgccgtgccctggtggtgctcagtcaacgctgagcataagctgattgtgatagacgagcgcgctgcaatcgttaaagaggcctttgcccggtatgacagcggcgaggggtccaaaagtatcgtcgacgactttgccaagcggggactgagaagcaaccgagggatgcctgtgactctgtcatggttgcttagcattctgaagaacaggaagacaatcggagagtacacctataacgggattgagatccccgggggtctcccggctgtcgtcgacaaacctctgtttgatagggtgcaagagaggatcgcaaggaagcgaaggaccggaggcggagaagccacttccaagaccgagtatctgctgcagggtaagcttttttgcggcctttgtgggtctccaattacagccgagtgcggccagaataggaaaggggtcgtgtacaattactatgcgtgtagtttgaagaaaaagaaacaccagtgtaagaaagctaatgagagaaaggacttcctcgaatggtatgttgtagaacaaactctcgactacgttttgacgccagaccgcaccgattacattgcagaggcaatagtagcggaatacgaacggcagttcgacaagagtggcataaaagctttggaacagaaaatcgccctcactgaaggcgagattcagaaaaccatggatctgtgcattcaagctacaaccgacgcaatgcgcaagcgctttatgaaacgatgcgaggagttggatgctaagaaagcagacatggaaattgatcttagtaagctccgcgttgccgcgtctatcacgtacacgaaggaagaggtaagagcttggcttagacagttttgcgctggagattctttcaatcctgctttcagacggcgcatcatcgatgtcttcatcaacaccgtgtatctgtacgatgataagcttataatctactacaaccttagagacagccgccaagtgtcttatatcgaggctattggcgcatccagcgagatagaaaatctgcggccagtgcctgataacaagaagactgccgtggagtgttccactgcggacaaaaacggcggtgcc

SEQ ID NO: 1441 - DNA, 1710 bp, unidentified
  source 1..1710: mol_type = unassigned DNA; note = Bacteriophage uvig_240645 from the Index of /pub/databases/metagenomics/genome_sets/gut_phage_database (ebi.ac.uk)
atgagaaagaagatcacaaagaaacaggccgaggataaggtggctatctacgttcgcgtgtcaacccattggcagatagacaaggattctttgccaatgcagaagaccgacctggccaattattgcgcctatgtcctgaacattaacaattacgagatctttgaggatgccggctacagcgccaaaaacaccgatagacctgacttccagaagatgatgagcaggattagaagcggcgaattttctcacctcctcgtttggaagattgatcgcatttcccgaaatctcttggacttcatcgatatgtatgaagaattgaaacgcctgggagtggcgttcgtgtctcggaatgagcagtttgataccaccaccgcaatgggcgaggcgatgttgaagatcattctcgtcttcgccgaactcgagagaaacaccactagcgagagagttagtaatgttatgatctccagagcagaaaccgggaagtggaacggaggcagggtgccctacgggtatgtctcacccggtaggggcaaaatgcctgtcgtcgacaagatagaggcagcagtggtaaagcaaatcttcaataactacgaaagctcacggtcaaccacaatggttgcacgagacctgagcgacaaggggatcctgacgaaagccggcaacaagtggagcgctaccactatatctaaaatccttggcaaccgctggtacatcgggagctacatctacaacatgagggacagtactgatgactacaaccttaaggacgaaagtgagtgggtggtggtggataatcaccatgaaccaataattagtagagaccagttcaaccgagtgcaggagaccctgtccatgaacacaaaggataaaacgaggggagcaattacgagacaaaggaaaaacgctcatatcttttcctgtctgttggaatgtggccagtgcgggggtaatatggccgccacaattgatcggcctcgaaaagatggcacacgcccatcaatctatgggtgctattctcggcggtccacgagcaagtgtacaaataagtatgtctctgacgtgacactcctgccctttatgctgagttacatcaaggctatgatgcttatgaaaaaaaaggtgtcctctattgagaatgtgaaaagtgctgagaatttccttatcgccaatgcgggtatgactgacgtgaaagcaatagagggagtcggcgaaacatataagctgctgaaaagcggttctgtggggattgagtacgagccgggaatctcttcttacaaagacgcccccgagactaaggcttccatggaacgattgcgcaccgagtatggtaaaaatgtccgggcgctcaacaggatgaagtcattgtttctttacggagatgatgacatcgataaggcctccttcctgaaggaacaacacgatctcgaggacgagattaaaaggcaggaaactattctggctcggtatgagtccacagacggctccctggacgagatggatgaggacgaattcgaagctaaggctagctatgtaataatggccaaaatgcttacaggagaatttgacccatcatacgacattgtatgtaaaactctggatcctatggtacttcaacggttcttcaaaagtataatcgacaaagtcgggattgttgatggcaaggtgtgctggatccgctttcgcaacggaatcactcacaagtttatgtac

SEQ ID NO: 1442 - DNA, 1566 bp, unidentified
  source 1..1566: mol_type = unassigned DNA; note = Bacteriophage uvig_358290 from the Index of /pub/databases/metagenomics/genome_sets/gut_phage_database (ebi.ac.uk)
atgttgactgatagcatgaatcaaaaatcaaatgccgtcatctacgcacggttttcatctgataaacagcgagaggagtcaatcgacggacagattcgcgaatgtaaggctttcgcacaagcgaatcaactcaacgtcatcgccatctacatcgatcgggctatgagcgcacgcacagaccaccggccagacttcctgagaatgataaaggatagccggtccggagcctttgactatgtgcttgtttaccagttggacagattctcccggtcccgctatgactccgccatctacaaacatgagcttaagaagaacggtgtgaaggtcctgagtgccaaggagaatatcacagatagtcccaccggtataatgctggaggccatgctcgaggggtacgcggaatactatagcgcagagctgtcccagaaggtaaaacgaggaatgacagagaacctccttgagcacaagtggaacgggagcccagtacccttggggtacgctctggacgctaatcacagacttgttatcgacccggatatggccccgcacgttaaggctctgttcgaaatgttcctcgccggcaaaagctacgcagaattggcaaggtatctggatgagaagcacatccgcacagtaaccggcagaaaatacactggacctacagtgcacaatctgatgagtaggcagttgtacacaggcacctacacttggggcgggcaggtgattgaggacttttgtcccgctataatcagcaaaagtgacttctcccgcgcttccctccgcatggccaataggaaaagaactgctaaagacggaatacccatgagtgtccgccgctctcctgagtatgctctgaccggcatcatctattgcggggaatgcggaaggaccatgacgggttattctggcaggggccagaacggtgatcgatactactactataggtgcaactcaaataataatcggtgccgacaaaccgagaaaattaagtgtaaaaatcacccaattaggagaaacagattggaagatctcgtgctgcagaccactgtgaatattctgtctgataaagaagcagtcgctgccattgctgaacaggtttctcgaatcaaacttgagaacccatatgcgtctgagttgtcaagcattaaaagtaggctcgccgaccttaaaaaacgccatgacaacagcgttaaagcaattgaagccggagtcatgtcccaggccattatggacaacgtgtgtaagtatgaggcagagatggacaatctcaaggccaggcaggaaaagatcaagctggccactccctctctgcaaattgatcctgtggccgtggaatacttcctgaagtcactgcttttgaacaagaagcagcatgataagtatagattggatctttttgaagcgtttatccatcgggtggtggtgtatcatgacaaggtagagattcagtacaactatctcccagggcacaagctggagaatcctataacgacgcccctgcctggctgctccaactttaacaaggtggtcgggccattgggcttcgaacctagaaccaaccggctg

SEQ ID NO: 1443 - DNA, 1437 bp, unidentified
  source 1..1437: mol_type = unassigned DNA; note = Bacteriophage uvig_357839 from the Index of /pub/databases/metagenomics/genome_sets/gut_phage_database (ebi.ac.uk)
atgaaagtggctgtgtatatcagagtgagcaccctggaacaggcggaagaggggtatagcattggagagcagaaggataaactcagaaagtactgcgagataaaagattggaccgtggtgaaggagtatgtcgatcccgggcgctccggatccaatctgaataggccttcaatgcagcaacttatcaaagatgcgcccaaaggactttacgatgctgtcctggtatacaagctggatcggctctcaagaagccagaaagacacgctctaccttattgaggacgtatttcaaaaaaacgacattcatttcgtctcactgtctgaaaattttgatactagcactgcattcggaaaagccatgatcgggattctctccgtctttgcccaattggagagagaacagatcaaagagcgaatgactatgggtcgcattgggcgcgttaagagtggtaaaatcatggaattcaataaccctccatttggatacgaagtcgaagacgacaactacaaggttaaaccactccagggtgccatcgttaaaaagatctacgatatgtacttgagcggcaaaagtatctcaaaaattaaggagacgctcaacgaggaaggccacgtgggcaacccctatccttggagtgacaccagagtgaggtacatactgtctaaccctacatacattggaaaaataccatatcgcggcaagctgtacgacggccggttcacccctctcgtgaacgacgcaaccttttctaaagtgcagcaggagctgaaggagcggcaggtgtctactgccaagaggttcaatatgcagctcaggccatttcagagcaagtacatgctttctggcatcttgaagtgcgggtattgtggggctacactgttcgtgaactcctacgtacaacccaatggccatcggaggttgcggtataactgtcccagcacatatgccagcatgcgaaaggctaagaaatatgcagttaaggatccaaattgcccgtttaaactcgtttatgccgagaagctcgagcctgtggtgattaatgaggtcaagaaactggctctgcacccggaaagcattcataaaccaaaagttgctcaccacaagggcataaacgtggacgccgtaaagaaggagttggcctccatcaagaagcaacaacagaagctgatcgacctctatgtgatatccgacgacatcaacatcgaaaatatctctaaaaaatccgcggatcttaaaattcaggaagaggcactgacaaagaagctgtcccaggccgtggagcccgataatggtaagctgatcaatttccagaacctgctcgcaaagagttcagatattgaccagctttcttacgacgaacagaaattcatcgtcaagaagttgatcaagagtatagatgtctacaacaatgaccgaatcaagattcactggaacatt

SEQ ID NO: 1444 - DNA, 1851 bp, unidentified
  source 1..1851: mol_type = unassigned DNA; note = Bacteriophage uvig_263250 from the Index of /pub/databases/metagenomics/genome_sets/gut_phage_database (ebi.ac.uk)
atggccaaaacagcagacactattgcgatctattctagaaaatcccgatacacaggcaaaggggaatcaatcggcaatcagattgacctgtgtcgagaatatatccggacccattatggagacgctgctgccgaacacaccgttgtgtttgaggacgaagggttttcagggggcaacctgaaccgccccgactttaagaaaatgatgacggctgccaaagataggaaattcaaggctatcgtcgtctaccgactggatagaatctctcgcaacatcagcgacttctcctctctcattgaagagctgggaaggctgggtattgattttgtgtctatcagagaaagctttgatacatcctcacctatgggcagagctatgatgtatattgctagcgtattcagccagctcgagcgcgaaacaattgcggagcgaattcgcgacaacatgcacgagctcgcgaagactgggaggtggctcggcggcaccacgccaaccgggtacgccagcgaaagcgtcaaaagtatcacagtcgacgggaagacaaaaaaggcttgcaaacttaaactgcttcctgacgaggcggagatcatctacaaaatattcgacctctatgaacaatacgattcactcactatgaccgaaaccgagctgttgcggcagggcatcaagacgaagaccggacgcagtttcactcggttcagcatcaagagtatacttcagaatcccgtctacctcatagcggacaaagatgcataccagtacttcgtggataacgaggccgagctgtttgcccccgagtctgattttgatggtgttcggggtgtgctggcctataaccgctctgaccaagagaagggccgcgctaccgtctataaccccataagcgaatggattgtaagcgtgggtgagcatccaggaataatctcttctaacaggtggattcgagtgcaagaaagcctcgaaagaaacaagagtaagagttaccacaagagtcgggggaatgaggcccttttgacagggttgttgtggtgttcctgcggttcccgcatgtacccaaaggtgactggcaggaagactgctgacggtcaagtggtctttccgtatatgtgcaagctgaaggagcggagtcggagggagctgtgtaatgtgcggaatgccaacggaaatctcttggatgctgctatctgcgagcaagtgaagcatctggcagaccactcctctgatttcatgaaacagctcgaaaaagccaaaagtgcccacgcaggaaacagatcagagttcgaaaccaagctgtccacgctcagaaaggagcaggccgagactcagagaaagatcaatgcccttattgacagtctggcagacttttcagattccaccgcagccgtccacctcaagaaaaggattgaagagcttaacacccaggatgccacactgtcttcccgcataagggaactggagagcttgaccgacagcggcgtgctgggcgggattgaatttgacgtgatgcgccagcttctgaccgtgttccacgataacatcgacgatatgacagtcacacagaaaagggccgcaattaggactgtggtacggaaagtggtttgggacggtaaggtagcccatgttgttctcttcggatcccccgaggatgagatcgattggacaactttcccagtggacccggaggaggatgacaatgaccctgagggcgggggagacggctccgattcaccttccggcgttagaagcggcgaagattcaatactcaatgcatctgcaggaattggacgaaagcctagactggcaggaggcatcaaggggatccatgggttgcaccagccaaatggatcaaat

SEQ ID NO: 1445 - DNA, 1455 bp, unidentified
  source 1..1455: mol_type = unassigned DNA; note = Bacteriophage uvig_148588 from the Index of /pub/databases/metagenomics/genome_sets/gut_phage_database (ebi.ac.uk)
atgggagagacatacggcgtagtgaacaggaacgccatgagggtcgctctgtatccccgggtgtccaccctcgaacaggctaaggatggctactcaatcaacgaacagactgaacgcatgattaagtattgcgaagccaagggctgggtcgtgcacaaaatctacaccgacgctggatattctggagctgatactgatcggcctgggctgcaatctcttatcaaagacgcagaatctaataaggtaaacgccgtactcgtgtataaacttgaccggctgtctagatcccagaaggacacgttgacgcttatcgaggatgttttcttgcccaacaacgtcgactttatcagcatgaccgaaaatctggatacatccactcctttcggcagagctatgatcgggattctctccgtgttcgcacagttggaaagggagcaaatcaaagagcggatggaagtgggcaaaataggtagggcgaaggaagggaaatggtgcggaagccgatacgtcccaataggctacagagttgagaatgatgagttggtggtgcacgagtacgaagcaatgcagattagggaaatgttcagactgtttaatatgagaatctcacagaggcgggttgccgagatgctgcagagcaagggctatcgaaccacatacgatgggaattggaatcgccacaacatcagaccactgctcgagaataagcattatattggtatggtatcatacaaaggcgaatggtatgaggggattcataaacccatcatagataaggagacatttgagaagacccaagccatcctggcagagcgagatgaggatgccaattcaagaatctctaggatcaacgcaccactcgccggaatgattcggtgcggtcactgtgggaacaagttttttttccgccgagcaaagacaaagaattccgccaaactgtattgcaactgttacaaacgcagttgtagggctggtaagtggaaggacatcccgaaggaggaacggtgcaaaaacaagatatggaaagccgaggaactcgaaaaagaggttttcgatgaggtgcgcaagcttgccctccaccctgagtcttttgatattggaagtactgaaagcgacgagaacgcgatgaagattaaagttatttccaaacgcatcgaagagattgacagccagctggacaaacttatagacctttacaccctggggactctggacatcaacgtgattaagagtagaaccgatgctctgttggcggagaaggaaaaattggaggtcaatatgcgcagcttggagaataaggaaaaaatgtccaaggaagaggctgtggagatcgccagtagcctctgtgacgtgatcgattcaggcgacattgacgagattaaagccctggtgcaggaattgataaaggagattgtcgtcgacgaggaggacctgcatgtgtactggaagttcgca

SEQ ID NO: 1446 - DNA, 1569 bp, unidentified
  source 1..1569: mol_type = unassigned DNA; note = Bacteriophage uvig_171237 from the Index of /pub/databases/metagenomics/genome_sets/gut_phage_database (ebi.ac.uk)
atgcgcgagttcaagcaagaagaattgctgccggccgttgcttactacaggtacagtcctggaggcggccagactgaacaatccattgaaggtcaacgccgggactgcatggcgtatgccaagagtcacgggtacgtaatcgtcaaagagtacattgaccgacatttgacaggcagaaacgacaagcgacccgcattccagatgatgatgcaggatgcccagctccacagattcactactttgattgcctggaagaacgaccggatttcacgaaacaggcgggatgcactgaactataaggatcagctgaaaaagtgtggagttcagatatgctacgccgagatggacatacccaaaggacccgaaggcattttgatggagtccttgatggatggtctcgctgaatattattcagcagagctgtctcaaaaaattaggcgcggaatgaccgagagcgcctataagtgtcacgccctcggcagctatcccccattcggtcttatggtacgggaaaaaaaattcgtcccagaccctcagactgccccttacgtgagatggatctacgagcaatacgcccagggcacacagattaagaccatctgtgatgccctcaatgccaagggactccgcacgaggagagggggcgagttcaacaagaacagccttcggcgcattctgagcaacaagaaatatatcggaatctatgaggctaaaggaattcgaacagaaaacgcgattgaacctatcatagacagagacctgtttgatgccgtccaggcgaggataccccttaacaatcaccagggcggaaggaccggggccaagcggatctatcccctctccgggatcgcatattgtgcgatatgcggtgctccactgatcggggaccaagggacagggcgcgccggcagaacctacagctactacgcatgcacgggcaaaaagcataggcggcactgtaataagaaaaatgtgcgccaggaggtcctggatgatgccgtgctgcacacaacactcgattatgttctcgctccatccgtgcttccacagatcgctgctcaggctgcagctgcatccgcctcaaatgacacaaccagagctgagctgaatgctgcccaggcagccctggatgatactaatagaagaatcaataatatcctgacagcgatggaggatggttcattttccaaagcagctgcatctcgcctgacagtgttggagtctgagcagagcaggctcgaggcacagatcaaggctcttaaacgcaaacggccaaccctttctccgaaccggatcgagttttttcttgaaagtatgtctcaaagaaccggggagctgccccaggactacctcaatcgcattatcaaaatctttgtgtcaagggtggacctgtccaatgaagacctgaagataacttacgccctgaccaaaaagaccgccattcctcatgggaccgcggtgaactctgccaccaacaaggagaggactattgaactgaacccttgcagtactgtggctcttagcggcggcgcagacggaagtaggacgcatgtccgaaaggaaatcagc

SEQ ID NO: 1447 - DNA, 1503 bp, unidentified
  source 1..1503: mol_type = unassigned DNA; note = Bacteriophage ivig_3933 from the Index of /pub/databases/metagenomics/genome_sets/gut_phage_database (ebi.ac.uk)
atgaccgccgtcatctatgctcgatactcaagcgattctcagagagaagctagcatcgaaggacagttgcgggattgcaaagactatgcggagaagaacggaatcacagtggttgggacctacattgatagggcatattctgctaagaccgacgatcggccagatttccagcggatgattaaagactccgccaaaaagatttttgacgttgtgcttgtatggaaacttgacagattcgcaaggaatagattcgacgctgtgaattataagtatcagcttgagaagaactctgtccaccttgtgagtgcaatggaacctattagccaggggccagaggggataatggtggaaagtatgctgatcggtatggctgaatattactccgctgagcttgccctgaaggtggcacgcggcgaacgggagaacgccctgcaatgtaagtacaacgggggagtcgtgccgctcggttttaccattggcaaagaggaccgcttgtaccacatcgatcctgaaactgcgcccatcgtgcaggagatctttactcgatatgcagacggtgaacctgccgagaagatcgccgcctcactcaatgagcgcggcctcaggacccgcactgggaagccatttgtaaagaacagcttcttccaaatttttaggaaccggagatacatcggagagtatagatacaaggatatcgttacgcctggcgggataccagccattgtagatcaggatcttttcgaccgggtccagcagaggttcgagcagaacagaatagctcatggaagacccgccaaggaggatgtttcctacctgctgactactaaacttttttgtgggaagtgcggtactcttatgggcggagagtcaggcacatcccacatgggcaacacatattactactataagtgtggcaatgccaagaggcatggcaaagcacattgcgacctgaaggcgattagaaaggagcccctggagaggttcgtcgtggacaccgccattaaggtgattttttccgatgaaatcattgagaggctcatagacctggtcattgaagcccagcagaaagagaatacccgcttgccagtcctcaaagatcagctgagagatacagaaaaacgactggcaaatctgctcgaggccatcgagcagggaatcctgacgcctaccacgaagcaacgactggacgaattggaagctcgaaaggaagctctgaatacaagcatcttggaggaggagctcaaaaagcccgtcctgacacgagagtggatccgcttctggctcgaaaaatttcgcaaaggtgacgtaggctctatggagcaccaacggcaaatcatagacactttcgttaactcagtgtacgtgttcgacgatcgggtcgtgctgaacttcaattttaccgacgacgctaaaacagtgaccagggaagaagtgttggggagtagtgccgttgataatgcgcccccgaaaaaacgcgcacagctttgctactttgtggccaag

SEQ ID NO: 1448 - DNA, 1359 bp, unidentified
  source 1..1359: mol_type = unassigned DNA; note = Bacteriophage uvig_584312 from the Index of /pub/databases/metagenomics/genome_sets/gut_phage_database (ebi.ac.uk)
atggaatgcgtggcatatcttcgggtgtcaacagagaaacaggcggaggaaggccacgggctggattctcagaagagggacgttgagtgctattgcagaaagaatgatctcattgtctcagaatggtatgtcgatgacgggtatacaggcgcgaacatggatagaccagcactgcagaggctcatattcgcctgcagcaagcgccgggtgaagtgcgtcgtcgccttcaagctggaccgcctgtcccggtctatggtggacggcctctaccttatcgagagagtgttcatccccaacggggtggactttaggtgtgtacatgactccgtgaattatggtaccccaatggagcaggcctacactcagattatggccgcttttgcacagctggacaaaaataccatgatgcttaggatgcggggaggtatgctggaacgggtgaagcgaggatactggtacggagggggcaatctgccctattgctatgactacgacaggaaaaaaggaatcttggttcctattcctgagaaagcacgccgggccaatatggccttggatctgtacatagacggttggagtgataacagaatatgtaatgagcttgggtttcgctcagaacaagttgtaaggagcgtcatcactggcgtggtaaacattggcctcattaagtacaaagggaacatctaccagggccggcacgagccagtgtttgatcgcgatcgcttctaccttgctcagaaccttagaaagaatcggaaaaaggcccgaagctacgtccagcctgacgtcaacatcctgaccggactgtgctactgtggcgaatgtggttgcaagatgcgatatcagaaatggactaagagtcagacccgaatgatttggtgttgttcccatgataaggctctcaactacctgccaaactttaatcccgactgcaaaaataaggcacagagggctgacgagattgagaggcaggtggaagaacaaatgatccgcatttctctggatctcagcaattacatgccgaaggaaaaagagtctagattggatattctgatcagccaactcgaaaaagaaaagaagaagttgcgcaggttgtatgacctctatgccgagggcaacgatatggtgttggatatgatccggaacgaggaagaagaggtgcaaagaatggaggataatgttagagagtgtgaacagtcccagaaccctacacgagagacgatagcttataagaatgttaaaagactggctgacgtgtgggatcaaatcgacaaacccgagaaaaacaagatactgaaaagtatcatcgacaaggtagtcattgtgaacggagacgttgagatccagctgcaacgattc

SEQ ID NO: 1449 - DNA, 1407 bp, unidentified
  source 1..1407: mol_type = unassigned DNA; note = Bacteriophage uvig_80961 from the Index of /pub/databases/metagenomics/genome_sets/gut_phage_database (ebi.ac.uk)
atgcgggcgggcctccagataagggtgtctacccttgaacaggctatcgatggttatagtttggcagcacaggagaaaaagctgaaggagtacgcccagttcaagggctacgagatagtgggaatctaccgagatgatggttactcaggagcttccctgaacagaccgggtttgcgcaggatgatgagcgatattgaggcagacaaactggatatcgtgctgatctacaaacaggaccgcctcacccggtcagtcaaagaccttctcaacctcttggacatcttcgatcgacacaatgttgccctgtattccattaccgaaaacatcgatctttccagcccttttggaagggctgccttgaagatgtctgccacattcagcgagctggagcgggagactataattgaaagatctaaaatgggaaaggatcagaaagcccgccagggcgagcttatggggaacggaaagagccccttcggctataagtatgataagagtatcaaacgatttgagatcgtgccagaggaggcggagatcgtgcgcaacatctactccctgtacatcaaaggcatgtccatacgacagcttaatgcccattgcagagaaacttacaatcatccttacttcgggaaccctatgtcctgcaaagctattctgcatcgaccaatgtacgctggctattttcagtggaagggggagctgattaaaggggtcaactttgagcccattattagctacgaggactaccttaaagtgcaaaatatactgaagcagaacacatttcgccggaatagactgacgtctccatatctgctcacggggttgctgttgtgtggcgaatgtggcaatcgctacgtcggaaagtataagaagagctgtcagacaaactcagaggggcagcggatccaatatggtaataagtattatgggtgcacagccaggattaaaagagacaaaaactatcacccagctaagtgcactaataagctttggagggttgacattctcgacgaaattatcgttaacgccgtaaagaacatcgacttcgaagacattaagaccgtaaaaagtcccgagggactttttgactctttgagggccgagatcgccgatgcaaagaataagattgataagctcctggacctttatatgtcagacctcattaccagagaagcgtacgaacaacggctttacgaatatgagaaaaagatacggcaagcagaaactgtgattgaacaggaacagatcaaactgggcgatagtcctgacatccccacaaattatctgaaagaacaacaacttaggctggatgacatgaccctggatgagaaaagactgtacctcaagatgctgatcaagcacattatactcaaacaggacgagatctacatcgaatggcgaattaag

SEQ ID NO: 1450 - DNA, 1431 bp, unidentified
  source 1..1431: mol_type = unassigned DNA; note = Bacteriophage uvig_10984 from the Index of /pub/databases/metagenomics/genome_sets/gut_phage_database (ebi.ac.uk)
atgagcattatcaaagcagctctgtatgttcgagtgtcaactatggaacaggtaaccgacgggtattctatcggagaacaaaaggacaagctgctgcactacgcatcagcccaggggtatgccgtggtggatacttactccgacgaaggtttctcaggcaaagatctcctgcgaccaaacatggagaggatgctcaacgatattcagcacggcaggattaatacagtgctggtgtacaaactggaccgattgagtaggcatgtgaaagacgtcttggagttggtagaaacgttcgataagtgtaacgttactctgtactcactcagtgagaacttcgacctcgcgtcccccttcgggagagcggcacttaaaatgatggccactttcgccgaactggagcgggagactatcgttgagaggatggaaatgggcaagattgcaagggcgaaggaggggaagtatacatgccctggaacacggtgtccatttggttacagacatgataagaaaaatgatcggctgcttatagaggaaagcgaggccgagataatccgcaaaatcttcgacctgtacgtcaaccacggttacacgtttcgaaaactctacgactattgtagagaagcttatcctgacgttaagtacttcaataaccagatgtgttgcaagcctatcatagagagacccctgtatgcaggctactttcgctatcgcggaggcgaactgactaaaggaaccaattttgaggctatcatttcctatgagctgtttcttcaggcccaggctcaggtcgacaggaatcggacaaaaaggctctccgactctagtccctaccttctgaccgggctcttgatttgcggccggtgtggtaataggtacgtgggaaagatgtacgagagatataccaagaagcctgatgggacccacacaaaacattacagataccgagattacgggtgcgccgcccgccttaagcgggataagaactaccacccagctaagtgcgacaacgatatctatcgcgccgaggagctcgagaagattgtcgaggattacgtcctgaaccttaacatcgacgattacaacaaggcagacttcagccccggcctgatcgataaaatgatgagcgaaatcggcgctatcaaaagatctcaaagcaaacttctggatttgtatctttctggagacatcgacaaggacacctttctcatacgcaaaatcgagtatgatagcaagatcgcagaactccagaaccttatagaaaaagagaccgagtccgtgcagtctgctccgaccaatgccgaagccattaagaagagtattgctgaatatagcatgctgaatcggcggcaaaaacggacacttcttgaatatctgattaagaatattatagtggacggctccagaattacggtgaatttgcgcttgaaaaag

SEQ ID NO: 1451 - DNA, 1332 bp, unidentified
  source 1..1332: mol_type = unassigned DNA; note = Bacteriophage uvig_226352 from the Index of /pub/databases/metagenomics/genome_sets/gut_phage_database (ebi.ac.uk)
atggaaaagaataagcatattaataagatcgctgccatctacatccgcgtttccacagacgcccaagctgaggacgggtatagtatagatgcacaaaaagaacagttggcagcctattgcgtgtcaaagggcatcaaaaactatgagttctacatagatgggggatggtccgggagcaatattaataggcccgagatccagaggttgattaaaaatgcccaggacggcaaaatttcccactgcatcgtctataagcttgacagactctctcgctcccagaaggacacactgtaccttattgaagacgtgtttatcccaaacgaggtgagcttcgttagcctgaacgagacgctcgatacgtctactcctatgggcaaacttatgatcggcatcctgtcagccttcgcccagctggaacgcgaaaatattagattgagaactaggatgggaatgaaggagcgagtcaaggatggctattggatgggaggtggccgcattccatttggatatgactatgataagaatcagggtatcctggtccctaataacgatgcagacaaggtgagaaagatctatagtctctacatcgatggcaaaagtccccaggcaatagctgacattcttgatcttaagtatgacaaactggtgatgcagatcctgaccagaaaatctaactacggcgttattgagtacaacggggaagaatacaaagggcggcacgaggctatcatcagcaaagaaatctacgataaggccataaagtgcatgaatgagcggtcaattaacaaggtcgcgttttcaaagcacttgttgacaggtctggtctactgcggtcattgtggcgccaaaatgcggtaccagaaatggggaaagaacgggtgcaagctcgtgtgttattcccaacaaactagtaagaagtatctcataaaagatgaaaactgtgtgcaggagcgggtatgggctcatgaagtggaggaagcagtactgaattacctgttctccctcaaggaggatgaaaacggagacatcatagacaccagcaacatcgaggaaaccgacataattaaagagcttcaggagaactacgatctgtgtcaaaaaaagatcaaacgattgtacaatctgtacgcggagagcgaaaatgaccttctgttggagacaattcaagagcagagggagaaattgaaggagatcgaagacaaaattaaggaggagcagattaagaggaagaacctggatcagaaaattaataccgctgaactggtgaccaacctccgggagacatggaaatacatgtctattgaagagcagcagactaccctgcgaatgctc

SEQ ID NO: 1452 - DNA, 1338 bp, unidentified
  source 1..1338: mol_type = unassigned DNA; note = Bacteriophage uvig_143228 from the Index of /pub/databases/metagenomics/genome_sets/gut_phage_database (ebi.ac.uk)
atggtaacagccttgtacgctagagtatccacagacgctcaggcggaggaggggtactcaattgatattcagggagaacgcctggaggcttactgcaagctgaaagggtataagtctttcgaacactacgtcgatggcggctatacaggcagcaatcttaaccgacctgctatgacaaggttgattgaagattgtaagtgcggagaagtggagagggtcgtagtgtttaagcttgatcggctctctcggagtcaaaaagacaccttgtatctgattgaagaggtgttcctccctcacaacgtggattttgtgagcatctctgagtctttcgatactgcaactccttttgggagagccatgattggtattctttccgtctttgcgcagctggagcgcgaaaacatcaaggagcgaaccaaagccggaatgctgggtcgagttagggagggatactggcccggcggcggccggaccccttttggatatgactatgatccaaaacttaaaactctggttcccaataaggacgccgagactgtcagaaagatctacgatctgtatatcggcgggtgctcaacctatgaaatccagcggatccttggaatgaagtacgacaggttggctgagcagattctggctcgcaaaactaatacaggggtgattgtgtacaatggtgtggagtaccaaggcaagcacgaacccatcattagtctcgagacgtacgaaagagcaatggcctgtatgaagaaacgctccgccgctccaacgccccggaacaacgtttacctgctgaccggcctgctggtttgcggggtctgtggggcaaagatgcgctaccagggaggtcatatctattgttactcacggcagaagagcaaagcgtatctggtgaaggacccgaactgcgataacgaaagccataatgtgcaggacatcgagaatgccgttctcaccatttttttccaaaacaccagtagattcaacaaggccgaagcatacgacataaaaactaacgtccttgacgagcttgtgcagcaaaagaagacactcgaacaaaaaatcagaagactgtatggactctacggggacggtggcgacgattatttgatagaggcaatcgaggagtccaaacagcagcttgtccgaatcgcagacaaaatcgtgaatgaggaagatcgcgagaaagaggagacaaaaaggcgacgactggtagaaaaggtgggcaacataagggacaggtgggataccatggccccagaagaacagcgggaggtgctccacgaagccataaagcagatcaccatcacgcatgacaagattaatatagacttcaatctc

SEQ ID NO: 1453 - DNA, 1440 bp, unidentified
  source 1..1440: mol_type = unassigned DNA; note = Bacteriophage uvig_579072 from the Index of /pub/databases/metagenomics/genome_sets/gut_phage_database (ebi.ac.uk)
atgaaattcgcgatctacgtgagggtgtcaactctggagcaggccgaggaggggtactcaatcgaggagcaaatcgacaaactgataaagtactgcgaggtcaagaactgggatatcttcaaggtgtataaggatgggggctttagcggtagcacgaccgacagacctggccttagcagcctcattacagattctaaacggaaaaagttccaaggggtcctggtgtacaagctggacagattgtcccggtctcagaaggataccctctacctgatcgaggatattttcaccgccaatgacatcagcttcgtttcactgaacgagaactttgatacaagttcagcattcggaaaggcgatgattggtatattggctgtgtttgcccagctggaacgagaacagattaaggagcggatggtcatgggaaaagtgggcagagcaaaaagtgggaaggctatgtcttggtccaaggttcccttcgggtatatctatgaaaatgatacatacgtggctcaccccatacaggcaccgatagtaaagcagatctttgatgactatatgtcaggcatctcaatcaccaagctcaaagaaaagctgaacgatgagggacatatcggcaaagaaatctcttggtcctacaggaccatacgccaaactctggcaaaccccatctatgctggaatcaatagatataatggagagttgtttgagggtaaccatgaaggcattataactaaagactacttcgagaaggtccagagtgaactcaaagttcgacaggtggccgcatacgaaaaaaacaataatccacgcccatttcaatctaagtatatgctgtccggaattattcgctgtggcttgtgcggggccagcctttccgttggcatgagggctaaacgaaaggatggctctcgccaccggtactaccggtgttatagcaagagtaaaaaaaagaatctcactatgacgaaagacccaaacggttgctcttcccctaactattcaatggacgagctggagaagcatatcctcagtcagatcgaaaaaattaggcttaacccagaactgattgacgtgctgagtagcaacgattctgtggtagatctctcctcctacgacaagaggatcgacgaactggacctttccttggaaaagatagtcaatctttttatcgatgacgccattcccaaggacatcttggaggcccgcatggaaaaaattaaacaggaaaaggactccctggaaaacaagatcgacagtctgaagctcaaaagacctatccttgagcctatagacgctaaagatattctctctaagctcacagacaatatttggaatctgagctatgaggatcagaagagcatcgtgatggagctgattagcaagattctcgtatacccggataaactcgagattcactggaaattcgccattaatcag

SEQ ID NO: 1454 - DNA, 1434 bp, unidentified
  source 1..1434: mol_type = unassigned DNA; note = Bacteriophage uvig_596872 from the Index of /pub/databases/metagenomics/genome_sets/gut_phage_database (ebi.ac.uk)
atgcagaagagatgctttatctacattagggttagcactcagcgacaagcggaggaggggtatagtattcctgaacagaaggaaagactcgagaagtacgctgacgccatggattggaaaatcatgcacacatacattgacggagggtactccggcggtaataccgaccgacctgccctgcaggatatgctccgcgaggtggagcggggcaataccgatatcattctggttgacaaaatcgatcggttcgccagaaatctcgtggacactgtcaacatcctggaaaacgtgttgaatccccacggagtagcgttcgtgagccgagcagaagcctttgattcctctagtcaaattggcaagttctgtttgtatatcctggcaatgttcgctgagatggaacgcacacggataaaggagcgaatggccgacggcaaaaccggcagggcgaaggaagggaaatacaaagggggcggacacatcccaatcgggtacgattatgatcaggaaagcggtgctctcgtccccaacgaatatgaggctgcacaggtgcgcgaaatattcgacttgtttaacagccggacagccatccataccataatggttcagatgaacaagaaaggttatcggactaagtacggggaatggggcgaagggaccatccggtatatggtctcaaatagagtgtacctgggcgagatatcacataagggcgaatggtacgccggactgcataagcctattatcgagagagccgtgtttgaccacgcacagcaggtgctcaaagagcgcgagaaaacttgggaaaggtatcggccaggaaagagataccgctccccgctgggtggtcttatctggtgcgagcgatgcatggctaagtaccagttgcgaaataacggccacaataaggatggagcgatgagggcatactacatgtgttattccagagcaaagagtgacccgaaaatggttaaagaccccaactgtaagaataagacatatagggatcgcgaccttgaaaaaattgtgtacgaggagatcaggaagcttaagaccgacccctcctattatccaacaattactcaatctcgggacaacgcccctcagaggaagatgctggagaaacgagtggctcagatcgacggacagatttctcgccttatggatctgtacatgctgggcacgatagacgtacaagcaattcagagcaaaaccacgcccctgaacaacgagaaaaatgctctccttgcccaaattgaaaatctcaaggatgccgccccaaagatgtctttggagagggtcctggagctggtaaacatgttcgagacagaacttgctgccaacgacagaacttcaggaaaactccatgataccattgctgagatcatcgagcacattggcatagatggggaagaggtccatatccactgggcattt

SEQ ID NO: 1455 - DNA, 1452 bp, unidentified
  source 1..1452: mol_type = unassigned DNA; note = Bacteriophage uvig_381385 from the Index of /pub/databases/metagenomics/genome_sets/gut_phage_database (ebi.ac.uk)
atgaaaaataagcgcaaagagatccttcccgggttgtctgacatggtggatctgtatatccgggtttccaccaccgagcaggcgatggaggggtatagtgtggcagagcaggagaaaagactgcgacaatactccgaggctatgggataccggatctatagagtccacattgacgctggatatagcggtgcttccctggaccgaccagcaataagggaggtgatccgggacgtaaaggccggcatggtgggtaaagtaatcgtgtggaaattggataggctgagccgctcacaaaaagacgttctcattatgctcgaggatgtttttctggccaacgggtgcgacttcatcagcatgatggaaagtttcgacacaactacagcttttggtcgggcaatagttggaatacttgcagctttttcccaacttgaacgcgaaaatattaaggagagaacaaccatgggcaagcaggccagactggcccaagggcactacaatggctgcaggccacccttgggctatgagttcctgcctggatgtaacgatttgcgagtcgttccgtacgaagccgcaattgtgagggaaatattctcactcttcctttctggtaccacagctcatgccatcgccgggaagatggcgcaaaagtaccccaccctcagaacttgggaatataatactgtcagaagaattctgcagaactacacatacgcaggaaaagtgcaggacgtagacgtggtccgggatggcatccatgaatctattatttctgaggccgatttcagtacggcccaaacaatcctgcagcgaaacaaagagcagcggaaacagggacgggtctccttcggactcctcacgggcctgatctattgtggcgattgtggcgctcgaatgcagatccgcagggtgagcaagactcctaacacccgaagaaagtacatctgctattctgtgagtcgcgtggccaaaaacatgattaggtcagaccactgtactaacaggaaacatccatacagccaggaagacctggagggcatcgtcattaatgaaattaagaagctgagctttgactcaaagtacttggacagcttgttgcacgcggaaccggaaaccaagaccgatacttctgatctgtacctggaccgactggccgagattgaaaagcagaccgataagctgctgaatttgtatcagatcggggtggttgagttcccacagatcgaagagcggctctccgatcttaggaaggagcgcgatgccttgaaagcaagcatggagtcccagacacccgctgcccctcctatggagtcaagtcagatacttgattacattgagtcatttcaggaggctctggactccggggataaggaatctgtgcgcaatatcatccagctcctcatcgacaagatagtggtattgaatgaaaacgtcgaaattcactggacgttttgc

SEQ ID NO: 1456 - DNA, 1419 bp, unidentified
  source 1..1419: mol_type = unassigned DNA; note = Bacteriophage uvig_146439 from the Index of /pub/databases/metagenomics/genome_sets/gut_phage_database (ebi.ac.uk)
atgtcccaggacatgattgtggtggggtacgtgagggtgtccacagaacatcagcttgacaattacagtattgatgagcaaaccgagcgcctgaaggcctattgccgagccaagggttggattcttgctaaaatctacactgatgggggctttagtgggggcaacacaaatcggcctgctctccaacaaatgctgcttgacatacgcaacaacaatatcaatagcgtcattgtgtataagctggacagactgagcaggtctcaaaaggacactcttcggctgatagaggatgagttcctcgcgaacgataccgattttatcagtatttctgaaaatttcgatacctcaacgcccttcggtagagccatgattggcatcctgtccgtattcgcacagctcgagaaggaccagattactgaacgcttgagtatgggcagaactgcccgatcaaaaagtggcctgtttcacggcgggggccaggctcccttcgggtatgactacgttgattctagacttcaggttaacagctatcagagcctccaagtgcaagaggtctaccagcggttcctgtccggacaatccatcaattccattcatttgcagatgaaagcactgtatggaggtttttggagcgccgctaaagtcctgaatatgctgaggaacagcatctacataggcaaggtcaagttcgcacagcaggaatataatggtgtgcacgaacccatcatttcagagacagtgtttcaggatgtgcagaggctgttgacagcccccgaacgcgacgcccagaaatccgccgcgcagaaaaccccatatcgcgccggatacctgctctcatcaatgatctactgtgggcagtgtggatctcgatattctgcaaaccatgggtactataggtgctacagtagatccaaaagtaataagaaatacattacagaccctaattgtcagaacgatcattggtcaatcgaggaactggaccagtacgttattcagtccatagaggatctcctttccaatgaaacgcttcttgctgatatcatgaacagctgccaacagaatccagtactcccggtcatcgacagacaagcgttggagaatcgcatcagcgaaattaacaagcagatgagcaacgtgatcgacctttatcagctggtacaccaggacggaaacgatatccctattgaggatatcgtgagccggataaagcagctcagcatcgaaaaatcacggttggaggcagaactcaagaacgaccacaccactcctgacaacaagcgaacatcttttctttctaccctgcaaaattttcaggagcacttccacaacgctccattggagacccagcggctgattgtttctggcctgctcgagtctatcaccgtcgacggaaggaagatatctttgaaatggaggatc

SEQ ID NO: 1457 - DNA, 1389 bp, unidentified
  source 1..1389: mol_type = unassigned DNA; note = Bacteriophage uvig_423324 from the Index of /pub/databases/metagenomics/genome_sets/gut_phage_database (ebi.ac.uk)
atgaaacatgtgggtctgtatatcagggtgagtaccgaagagcagacagaaaactacagcattccagaacaacgcgaaagattggagaatttctgcaaggcaaaagactggttggtggtggacgagtacattgacgggggctatagcggtgctaaactggaccgccctgctgtgcagaaaatgatcacggatgcaggaaccggcacaattgacactgtcttggtatggaagctggaccggttgtccaggtcccaaaaggacatgttgtacctgattgaggatgtattcatcccaaatagcgtggatttcgtttctctgaatgaatcacttgatactggaaccgccttcggaagggccatgataggtatcttgagtgcgtttgcccagcttgaacgggaacaaattaaggagagaaccatgatggggcgaatcgcccgggctaagagtggtctcgtcatgggccccactgccccgtacggatacaggtacgtggacggccagctcattgtggatgaatatgaagctagtatcgtgagagaaatctacgacctgtatctccaagggtacgggatggagaaggtgtctaatatgctgtacgagaaaatgcagttgacatccgcttccggctatgcagccgtgagacggatcctgagcaggccaacctatgctggcctggtgcattattcaggggaagtttaccccggccagcatgagaaaattatagatgtcgatatgtggaagagagtccaggaaaaacgcgagcactctcgaaattatcagcggggaaagcggcagaaacatcttcttacgggcatgatctattgtaagcggtgtggggccaagtacgcgtaccacgtacactctggaaacaattactatgacaggtacatgtgctattcagtctgtcgctctcgaaaagagctgatcaaagatcctcactgcgataacacaaagtatctggccgcagaattggaacagctgattatcgcccagattaaagagctggccctcgacgagagcaagttcaacaaggttatccaaaaaagaatagaggctcccgacccgacccaggcgatgcagaagcagataaaggagattgacaagcagattaataactttatggatctgtaccagtatggcaaagtgccagttgagacgatcaacgagagaatcgaaaagctcacccaagagaaatcagcaatcgagaaaagcattcgcgagcttaacatcaagcccatacctaagcgggaggattacgagcctacactctcccgcgttgactccatatttgaaactgggagcgcagatgaacagcgagctgccgtcaggaacctcattgaccacatcgatattgacggagagaatgtagtgatccactgggtctttgag

SEQ ID NO: 1458 - DNA, 1374 bp, unidentified
  source 1..1374: mol_type = unassigned DNA; note = Bacteriophage uvig_441018 from the Index of /pub/databases/metagenomics/genome_sets/gut_phage_database (ebi.ac.uk)
atgaagaaggctggcatctacattcgcgtgtccaccccagaacaggaaaaaaatggctattcactcaatgctcaggaggagaaactcaagtccttcgccctggccaaggattacgaagtgaaaaaagtgtatagggatggcggattcagcggtgccaaacttgagaggccagctatgctggagatgatagacgatatcgagaacaaccgactggaccttgtgctggtgtacaaacttgatagattgtctcggtcacaaaagaacacaatgtatctcattgaggatgtcttcctgaaaaataacgtcgacttcataagcatgcaggaatcattcgacactaccacctctttcggccgggcaatgattggaattctgagtgtgtttgctcagctggagcgagataatatccgggagagaatgactcttggcaggatggaaagaatcaaaagggggttttacatgggtggcggaaaggtcagcttcgggtatcgctataatcaggagtctaatgtgctcgaaattgacgagggcgaagccaccgcggtcagacgaatgttcgagctgtttttgggaggaaacagcatctacagcctgattaacactttgaagaaagagttcccccattacgagaagaccttttacgacgcatcagtacggcggagacttgccaacgagcactatatcggaaactcccagtatgacgggaaaatctacgtcaatacacacgagcccatcatcgacgacttgacgttcaaccaagcacaactgatgctgtctactaggagccacggcaatgcgtttaagcataagtatcttttttccggcatgattacatgtaaaaagtgcgggaagagttacaacgggtttgagagcgtatgcgggaagtactctaataagtactatcgctgtagttccactacatataagttcaaaaaaaagaatggctgggaatgtagcgggaaacgcttcagatgcgaagatgttgataagtacatacttgataagatcaaaagcattgctacggatcaggtggtgagtaagaagtctaagagtacctcactccctatcaaaaaagaaattgataagctgaaggcccaacaggccaagcttctggatctgtatctggacgaccgcatcgacacaaacgttcttgacgagaaatccaagcatattaaggacttgctcgagaaacttaacaagcagctcaaagagaagcctgccatcgaaaaaaaagtgtttgatgaatccgttgacaagctcgcaaacaatttcgagtccttgtcttttgaacagcagaggattctgatcggtaatgtaatagaaaagatagaagtggttggaggtgatatgaacgtctacttttttgacaccaaa

SEQ ID NO: 1459 - DNA, 1398 bp, unidentified
  source 1..1398: mol_type = unassigned DNA; note = Bacteriophage uvig_426061 from the Index of /pub/databases/metagenomics/genome_sets/gut_phage_database (ebi.ac.uk)
atgaaaaaagctggcctctatatcagagtaagcaccccgcaacaggagaaggagggatattctatcgaggcacagactgagaaactgaatgcatacgctgtcgcaaaagattataaggtgttcaaaacatacaccgacgcagcgttctcaggcgccaaacttgagaggcctgccttgaacgaaatgatcgaagatattgaaaacaataagatagacgtggtgattgtatacaagctggacagactgtcccggtcacaaaaaaacacgatgtatttgatagaggatgtcttcctgaagaataatgttgatttcatctcaatgcaagaatctttcgacacgaccacatcattcggaagagccatgatcggaattctgagcgtatttgcccagttggagcgcgacaacataacagagcggatgagcatgggtaaactcgagagggtgaaacgcggatattatatgggcggcgggaatgttcccttcggttacgaatataaccagattacaggggaactggagattcaggagactcaggcgcttgccgttaagcgaatgttcgagctgtttctttctgggcaggccatcaataagattgtctctatcttgaagaaagagtttcctgtgttcgaagactcctttatggattccacagtgagacgaaggctccagtctcactattactgtggcaaacaaaagtaccagaacaaggtttatgatgccaaacatgaaccaattgtgagtatcaaagagttcaacaaggtgcaacggctgatttctaatcggccacactccaatgccttcaatcactcatacttgttttccggccttattatgtgccacaagtgcgggaagccctataatggatatgaaagtgtgcgcaccgctaatgggaagaagtacaagcataagtactaccgctgctcttgtaggacttacaagcacaaacagaagtatggttgggcttgttccggcaaaagttaccgctgcgactttttggatgccgctatcatgagtgaaatcaagaagcgagctgaaaatagcaagtttgcgctcaaggagaacaacaacgagattgacaacaagcccatcatacgggagatagccaggttgaacgcacagcagtccaagctgttggatctgtacctcagcgataagattagcactatcattctggattcaaagactgacgaactcaaagacaaaatcgagaaacttgagctgcagttgaaccagaccgtctccaaaaaggataaagaagagttcgagaaaagcctggaagaactggtggaccattttgaggaaatggactttagtaccagaaggagcctcatcgagaacatcattgaaaaaatcgaggtcatcgacaatgaaataaccatctacttttacgtgagcatt

SEQ ID NO: 1460 - DNA, 1578 bp, unidentified
  source 1..1578: mol_type = unassigned DNA; note = Bacteriophage uvig_287690 from the Index of /pub/databases/metagenomics/genome_sets/gut_phage_database (ebi.ac.uk)
atggatgaatactgtctctaccttagaaaatcacggatcgatctggaagctgaggctaatggtcagggggacacactggccaggcatcgagctgcactcctgaagttggcacagaaaaggggcttcaatatcactggttgttatgaggaagtgcgctctggagaatccatcgccgctaggccagagatgcagagattgctgaacgacgtggaggatggaagatgggcgggcgtgttggtgatggaagtggagagactggcccgggggaatactaccgaccagggcatagtcgcggacacctttaagtattccgatactaaaattgttacacccaacaagatctacgacccaggggatgaattcgatgaggaatactttgagtttgggttgtttatgtccaggcgagaatataagacgataaaccgcaggctgcagcggggtcggcgagcttccctttccgaaggcaaatatatcgctgggaaggccacgtatggatatgaacgatacaaactttccggcgagaaaggatattcattgaggatcatcccagaacaggcagagattgtccggcaaatctacaactggtatgttaacggcgagctgctgcctgatgggccactgaggcctctcggttcttatacaattgctaagagacttgacgctagagggatcccatcacccaccggaggcaagtggcccccttgcactgtcaaggacatcctcacaaaccctacctacattgggaagctcagatggagctacaggcctaccgtcaaaaggatggtcgacggagagctggtgaaaacaaggccggtggatagaagcgtgcatttgtctgacggtcgacacgagccgattctggatgaggttctctggcatagagcccagttgatgctgaagaatagaagtcacgcccctgtgcccaaaagtactaatattcgcaatcccttggcaggcttgttgatctgtagcaagtgcggccgatctatggagcgacggaagttcaagcacggacgcgacaccgtcgcctgtcccaataaggactgcacttgcaaaagtagcgtgcttgaagaggttgaggccggcatgctggactcactccgaatatggctgtctgattataaggtaaaacttgcacagagccaggagaacatcagccacacaggacctaccgccgagcaagaaattacctctctgcaacggaccctggggacactgcaggcccaaatggagaacctgtacaatctggtggaacaaggagtgtacagtacagatctttttttgcaacgaagccaggctctgacggcacgcatggcagaggtaaaccagcagatagaatcaacacaggcggcattgacagccagtagacgcattgcgcggaataggttcgagatcattccacggatagaacgcgtcctcgccttgtacccaactcttaccgatccccgcgagaaaaacactattctcaaggaagttctcgagaaaatcctgtacacgaagaccaccggctcccgctgggaagccagcgacatgaacctgtacgtgttcccccgggtagagaccgacggcgagcagctc

SEQ ID NO: 1461 - DNA, 1545 bp, unidentified
  source 1..1545: mol_type = unassigned DNA; note = Bacteriophage uvig_61588 from the Index of /pub/databases/metagenomics/genome_sets/gut_phage_database (ebi.ac.uk)
atgccggagatcaggtatatccctgcagtcggcgctcctgagaatgcgaagcttcctgtggccgcttactgccgcgtttcctctgattccgacgaccagctgaacagcctgtccgcacaggtgcgcgagtacacaaaacaaattactgccgagcccgattgggagtttgctggaatctacgccgatgagggcatcaccggcaccagcaccaaaaagcggaatgagttcaagcggctgatgcgcgactgcgaggcaggcaaagtgaaaagagtactggtcaaaagtgtaagtagatttgctaggaacaccactgattgcctgcagtatttgagacagttgtccgccctgggcgttactgtttacttcgagaaagaaggtattgacaccgctaagatgtcaagcgacgtgatcctcactatgaccggagcttttgcgcaggaagaatctaacgccttgtctacgaatatgcggtggagctatcagaaacggatgcaggccggaatgtttgtgggcaacattgcgccctacggctatgattggaagaacggcactctgattatcaatgaagccgaggctagaattgttaggtggattttccattcatacctcgacggtctgaaccgagctgaaatcgccgctcagttgaacgcgatgcagaacgaaccatcaaatcgcccaatctggtataagactacagtgaattacatcttggcaaacgagcgatatatcggggatgccctgctccagaagaagtatacggtacagggcacaattggactggaaaagcgaaaccacggtgaaatgccccagtactacgttgaggacacacatccagccattatctccgaagatacctttaggcgggcccaggcgatgcgaatccgccaaacaacctaccttgggcctcacattggaagccacatcttccaaaaacgcatccggtgtgcagagtgtggaagaaccctcaggaggaaaccaagaaagtcagggcttgtctcatgggtctgtctgtcccacgacgagaacaaggcactgtgcccaacacccccgatctttgagagcaatattgagaaggccgccataatgatgtaccgaattctcagattcgggatcaaagacatcctgcaccccatgctctatcagctggaacaactccaagggcgcaccgtgtctgacagtaccgcaattaacgagttgaatcagagcatagcctctctgtctgagcagcgacatatgcttaatcggcttctgagtaagggctttatggaacccgacacatgtcaggctcaggtgaatgctatcagtcagcagttggccgatctgaatcggagaaggaggtccctgatagaggcacaagtggaagacgacgcaatcgagaatacgcaactcttgatagatattctcgaagatgcccctgaaaatctggtcagcctcgaagacggaggggtcttcgatatgatagtggacaaggtgatcatagacaaagataagaacattactttccgacttataaacggtcttgagcttgggggtgatttcgatggg

SEQ ID NO: 1462 - DNA, 1428 bp, unidentified
  source 1..1428: mol_type = unassigned DNA; note = Bacteriophage ivig_3872 from the Index of /pub/databases/metagenomics/genome_sets/gut_phage_database (ebi.ac.uk)
atgattaaaaagcgggtcggactgtatattagggtgtccaccgaggagcaggcgatggagggctattccatctctggccaaagagagaggctgaaagcattttgcgtcgcccaatcatgggaaacaatcaagttctatgtagacgagggaatctccgggagatccacagaaaggccggctctcaaaaagatgatgaaagatattgaggacggactcatagacgttctgctggtctatcgattggacagactcactcgaagtgtgcgggatctgcatgacattctggattttttggagaaacataattgtcaatttcgctcagctacagaggtgtacgacacaagcaccgcaatggggcgaatgtttatcactatcgtagcggccattgccgagtgggaatctgctaatcttggcgaacgggttagactggggcagatcgaaaaggctcggcagggtgaatggtcagcccccgcaccatacgggtttcgcaagaacgatcagaaaagactggaagtgaaccccgatgagatcgaggccgtcaaattgatggtgcgcaaggttaaagaaggatactctttcagacagctttccatgtacatgcagaataccagctataagccccggagaggttataagtggcatattgcctctctgttggacctgttgcacaatccagtgctttacggcgccatgcaatggaacgatgaagtctacgagggcacccacaagggcatcatgtccaaggaggacttcatgcagttgcagaatattattaagagtaggcagatacagaagaagcgggagactaactataatttcatctaccagacaaaaattgtctgtcctagttgcgggaacaggttgagtagcgagtgctctaggtggaaaaataagaacggaatggaacgctcagccaatcgctataggtgtcagagctgcgctcttgatggccgggagcctgtgagtatttcagagtacaagctcaccctgcagctgatccagcacatgaacgcactcacgtttgacgagaacgaccacgaggagctcgaggcggaaaaggacaacctccagctgatagagaatgagatgaggcgaatagaaagggaaagagagaaataccagcgcgcttgggctagcgatttgatctccgacacggagttcaagaatcgaatggatgatacccggaaaagatattctgacctggaacgccagcttaacgcatcccaggacgaaaccacgttcggtaatgttaacccagaatatatcaagcagttgagcaatgagttcaaccaaaactacgaatacctgactgatgaagaaaaacgcacatttgtgcaacaattcatcgagagcatagagctggtggaagccagcagccctactgcctctgttaagaaagtgtacgatgtgaaactcgtacgatttttc

SEQ ID NO: 1463 - DNA, 1548 bp, unidentified
  source 1..1548: mol_type = unassigned DNA; note = Bacteriophage uvig_541020 from the Index of /pub/databases/metagenomics/genome_sets/gut_phage_database (ebi.ac.uk)
atgcagaaaaacacaactgtggagacaaccactaaagcagtgatctacgcccggtatagctctgaccgacagagggaggaaagcattgaaggccagcttagagtgtgcgaggacttcgcaaagcggaatggcatgaccattctgcacgtctatgcagacagagctctctccggtcgaagtgaccagcgacctgagttccagatgatgattcaggccgccgcaactcaaacttttgacactgttctcgtgtataaacttaaccgcttcgcgcggaacagatacgacagcgcaaagtataagcataagctcaaaaaatacggagttaaggtcgtcagcgcgatggagaacatagctgatgacccatccggaatcttgctggagtctgtaatcgagggtatggcagaatattactcagctgaactggccgagaatgtaatgagggggatgacagaaaacgctctcgaagggaagtggccaggagggatcgtgcccctcgggtataagctggataccgagcatcggcttattatcgatgaacccgctgcaaaaacagtgcggtggatctatcagcagtacctggacgggaagcaacctacgagaattatccgagaacttaacgccgccggctgcttgactgccctgggcaagccgtttaggaagaattccctccgcacaattctgaaaaacgaacggtacattggaacgttcatctggaatggcatcaaaaaacccaacgtgattcctgccataattgattctgctgattggcacaaagttcaagaaatcatgaaagtgaaaaaaaagtgtgtgagcaaggccaaggataacgattactacctgaccggccggctgttttgtggccattgtggagaaaacatggtgggtacgagcggcacttctaagctgcagcgaatctatcgctactacatttgctctggacatcaaaaaaagaaagggtgcaccgcgaaggctgtaagaatggacaagctggaggatattgtctgtaatgccacaacacgcctcctttctaatagagacgccatacgcgccattgcaaagcaggctatcagcgctcaagagacccagggacctagtctggtgcttcaatcactgcagaaccagaaggctgacatttcaagaaaactgcaaaattgcgtgaaagccgttgaagagggccttatctctcagacagtcaccaatcacatacacgattatgaaaagcagctgcagaccctgactgatgcgatacagaaggaggagttgatgaaccagatcccacacctgaccgagaaacatattgagttttttttctggagcatctcccagcagatcaagaaagccgataagtacaagtcaattctcttgtcatccatcgtcaggagtgtcatagtttacgaggacttcatcgagattcagtacaattataagaaggagttgcctatactccaaaatccggtgcgcatcgggggtagtgacatgcccgtaatggtggaacacaggggcatcgagccacttacctccaggcttaggaccttgcgctcccccagt

SEQ ID NO: 1464 - DNA, 1521 bp, unidentified
  source 1..1521: mol_type = unassigned DNA; note = Bacteriophage uvig_396371 from the Index of /pub/databases/metagenomics/genome_sets/gut_phage_database (ebi.ac.uk)
atgtcccgcatagccatctacagcagaaaatccaaagataccgacaccggcgagtccattaagaatcagattcagatgtgtaaggattacttcctgcgcaaagatgccaatcatacattcgaaatttttcaggacgaagggttctccggagggaatactaataggcccgagttcaaacgcatgatgctgttggccaagaatgggcaatttgacattattgcttgctataaggtggatcgaattggaaggaacatcgtcgactttatgaacactttttccgagctcgaaaaaaacaacatcacacttgtcagcgtgacggagggcttcgacccatcaacacctgcaggtcgaatgatgatgaccatgattgccggctttgccgaaatggagcgcatgaatatcgcacagcggataaaagataacatggagagtttggctaaaatgggacggtggagcggcggcacctgccctacagggtacaggtctatcaaaattagcaatagtggcaagtacgctatgtaccttgagctcataccagagtggaaagaaaagctgctggacatctttaagtatgccgcggacggcaagacctgtagctctatcggaaagcttgtatcaatgtccagcaaaagtatcgcaaacatcatcagcaacccagtgtactgtaaaagtgatttgccaagcaaaaagttccttgagtcactgggctatgatgtttatggtgattgcaatggtaatgggtacatagcttacaatagaagacccaaggctaagaacggaaagaagttgttcaactcaaagaacatgtttgttgccgtatctacccatgaggctcctattcactcctctgaatggatcaaagccaatctgaacattaaaagtcgggcccaggaaaaacgacccaggattagtcaatactcttggctcgcacacctggtgaagtgtaagtgcgggagcggcatgtatttgactccgggaagatttcggaaagatggttctaggtactattatttctgttgtagcgcaagaaagtataacaagagttgctccgctaagcggatcaatgccaatcatctcgaagaagatatactggagatactcgaggctgtctccaaaaacaagacgttgctgaaaagttatatctcccctccctctaacaacgagatcaaaagcaagatcatcaagattaagaacgagatcaagaagaataacaagattatggaatcacttgcaagcaaactcgccctgctcgaagactacgcggcgtccgtgatcatcgagaaaatgaattctatttcactgtcaatagagaatcttaacactgagctcctgcagctgcagcgcgaggacctcctcaacaatctggacgaactgaatgaagacgttctttttaattctatccaggaaatgctgacaaattgggacttcctggatatggaggagaaacaagactgcgtgaagaacatcatcaacgaaattcacctgctggataactcaaagttcaaaattaagttcaacctt

SEQ ID NO: 1465 - DNA, 1641 bp, unidentified
  source 1..1641: mol_type = unassigned DNA; note = Bacteriophage uvig_301458 from the Index of /pub/databases/metagenomics/genome_sets/gut_phage_database (ebi.ac.uk)
atgaaagcagtaatctatgccagatacagttccgacagccagagggaagaatcaatcgaagggcaactgcgagagtgcacagagtatgccgaacggaatggcatcaccatcctgaggtcatacattgatagggcgctgtcagctagaaccgctgaccggccggaattccagaatatgattaaagacagcgagcagaagctgtttgacgtcgtgcttatctggaagctggatcggttttctcgcgacagatacgacagcgcgcattataaacggattttgaagaagaatggtgtaaaggtggtgtccgttaaagagaacatatctgacgggcctgaaggcattatactggagtctatgcttgaaggatacgccgagtactactccgcagaactttctgaaaagatccatcggggtcagaaggaaaacgctctcaaggggaggaacaacggaggcggaattcccctggggtatctgctcgacaagaaggaacaaaaactggtgctggatcccgtgactgcgccattggtccgagagatcttccagcgctacgccgatggagagatcgttcgaactattgttgaggatttcaacaggagaggcctgaagactaaaagtgggaaaccattttcccctaattcttttaaccggatcttgaaaaaccgcaaatatatcggcgagtatagataccaggacgttataataccctccggcgtgccagcaattctgagcgacgacgtgttctaccaagttcaggcacgcctcgaaaagaataagcgggcaccggcgacggccaaggccgatgtcgattatctgctcacaactaaactgttttgcggcctgtgcgagcgcatgatgattggggaaagcggaacctcccacaccggagacaagcactattactacaagtgtgctggtgcaaaacggaagctcgggtgtaaaaaaaagagcgtcaagaaagattttatcgaaagagccgccgtgattcttacggtgaacagggtgcttagagacgaggagatctccaggatcgcagattcaatattggccttgcagaatagtgaagatacaactattccagccttgaagaaacagctcgccgataccgagcgaggcatcgagaacatgctgaatgctatccagaagggcgtactgacgagtagcactaaagaacgactcgaagcccttgagaaacagagagataatcttaagatcgccgtgctgcaggctgagctccagaagcccaagtataccaaagagcaaattgtttcttggattggacagttcaagtacggggatgtcaattctagagagtaccaaaagcggataatagacaccttcgtgaattcactctatctcttcgacgaccgattggtcatcacatacaattttaaaggtggaaccgagattatcacactgaaggacgtcgaggccgtatacgggagtgatctcaaagcaatgagccctcccaagcgaaaaacacgcagccacgtgggattctggtccttcttgctgtcaatgcgcgtgtttggcctttatgatttcgctaagtgtcacaggattttgcagtttgtgtgcatcatttgtaggaaaaacgctcacggcaacgctcatgagaaccgcaccacatgccctggtgagggc

SEQ ID NO: 1466 - DNA, 1425 bp, unidentified
  source 1..1425: mol_type = unassigned DNA; note = Bacteriophage uvig_430479 from the Index of /pub/databases/metagenomics/genome_sets/gut_phage_database (ebi.ac.uk)
atgaaagtggccttgtacgtgagagtctccaccctcgagcaggcagaggaggggtacagcatatcagagcagaaggataagcttaagaaatactgcgagatcaaggactggaagatcacacggatctatagtgacccaggattctctggcagcaatctcaatcgcccgtctatgcagcagctgatcaaagatgctggaactgggctgtatgatgccgtgctcgtttacaaacttgataggcttagcaggtcacagaaagacacgctgcatctcattgaggacatcttccagaagaataacattcacttcatcagtttgtctgagaacttcgacacctctaccgcctttggcaaagctatgatcggtatactgtctgtatttgcgcagctggaacgcgagcaaatcaaggaacggatgatgatgggcaaagctgggcgggctaaagcaggcaaaattatggcctggtcaaacattccattcggatacgttaaagataatgacacctataagattgacccactgagagcgaacattgtgaagaagatctactccatgtacttggctggcgatagcatcacacgaatttttaacaggctcaatgaggaagggcatgtgggaaaagacatcaagtggtcctatcgaacagtgaggcagatactcgggaacgcatcctatactggtgtcgttacctaccatggtaagagttatcccggcaagcaccaacctataattgcaaaggatatctttgatgaggtacagagacagcttaaagtacgccaaatcgaggcagaaaaaaaattttatgctcaccccttccaaagcaagtacatgctttctggtctgctcaagtgtggatactgcggcgccacactggtcatcaataagagtcatcggaagaacaagcctcctcgctggaggtataactgccctaatacgctgtccagaaaacacgtgcggacctatgcacacaaggacatcgattgtctctttaagttcatctacagggatgaaatagaggaactggtcataagcgaagttaagaagcttgccctgaacccccagtcaattactgaagattacgaacaacacgatgaggagcagatcgacgtggaggctatcaaaaaggagttggcgtccattaaaagaaagcaagacaagctggtcgatctgtatttgatcgccgacaccctgaacattgatgaactgaataatcgcagcactaaacttaaagaacagcagaaagccctggagacaaaacttcgacccacccagaaggacgacaataagattattgatttccagaaaaatctcgccaaagccaaggacatagaaaacttggactacgacaagcagaagttcatcattaaccagcttgtgtcatccattgatgtgacaaacgaaaatgtgactattaactgggacttt

SEQ ID NO: 1467 - DNA, 1410 bp, unidentified
  source 1..1410: mol_type = unassigned DNA; note = Bacteriophage uvig_425764 from the Index of /pub/databases/metagenomics/genome_sets/gut_phage_database (ebi.ac.uk)
atgaaaggggaaagtgaactcgacaagaaggctgctatctacatcagagtctccacacaggaacaggccactgaaggttatagtatccaagcacaaaccgacaggctgatcaagtacgtggaggcaaaggactttatcctgtataagaaatacatcgacgcgggatatagcgcatctaaactcgagaggcctgcgatgcaggagctcattcaggatgtgcagtccaaaaaggtggatgttgtgattgtctataagctcgaccggttgtccaggtcacagaaagacaccatgtacttgatcgaagatatctttcggccgaatgatgtagagctcatttctatgcaagagagctttgatactagcaccgcctttggctctgccacagtcggaatgctctccgtgtttgctcagcttgaacggaagtctatatctgagcgaatgatcaccggtcgcgtggagcgcgcgaagaaagggttctaccacacaggagggcaggatagacccccagccggctatcagttcaattcagacaatcagctcattatcaatgagtatgaggccgctgcaatcaaggaccttttcagactgtacaacgacgggctgggcaagagtagcataagcgaatatcttaaaaaaaattacccaggcaaaaataagtggcttccttcaagtatcgatcgaatgctgaaaaactccctttatattggcaaagtgaagttctcaggcgttgagtatgacgggatacacgaaccaatcattgacgaggtcacattctacaaaacccaaaaggaaattgccagacggaaacagactaacacgaagagatacaactatgtggccttgcttggaggcctgtgcgaatgcgggatttgtggagccaagatggccaatcggaggtctgtcggccggaaaggtaaagtataccgctactaccgctgttactccaagaaaggatcacccaagcatatgatgaagacagatggctgcagtagtaaggctcagcagcaattcataattgacgaagccgttattaacaacctgaagaacatagacgttgaggcagagttgaaacgaagaagcgctcctcagaccaacacgtctctgatctcctcacaaattgagtccattgataaacagattaacaagctcattgatctgttccaggtggactctatgcccctggatgtgataagtgagaaaatcgacaaactgaacaaggagaagcaaagcatggagaagcttctggagcgcaagaataagctggacaagactgagctgcagcacaggtttgatgtgttgaaatccttcgattgggataacagcagcatcgaaagcaagagggtggtcatcgaaatgcttgttcagaaagtcatcatccatgacaattcaatagagatcattctggtagaa

SEQ ID NO: 1468 - DNA, 1851 bp, unidentified
  source 1..1851: mol_type = unassigned DNA; note = Bacteriophage uvig_128102 from the Index of /pub/databases/metagenomics/genome_sets/gut_phage_database (ebi.ac.uk)
atggacaacgagaagaaagtagcagggctctatattagggtctcaaccgaagatcaggcccgggaggggttttctcttcctgagcaagaaaagcgccttcgagcaatgtgcgagtataaaggctatgagatctacaaactctacaaagacgcaggcatatctgctaaaacaggcaactacagaccggcctttgaggaattgctccaagatatccgcgagaaaaaatgcaataccatcgttgtgctcaagttggatcggcttactcgaagtgtttttgacctcgaaggtattatgcggttcctcgaagaaaataacgcctacctggattgtgcgaacgaggagattaacacaactaatagttctgggaaacttgtagctagaatgttgacctctgtgtcacagaatgagatagagcgcacctctgaaaggacaaagtttggattggttggcgccattaaagaaggccacattcccggaaagaaccctcttggatataaacgagacggtaaaaaactcgtgatcgatccactgactaaagatattgtcaagcgcatctacgacctctactttgaaggcaagagttattccaatatcgctacactcttcaataacgaggaagttctgggcaagacaaactggcgggacacagggatcctgcgaattatttccaacgaaatctataaaggtgattttgtgtcaggcaaaacattcaacaagcctgtgtactatgaaaatgtggtagagcccattgtaagccgggagttgtgggagaattgtcaggtgcagaaaaagaaaaatcagaagagctacatgaggactcagacctacatcttcttgcaaaaactgaaatgcactaagtgcgggaggatccttgccggaggagcctcacacaagctgaagagcgacaagtggtacttctactacaggtgcgaggactgtaaaaacaacattaaggaggaggtcatcgagaatagtgtgaagaccctgcttgccgatatcttggaatatgacaatgtggtgaatgaattcttcctgcccgttctgaagagcaagcttaacgacccaaaagtggagctcgaaaaagagctgaagtccttgaacaataagaaagagaggataaggaaggcttacatcgacagcgtgttcacggaggaggaatacaagcaggaaagcaagacaattgacagacagatagagtttgtcaactccaagcttctggagaactcacaggcagaacagctgaattttactaccgaggacatattgcttaagagagatatggactttatcaataaggtcaagcttcctatcagctattatgcctttaacgaaaattgggatctgctcgaccgcgagactaaagctgacattgtgatgagatacatcgacgacatcgagctggaaatcaagaacaagaaataccatgtcaagcagataaacttccggtccacattctacaacgattatgaagacctgtacaagaaaggatatatcgataagaaacgaccgctgacctatgacttcaatggtgtgtgtgtcgataccaacatccgatattctgagtatctgcccattaaagacgtcatgcagcatctttacagactgaacgagtattacgaagtgaatctgtacaagggcacttattacaaggaaacggagaagctggacatagggcccctgcaacggaatgaagttcctattagagtgttcccactccaaaaggataataatggagataaaaactggttgtccatggggatgctggcgaccaagaataatctgaacgatattaaagttaacatccgcgatgtcttcgagaccattccagataacgtgacgaaggaggatttt

SEQ ID NO: 1469 - DNA, 1575 bp, unidentified
  source 1..1575: mol_type = unassigned DNA; note = Bacteriophage uvig_294201 from the Index of /pub/databases/metagenomics/genome_sets/gut_phage_database (ebi.ac.uk)
atggccaccaaaaaaaagactgccacccaacgggcggatggtgtttacaaccgggcagtgatctatgcacgctatagccccggccctaatcagagggacgaaagcatcgaaggacaggtgagagaatgtaaggagatcgcacagaagcatggattgatggtcatccacgaatacatcgataaacggctttccggtactaatgatgagcgacctgactttcagcggatgttgagggatgccgatagaggtctgtttgatgtggtaataacatggaaaaacgaccgatttgctcggaatagatatgattccgctatctacaaacaacggttgaaacggaacggaatcaaaattatctacgccaaggaacatatccccgagggtccggaagggataattcttgaatcaatgctggaaggcatggcggagtactattcagccaatttgtctcaaaatattaggaggggccagcgcgaaaatgcacttgaggggaaattcattggaggaaccataccactcggctataagctggacgccgaaaagcgatatattctggacccagattctgcttcaatcgtccgcgagattttcgagaggtatgtagccggcgaaagcgtcaccgacatctgcaacgacctgaatgccagagggtatctcacagcacgcaaaaagaagttcaacagaagctccctgcaccgaatcttcactaacgaaaagtacatcggggtgtataagtttgaggacatcgaatgccccggtgccgtccccagaattgtctctgatgagctgtttaaagcggccagcataagggcagctcgcaataagaagtccagacgcactatgcccgaagctcgcgttgagtacatgttgacaggcaaaattttctgcgggcattgtggcgagcctatgggcggctcttgggggacgtccaagcgaggcacaagatacaactactacgtgtgtaacggccacaagaacaagaaaagctcttgtcacaaaaagcctgagcggaaggagaaactcgagaagctggttattaatattgtaattaacaacatcctccggaatcagaatgtcgtgaactatatagtggatagatgcatggtgattcaggagcgagaaatcgacaagagtccagccgagggactcaggagagagcttgctgaaaatgagaaagctcttaagaatattatggcagcaattgaagctgggatctttactgctaccaccaaggatcgcttggtggagctcgaggagaggtgtgccgtgctgaaacagggaattgccgccgcagaaattcaaccgccaaagctgagtcgagagcagctgctgttcatctttgaaaaataccagaataggagtctgaaggaccctgaattcatcagggacgtgatagacacgtttgtgcacgccgtttatgtctacgacgacaagatgataatcacattcaactacagcgagaacaacaccttggagatctcaaaaaaggagatagaggaggctgcgactggagctgccagtccagtgttcgatttctgcggggttaattccaccaaaatcaacaacaattttctcaca

SEQ ID NO: 1470 - DNA, 1638 bp, unidentified
  source 1..1638: mol_type = unassigned DNA; note = Bacteriophage uvig_174822 from the Index of /pub/databases/metagenomics/genome_sets/gut_phage_database (ebi.ac.uk)
atgtcatttttcggcaacaagctgcctgagcgcaacgaaatcgctgtcgtttactgtagggtctcaacagacggccaagccgagcgggggacgatcgaatcccaaattacatatgctaaagattatgcgaagttcaaaggattcgagattaaggacttctactgtgatgacggcgtaactggtatgatgcctcttgcggagcgcccggaaggcaaacggttgactgaagacgccaaagccgggaagttcaatgtggtttacgtctacaagattgacaggctcgggcgctcagcgcgcgagacactcaacgcaatctactctctcaaagagagtggcgtaatactgaggtctctgaccgaaacctttgacctggagactcctatgggccagtttttcatgcagctcctggctaacatagctgatcttgatcggaataactttcttgagagaagcagactgggaaccgaacgcttggtgaaagccggcaagtgggtgggaggcatcgtgccctacggttatgagatcaatgatgcaaaggaacttgttttgaacacccggccctttccggactccgatctctgcgaagccgaagtggtgcgaatgatatttgatatggtggggaagcataacaagagttctgtcgaagtggcccggctgctgaatgcactcggagtaccaacgagctattctaggagcaccggaaagcgaagaaagaaaaccatcggtatttggaggtccaataccgtgctgcgaataatcaggaacactacttacaaagggatccactattacgggaagagatcaggttactattccacccctatcgcccgggaggtcacccccattgtggatgagaaaatttgggaacaggccaacgcagagattgataagaatagaaagagctccttccgagtgccagctagtgaatacatgctggccggccttatcaagtgtggggtctgcggcgcgaactatagcggaacaagaaataaccgagatggggcctattacagatgcagtagcaggatgcgcaagcataaaattgaaaagaataagtgcaatagccgctacgtgaatagcgacctgctggaaagcatcgtctggaacgagcttattgatctgctgggtaacaagaaaacacttagagccgctgttaagaattccttgacagagatggagaaaaagcagcgcaatattgaacccgatatcgagaaagcagagaaggcacttcaagataaggagctcgaaaaggcacggcttatccagctgtatacaaaaggaacgttgtccgaagaagacgtgatagcccctttggatgccctcaaaaacgagctcgagggactgactgagcacctgtcagctttgatgaaggagaaggagaatatagacaaggctcagatcatcgaaaaagaggacattgacctgtatgtggacaaaattagggaattcctgtccgagtgtgacgacccaaagacaaaaaaacggctcatccagactcttgttaagaaaattacagtgatctctccaactgacaggaagaaacccatcgagttcgatattgagtttagacttaaagtaccagctcacaaggtttacagtgacggcgcaaaaaaacgaaccgacaccgattcttctcat

SEQ ID NO: 1471 - DNA, 1434 bp, unidentified
  source 1..1434: mol_type = unassigned DNA; note = Bacteriophage ivig_1533 from the Index of /pub/databases/metagenomics/genome_sets/gut_phage_database (ebi.ac.uk)
atgaaaaccgccatctatgtccgagtgtcaaccaatgagcaggcggaagagggatactcaattgatgagcaaatcgacaagctgaagaagttttgcgaagtcaaagactggcaggttgctaatatctacaaagatccaggcttcactggatccaatatagacaggcccggccttaagaagttgatcaatgacgtagagaacaagaaaatagagacagtgttggtttataaactcgaccgcctctcaaggagccagaaggacacactttttctcatcgaggatgtgttcgggattaacaataccaattttgtttccctgaacgagaacttcgatacctccactccctttggtaaagccatgataggcattcttgcagtgtttgctcagctggagcgcgagcaaatcaaggagaggatgaccatggggaaaattggcagagccaaggcaggcaaagccatgagctggcactgggccccttttgggtacactcataaggacgactcttacgaagtagtagatttggaggcccaaatcgtgaagcagattttccacgattacctgagtggcataagtatcactaagcttagagacaaaatgaacgacgaagggcatataggaaaggacatcgcctggagctaccggacaattagacagactctcgacaaccctacctatgccggttatacaaagtataaggatcagattttccccggtaaccacgaagcaattgtgtctaaggaggtgtatgatgaagtgcagaaacagctggaaatccgccagaaggaggcatacaagaagaataataatcctagaccattccaggctaagtacctcgtgtctggactggtccggtgtggtcactgcggagctgctctggggctgcatcagtacgcgaaaaagaaggatggaacccgaaccaaaatctacaagtgccacagtcgcacaggcaaaaaaaagaacgtgacaatggtgaaagcagataactgtccatcttgtgattacccgaaagaagaactggaaaacgtggtcctctccgaaattgagaaaatccggatcaatccccagttgatccagaagagcagtcatagcgcgcaggagatcgacgatactcctctcatcaagcgacttgaagaattggaccggaagcttgagaagctggtctcactgtatctggacgagacactcagcctggagatgctcaacgataaaaaagagttgatccaaaaggaaaaaacggccattgaagggaaactgaacaagacgaacaagcaaaaaccagaactgaaaatttccgaggccgctgacatactcaagaatctgaaaggctctatactgaaactcgattatgagaagcagaagattatcgttaggaaattgattaaacagatcacgctcaaggacgatgagatggttattcaatggaggttcgctgtc

SEQ ID NO: 1472 - DNA, 1407 bp, unidentified
  source 1..1407: mol_type = unassigned DNA; note = Bacteriophage uvig_317982 from the Index of /pub/databases/metagenomics/genome_sets/gut_phage_database (ebi.ac.uk)
atgtattacgagaggtcctatcttagatcatgccaggtctctagttatgagcaggcaaccgaaggttattccattcatgaacaagagaggaaactcaaagctttttgcgaggtgcaaaattggcatgaattcaaggtgtttactgacgcgggcgtttccggcggaagcatgaatcggcctgctcttaagagaatcatggacaaccttgagtactatgatctggtcttggtgtacaaactggacaggttgacacggaacgtcaaagaccttctggaaatgctggaaacattcgaaaaatacaatgtcgcctttaaaagtgcgaccgaagtattcgacacaaccactgcaatcggaaaactcttcatcacgatggtcggggccatggcagagtgggaaagggccacaatccgagaacgcgccctgtttggatcacgggccgccgtgcgcgaaggaaactacataagagaagctccattttgttacgataacgttgacgggaagctggtgcctaataagcacaagtgggtgatagattatcttgttgagcagttcaagcatggcgtgagcggcaatgagatcgcccggcagatgaacttgaaaaaagtgaacgttcctaaagttaagaaatggaatcgaacaagtatcattagactgatgaagaatcccgtccttaggggccacaccaagtatggggatatgtacatagaaaatacacatgaaccagtcctctctgaatcagactacaagcgaattatcgatgtaatcgaaaacaagacccacagatccaaggtcaagcaccacgcaatttttaggggcgtacttacatgtccccagtgccacaataagctgcatctgtacgctggtaaaatcactgacaaaaaaggttacagctacgaagtgagacgctataagtgtgatacctgctctaaggacaaaaatgtgcaaaccattagcttcaacgagagcgaggttgaggataagtttatcgaactcttgaagacgtacgacatgaataagttcaaggtggacatcgtcgaggagtctaccccgaagctggactatgacatcgataaaattatgaagcagcgcgagaaactcactcgcagctggtctctggggtacattgaggataacgagtatttctccctgatggatgagaccaaagaaatactggacaaggttgagcacagcaattctgaggtggagtcaactcagaccgtaactaacgaacagctgaacatgattgatgatatccttatcaaaggatggtcaaaactcaatgtggagcagaaggaggagctcattttgtccacggtgaaagagatagtgtttgactttgtgccccggaagtataacgagaacgggaaggtgaacactctgaacattagtgagattacattcaagttc

SEQ ID NO: 1473 - DNA, 1395 bp, unidentified
  source 1..1395: mol_type = unassigned DNA; note = Bacteriophage uvig_598484 from the Index of /pub/databases/metagenomics/genome_sets/gut_phage_database (ebi.ac.uk)
atgacgtcctaccgaaagctcagagtggctacatatactcgggtgtcaactctggagcaggcggaagagggatatagcatacaggaacaacaggacaagcttgagaagtactgcgaactgaaggattggacaatcacccaccggtattctgatccaggcttcagcggctctaacatcaaaaggcccggcataagagagctgatcgctgctgccaagcagggggacttcgatctcgtgctcgtttataaactggacagattgtccaggtctcagaaggacacgctgtatctgatcgaggatgtgttccaggctaaccaggtcgattttgtgtctctttctgaaaattttgacacctctactccttttggcaaagcaatgattggtatcctcagcgtttttgcacagttggagagggaacaaatcaaagagcggatgaccatgggcaagatcggccgagctaaaagtggtaaggccatgggctggagtaacgtgcctttcggatacaacttggcaggggatgtctatgaggtagacgaatttcaggccacgatagtgaagaggatctttgccgagtatctctccggagatagcccagtcactatcgctaagcgcttgaatgacgaagggcacctcggaaaagggacccgctggtcctggaaaacagttagggatattcttatgaatgtggtatacacaggatatatctcctttaagggtgagctgtatccgggtatgcataaacccattatcgacatggaaacttacaagaatgcccaaactcagctggagattcgaagagtgaatgcggataatcctagacctttccgcgccaagtacatgcttagcggattgctcaagtgccactactgcgggtcaacactggtcattggggtttctataaaccaacggactaaagcccgctcctacagatacaactgtccgagttcacatcctcggaaaaatagcacctataaacagaaagcaagctgtcccagcaagttcatatacaaagaaacagtcgagaagcaagtcattgaggagatcgagaagctgcccaaaaatttcaagcataagaaagcgccaaccgtagatgtcgacgccgtgaaaaagcagataaagaccattaaaagtaagcagtccaaacttatggacctctaccttatcgacggcattgacatggaagaactgaacaggcgcaacgatgagttcaataagcaaattgaagccctgaacaagaacctctcaaccgtgcccaccgagccagacgttacagaggctcttaaccaggcaaagaacatttcagaactgagctacgatgagcagaaaaagctggtgcgactgcttatttccgaaattgaggtggccaatgacagtatcaaaatccactggcggttc

SEQ ID NO: 1474 - DNA, 1635 bp, unidentified
  source 1..1635: mol_type = unassigned DNA; note = Bacteriophage uvig_434341 from the Index of /pub/databases/metagenomics/genome_sets/gut_phage_database (ebi.ac.uk)
atgggtgccgactcatgcatggctgcttctgccaagaaggtgtccgccaatattatgatccgcgctgtgatctacgcccgctattctagtagcgctcagaaggacgaatcaatcgagcaacagatcgaggcgtgtaaggagtatgcccagaggaatggcattcatatagtgagtgtttacgccgatagagccgtaagcgggaggacagatcgccggccagagttccagaaaatgatgagacacgccgagaatggtgaattcacaatggtgcttgcctacaagtcaaacagaatcgcccggaatatgctgaacgcactggcatacgaagaaaagctggctaaagtcggcgtcaatgtgagctatgtgaaagaagaatttggagacaacgcagccggcaggtttgcattgcgaaccatgatgaacctgaaccaattcttttctgaaagccttgctgaggacgttaagaggggaatggacgacaatgcaaggcagtgccgcgttaatggcagcatacccctggggtataagaaaggagcggatggaaagtttgcaatcgatgaaaatactgcgccaatagtccgcgaggtttttcaacggatcgcaaaaggcgaaacacaggcttccattgccgacgacctgaacgcacggcagattaggacggcagctggaaaaccctggggcaaaggcagtttccacaatctgctgaagaacgaaaggtatacaggtgtgtatatctacggtgacattagaatacccgggggtatgcctgctataatcgatagggatctgtttgagaacgcccagagaagaatcgagatcatgaagaccctggtaaaaagtcgcagacgccgggaagatgtggagtaccttttgaccggcaaacttttctgtggccactgcaattctgctatgaccgggtcatctgggacttccaaaaccggaacggtgcactactactaccggtgccacaatcaggctgttgccaagacttgtaacaagaaggctgtccggaaagactccattgagcgattggtcgtggggattatacgcgactatgtgctgcgcgatgacacaatcgagcggcttgctgatttgctgatggagtatagaaaaaaggttgaagacagtagcgaacttggctatctcgaagagagactcaaggagtccaaggcgacttctaaaaatatcatgaaagcgatcgaggcaggaatctttaacaagaccaccaacgagcggatgcaagagcttgaacaggaacaggcagaactcactgagcagattgccgaggagctgcgacatattcctaactatacaaggaagcaggccatctactacctggagtccttccggcatggggatttggatgataagaagcaccagaaacatttgattgccaacttcctccgagccgtctacctctacgacgatcatattaagatcacgttcgactttgacgacgatgagacaggactcgatgtgccgctcgagactgccgaaagcgaggcccttgactccgagtcaagctgtgtgctcattaatacccctagagtgtatcacaacgtgcttattaggaccccagtaaaaatccaaatggtcgggcgagtgttcgtcctggtattctacttcgattttctg

SEQ ID NO: 1475 - DNA, 1404 bp, unidentified
  source 1..1404: mol_type = unassigned DNA; note = Bacteriophage uvig_323835 from the Index of /pub/databases/metagenomics/genome_sets/gut_phage_database (ebi.ac.uk)
atgaaaaaggtggccatctatgtgcgggtttcaacacaggaacaggctgtcgagggttacagcattagtgagcaaattgacaggttgaccaagttctgtgaggcccattcatggaagatctacaaggtgtacaccgatcctggctttagtggagggaatatgaataggcctagcctgcagaaactgttcgctgactgtacacaaaagaggttcgatacagtactcgtgtacaaacttgatcgcctgagccggtcccaaaaagacacgctttacattatagaggacctctttctgaccaaccacgtagatttcatctccatgtccgaaaattttgacacgtcaactcccttcggcagggcaatgatcggaatcctgagcgtgtttgctcagcttgagagggaacagatcaaagaacgcatggccatgggcagggaaggccgagccaaacaggggaaatggcacggcgggggcaacgtgccaattggatatgactttatcaacgactacctgatccccaacgaatacgaggcagctcaagttaaacagatctttgacctggcgatacgcggctattcttatagcgatatcgctcggtcaatgagcggatacacaaccaagtacgggccttataaagtgggctataataccatatccctcattctgcagaacccgatctacataggcaagattaaaacaaataccgggtacatcaatggaatccatgagccacttatagacgagactacctttaacgaggtccagaaaaaggtcactcagatagctgagtattacaagaaggagcatactggacactacgggcagtacttgctctctggtctctgcagatgcgcatcttgcggtgccacatactctgcgcattatgttggaaccaagaaacaccgatataagtactataagtgccggaatcgcgcctataattggagagacgggtcccccaagtgtatgtctccaaatattagagtcgaggtgttggacaacgccgttctgaacgaaattcgccacttgcagctggacccagattatttcgatgaggtgagtaactctcccgccgcagacagtagctcactggtggagactttgaacaagcggctggaaaacattcagaagcagattgcaagaacgattcgattgtatagcctcggttccgtcgaagagaaggatatcgaaaatcaactccagattctttactccgagagagatactttgtcactggaaatcgagaatgcgaccgccgatcaaaaagacactgccgacgtaaaaagtattctgtccatgtctaacatcgatgaactggacgataccgaaaagcacaatctcgtgtgtcttcttattaaccatatcatgatcaacagcaatggcgatttcgagatacactggacattc

SEQ ID NO: 1476 - DNA, 1512 bp, unidentified
  source 1..1512: mol_type = unassigned DNA; note = Bacteriophage uvig_400028 from the Index of /pub/databases/metagenomics/genome_sets/gut_phage_database (ebi.ac.uk)
atgtataaagcctctaacgggagcggcgagttgatggagaacaaggtgattcgggtgggcggctacatccgcgtatctacacaggaacaggcgaaggaaggatactctattcccgctcagaccaagtgtcttaaaagttattgttctgctcggaactggatcctgcacgaactgtacattgatccaggatacagcggcgcaaaaatggagcggcccgcccttcagaaaatgctgtctgacatcaaaaagggcttcgtggacctggttttggtgtacaagctggataggctgtcaaggtcccaaaaggatacattgtacctcatcgaggacgtgtttcttaagaatgaagtcgcctttgtcagcatcaatgagaacttcgacacttccagtgctttcggacgcgccatgattggaattctttccgttttcgcccaactcgaacgagagcagattaaggagaggacgcagatgggtctggctgagagagccaaaaatggcatgtggcatggatcagggattacccccatcggctacgattatgatcccgcttctaatcaactggtggttaacgaatatgaggcgatgcaaatccgggaggcatttgacctgtttgtcaaccagaactacgccttcacaaagatcgtgaaaaccttccgcaacaagggttatagccacaagcacggcgtgtgggcccattcaagcaaactgagatacattctttccaacaagacctacataggccggattaattggaatggggaggactatcctgggaagcatgatccaattataccctcctcactcttcgaggccgcacagaaaaagttggcggaaaaggactggaaactgaccgacaagcctgctaagagtccctttgacgccactcagctgcttagcggggtgctgttttgcgggaattgcgggggacgctattatggtgctgggtgttacaggggcagccacgacccaaactctccgaaacgcagatacgagcacatctactcctgctacagtagaactaagacgaaactcgagatgataaaagacccaagctgcaaaaataagaactggaagacagagacactggacaattatgtaatcacgcgcatcaagaacctcagacttgagggagaaatagaaaatcttatcgctaaagagcggcctaaaaatccaggtattgatcagaggaaagcacttgaaaagcaaattgatgatatagatagacagatcagccgactgctgactctttatcagttggaggacgttcctacagcagagattggactgaggctgtcagatctcacccgaaagaagaaaactgtcgaggaagcaatcgaaaatatccctctctatgagccggaactctccgtggcgaaagccaaaagtctgctcgctgatgcagaggaaatcttcaactgtggtactaccgaggaaaagcgatccctgatacatgccttgataaggaagattatcctcaccggcaacgacgtagtcatcgaatgggcctttatc

SEQ ID NO: 1477 - DNA, 1506 bp, unidentified
  source 1..1506: mol_type = unassigned DNA; note = Bacteriophage uvig_100684 from the Index of /pub/databases/metagenomics/genome_sets/gut_phage_database (ebi.ac.uk)
atgatcgccatctatgccagacagagcgtcgagaaaaaagactctatctctatagagtcacagattgaatacgctaagcgggaggtttttacagaggatttcaaaatatatcaggatagtgggtacagcggcaaaaacactaaccggcctgcctttcatgaaatgatggccgatgtacagtctggccgcatagaaaaagtcgttgtgtatcggctggaccgaatatcccggtctatactggatttcgccgacttcatcaacatcttggagagcaaccggataagcttcgtctccgccaccgagaagtttgatacttctacccccatggggagggcgatgctgtatattatcgtggtctttgctcagttggaaagggagacaatcgcagagcgcgtgcgagacaattactatgctcgcgttaaaaaaggggcgtggggcggaggacctgctgctttcggattcgatctggtgaagactaccatcgacgggaaaaaagcaactatttgccaacctaatgaacagatttcagtcgtccagagaatcttcgaactttacgctttgccatattcatcccttgctgacgttcagcggcagttgattcaggatggatcagtctccagcggcggggtgaacttcgataacgctaaactcagctccatcctcaagaatccagcctacgtgcgcgcagatacggctgtctacaacttttacaaagcaaaaggcgccatcctggcaaacctcccggaggagtttgacggagtgcatggatgtatcctggtggggaagagggacgccaatgaacgaaagtacaaggacgtgtctgaccaccttctcgcaatggggcaccacgaaggcattgtggatagtaccacatttctgttctgccaacaaaaactcagcaggaatcggcagattaagaatacctataagggcaagcatagttggttgacaggtcttgtaaagtgtgcccactgcggctacgccttcagcatcagattttcccgcacgaaggaaggccaagttccatatttttgttgttccggtaagtatctccataaagtgtgcacagcaaagcagactcacagagtgagagaaattgaggcggaagtgcaagcttcactgattcagcatgcagcctcctacaacttgattcatagacagaacaccgcggccgcagccaaggagtttcaaagcaggatatctgagatcgacgcaaagattgaaaacctgattcttagtctcgaatccgtgagtcatgtaagtgcccagtatattaatcagagaatcgaggccctgcaccacgagaaacagctgctgctccaccgatacaatgagacaatctcagagtacaacattaatgaggtaacccccttctccgctaccgactgggagcagatggatatcgagcaaaagaggcagctggcccgctcactgatcaggactgtttacctgagcgaaaatggtttgagtgtgtctttcaatatcaagaacggaggtcacaagccc

SEQ ID NO: 1478 - DNA, 1170 bp, unidentified
  source 1..1170: mol_type = unassigned DNA; note = Bacteriophage uvig_95947 from the Index of /pub/databases/metagenomics/genome_sets/gut_phage_database (ebi.ac.uk)
atgaaagaaaccaagcgagctgccatctacactagggtgtccacagcccggcaagatcaggacggatacagtataccactgcaaactgagcgcctggagtcatattgcactgccatggggtggtccattgccggagagtacagcgaccctgggtattcaggcgccagcatcaatagacctgggttgagcgccctcatcgaggattccaagagtcataggttcgacgtcgttctggtgtataagcttgacagattgagcagatctcagagagacacactctttctgatcgaggacgtcttcgaagcaagcggagtgtcttttgtttctcttcaagagtcctttgacacatcatctatctacggtagagccatgctgggcattatttcagtgtttggtcagatggaacgggagactattacggaacggaccctgatgggccgcgtgggtagagccgagagcggattgtggcatggcgggggtacgccacccattgggtatgattacatagatggccacctcgtgattaatgaaggagaggcagctcaagtgcagaggatctacaagatgtttgatctgggattctccctccgggagatctcagatgccatggctggggctaaaacaaagcacggcgattggagccactccgctaccatcggtaacgtacttgattcacagctctacgcgggatacattaagttttgtgattctatggtgatggggacccatgaccctatcgtcgatcaggcgctgaacgatcgggtaaaacgcctgcgcgaaaagagcagggaatttcgaagccgaccagacagtaactacctgctgactggcctgatctattgcgcatcctgtggcgccaggtatttccccaacagaaggcccaatgggtccgtggtatatagttgttactctcgcgcgaagaagaataagagtatggttatggacccggactgcaaagctccacatatccccatgcaggaactggacgacgcagtcgagggcgaattcctcttccgacttaaaaaacacgatatacctattaccgacgtgacccagggcttcctgcttgagatgtggccgcagttgatggtgggagcaaagcggacaattctcgttcagcacaccaaaaaaatcgagatcaaacgcgacggctctttcaacttggtcata

SEQ ID NO: 1479 - DNA, 1707 bp, unidentified
  source 1..1707: mol_type = unassigned DNA; note = Bacteriophage uvig_392101 from the Index of /pub/databases/metagenomics/genome_sets/gut_phage_database (ebi.ac.uk)
atgaagggtgctatctattcacgagtctccacagaaggacaggattattcaaagcagacgaatgaactgaaggagtatgcttctaaaaacgggattgacatcgtgtatgttttcgaggagaaagagagcggattcaacaatgaccgccccgaatttgagaaggtacggaaactgaccaagctcgacattgatattatattggtgtgggagatctctaggatttccaggcgggcaatctaccttcagcaacaggtgcaggagttcaccgataagggcatctgcatctacgcgaaaaaggagggtttttctactctgaatggggacggcacagtcaatgccagcacaaaaatgctcatagggttcgccagcataatcgctgagcaggaggccgccacactgaaggaacgaactattagctcaaaacggaataagatactgcgcgaagggaaaagttacactggcgtggccccctacggatacgattacagtaaagacacgaaaaaactgtcaatcaacaaggaggaggctgaagtggtcaagcgaatattccagctttcaattgacggatatagtgcatacagaatccctattattcttaacgcagagggcatactgtccaagaaggggaacagctggactgtggcctccatcagaacactgctgtccaatcctgtgtacatgggcaaagctaactacactctcaagagcgaaaagcccaaagagggcaaaacttacagaaaagcaatagaagtggcatctgttgatgttccaccaatcatagacgcagagctgtttaatctgtctctcgaaaaaattaccgggcggaccaaccgctcaaaaagtacaggaactaagtataaccctctcttgagaggcttgattatctgtccaaattgtgggcgaaggtatacatataagaataggaatcaaacatacacctgtaacaacctgatcgacaacaagctctgcaaggcgaaaacaattaccaccaaactcgatagcatcatatggaacgtcgtaaagatcttcttttacaaagaattggccgctggcaaagcccaggagcagatcgaacctctgcaggttgagattgagagctataagcaacagctgctgcttcttgatggcaagcagtccgagcttaccagcaaggccaacatcatcatcaatgccgccattgagatcaaaatacaattcccgaacatgccggacctgtacaccaataagcttaaagaagcagatgttattaacaaagaagcgggtagataccttaaggaaagagaacgcttggagaagcttatccactctaatgagagtaggattaagaacatcaacaaggccagtaaagaatcttccctggtagactcaatcactgacgaaaccgagaaatacgacctggtccatcgcgctgtggagtgcatcatgatcttcggtgaggataagacatccattatcgtcgtgacctttaccacaggacagacgatctacattggctattttagcaagcggaattccaagtactacacgattttctatcccagtgtggacatctactttgacattcataaggaaaagggttacattaaccacctcaaagaagaggtggctggaattatgccaatctctcaattgaataagcagactgtcgagtattgcattaccgattttgtgaactatctcgatatagaagataataggcggtattat

SEQ ID NO: 1480 - DNA, 1557 bp, unidentified
  source 1..1557: mol_type = unassigned DNA; note = Bacteriophage uvig_208975 from the Index of /pub/databases/metagenomics/genome_sets/gut_phage_database (ebi.ac.uk)
atgaaaaataagcacgatatcaaggacataagagctgcagtgtacattcggtattcttccgaaaatcagagggacggctatagtgtcgaatatcagttggacgagtgcaaaaaatatatcgagcagcaagggttcatcttcgaaaagtcatacatcgacgaagcagtgtcaggcaaaagtgctgataagcgcaccgctttttttgaactgcttgccgatgtgaaaaatggtctgtacgacgtggtaatcgtctataagtactcacgcttcgcgaggaacttgttggaggcgactctgtatcgccagcaaatcgaaaaaaacggtgccaaacttattagcgccatggagcggattgacgattcaacaccagaaggccgcatgatgcgaaatattatcatgacaatggacgaatactacagcgataatctgagcacctttgttcagtcctccatgtatactgcagccaaaagtggaaagtacctcgggggcatactcccatacgggttttctgtgaacgagaatggcgaattcatagagaataaggccgaggccgatatcgtaaggagggtatttgagctccgggctagcggagctatgcccgccgatattttgagaattttccgcaacgagggtatccgggggagaaacgggaagccctttacgcagcagctcctgaataagattgtgcgcagcgagaaatatattggggtgtacaagtacgccgtcaaaggttacgagcctattaggatcgagaacgcctttgccccgatcgtgccccgagacctttgggacaaggtccagcacgtagtggataatctcaacgtgaaacgagctgctaaggggcggtcccgaaaaaacatctatcctctgaccggaaaaatcttttgcgcatgttgtggagaacccttcaccggcaacagcaagggaaacggcctggcctattatacttgcaggggacaggacaagcttcaaatctgtaagaatgggtctgtcaagaaggatatactggagaactacgttttcggcaagattaaggagctgatcctgtgcgaaaaccatgtggaagatatcgcgcaaattgtgttcgacatgttgaacaagagtaccagcggagatatagacgccgagatctccgacctcaaaaaggagaaggctgacattgaaagaaagctggagaatttgctcgacttgatgctggacggaactatttctaaagatattctccagaaaaagtccgctgcccttcaagatgagttgaaaatcgtcgagtctgcactgaaatccaaggagtacactgccgctgaaacagttacctacgacggcatacatgcgttcttggttgacatgataaaacagctcgaaaatgcagatgatcacgtgaaaaaggcaattgcctcacagttcatagataagatcacgattaacagcgacgacatcaatgttagactgacagtgtccccattttttgtcggcgacaagcttaacgatggttgggcactgttcaccatcagccctaaaaggtctaaaagtagatctggcggtctgacacggctgaag

SEQ ID NO: 1481 - DNA, 1530 bp, unidentified
  source 1..1530: mol_type = unassigned DNA; note = Bacteriophage uvig_586184 from the Index of /pub/databases/metagenomics/genome_sets/gut_phage_database (ebi.ac.uk)
atgcccaaagccgtgatctatgctcgattctccagccataaccagagggaggaatctattgagcagcaagtggctgagtgtcaggctttcgccaaggccaatgatctcaccgtcgttgatgtttacgcggacgcagctgtgtccggcagatccgaccgcagaccacagttccagcgactcagacgcgatgcagccaaaaaagccttcgaagtggttattgcttataagagctcacgaatcgctcggaatatgttgaacgcccttacatttgaagtcgagatgaataagagtggggtgactgtgctttatgcgaaagaagaatttggcaatacggccgccgggcgcttcgcattgcggaccatgatgtccgtgaaccaattctacagcgaaaaccttggggaggacattaagcggactcaggccgacaatgcaaggcagtgtaaggccaatggtcctgctccatatgggtaccgctccggcgtcgacggcagatttgaaatagatgaaactgcagccgcgattgtacgagagatctacactagaacagcggctggcgagtcaaacgtgagcattatgagggacctgaacgctcggcatcttaaaacgcggctgggtcacgaatgggggaaaaactccttccaaggaattctgggtaatgagaggtacctgggaatctacatttttgatggcgtgagggtgccgtccggcatgccaagaatcattgacgataaactgttcaaagaagccatgatcgccatgagcgccaaaaaaaagaagaaccccgaagccgactaccagctgaccggcaagctgtactgcggcgagtgcggcgagatgatgattggtatgtctggcacaggcaagagtggaactgtgtataactattatgcttgctcaggaaggagaaccggatctgggtgtaaaaaggccagcgttggacgggaccagacagagatcgccgtcgcatcagcccttctggcaaagattatggatgatgcggtagtggatcagatcgcagacgagataatcgacttccagcagaagcacaagaacaaccctgagatcaaagctttggaggcggccaaggccgacaacaagaaggcaatagacaatataatgaatgccatagaggcaggaatctttaccgacacaaccaaagataggctcctggcattggaagctgagtctaaagagatcacagagcgcctggaagaattgactgcaagccaactcaatgtgtcacgcgatcaggtcgtgggataccttaagagttatcggggtggggaggttagggataggaagtaccggatgaagctctttcagacttttttggtaagagcctatgtgtacgatgacaggctcaagattgtttttgatcctatcggggaacaaacgggcgaggtcaatatgaccctcgacgaggtcgacggggaatctggggacggagtacgcctgatggaggataaaggtcaccatatctctgctacacgaaccctgtacctggtgtatagtgtccccttcaccgctaag

SEQ ID NO: 1482 - DNA, 1062 bp, unidentified
  source 1..1062: mol_type = unassigned DNA; note = Bacteriophage uvig_22576 from the Index of /pub/databases/metagenomics/genome_sets/gut_phage_database (ebi.ac.uk)
atgaatgtggtgatctacgcacggttttcttcccactcccaaaccgaacagagcattgagggccagcttaaagtatgctacgagtacgccgagagcaaccactacaccgtggtgggggaatacattgatcgggctatttcagggactactgataaccgggcagagttccagagaatgatctcagattcagaccgccatacgtttgagggggttttggtttatcagctggaccgcttcgcacgcaataggtatgattccgccattaataaggctaaactcaagaaaaatggtgtgagggttctgtccgccaaggagaatattgctgacgacgcttcaggcatcctcgtggagggagtgctggaatctatggcggagtattactcagtggaactgagtcaaaagattcacagaggcatggccatcaatgctgagaagtgcctgtctaacggaagtaatcccggcctgggctttaaagtcgacgccgaaagacgattctacgttgatgaggaagaggccgccatagtccgggagatctacgagcgctacgccagcggagagactaaagccgaaataatcagagacttgaaacgcaggagggtgaagacaagcctgggcaaagagttttcccccaacagcctgtctcggctgctcagcaacaagaggtacattggtgtctatctttataaaggaaaagaaaccccaggcggaatgcctcgaatccttgatgacgacctcttctatcgagtgcagtctatgatgaacaagaacaagagtgcccctgcaagaactcacggggaaggcgaatacctcctgacaaccaagctcttctgtggccattgtaaagaaatgatggtagggtatggagggacatccaagacaggtaagcagtaccattattatatgtgtaagaacgcgcggaggaagaagtgcggtaaaaagatcgtatccaaaagttatatcgaagatcgcgtcgtcaatgagtgcctcaagatgcttacggaggaaaagatcgcatctttgccgcgaaaatggttgagaagcgctccaaaagcgaggataacc

SEQ ID NO: 1483 - DNA, 1533 bp, unidentified
  source 1..1533: mol_type = unassigned DNA; note = Bacteriophage uvig_581097 from the Index of /pub/databases/metagenomics/genome_sets/gut_phage_database (ebi.ac.uk)
atgtcaagggctgtaatctatgccagattttcctcacacaaccagagagaggagtccatcgaacagcaagtggcggagtgtcgggcgtttgcagcggcaaatggcctgactgtgatcgacgtgtatgccgatgccgctatttctgggcgatctgaccggagaccacagttccagcggctgaggcgggatgccggcaaaaaaatattcgacaccattattgcctataagagcagcaggatcgcgcgcaacatgctcaatgccctgaattttgaggttgaaatgactaagtgtggagtgaatgtcctctacgcgaaggaggagttcggtaataccgccgctggcagattcgctctccgcacgatgatgtccgtaaaccagttctactcagaaaatctcggcgaggacatcaaacgcactcaggccgacaacgcccaaagttgtaaaagtaacgggcccgccccgttcggatacaagagtggcgctgatggtcgcttcgagatcgacgagcccagagctcagatcatccgcgaaatatacgccagagtcgcagcaggtgaaacattggcctcaatttcagctgatttcaatgctaggggcttgaaaacaaggaccggaggaaagtggggccggtctagctatggagctattttgggtaacgaacgatacctgggcatctacatctttgacggcgttcgcactgaaggtgggatgccacagatcattgataggcaactgttcgtggaagctatggccgcaatgaaacgaaaaaagatctctccctccgccgactaccagctgacagggaagctctattgtgggaagtgcgggagagctatgacaggaatttgcggcactgggagagcaggaactgtctatcactactacgcctgcaccgggcggaaaagcgggaccgggtgcgacaaggaacatgtcggtcgcgatcagatagaagacgctgttgctcgggcactggctgagagaattatgagtgataagattatcgatcaaatggcagacgaggttatggagttccagcggagacataaggacaaccctgagattaaaatgctggaagaacaaaaagccgaaaacgcaaaagcaattaaaaatatactgagcgccatcgaggccggaatctttaccgagtccacaaaggccaggctcatggaactcgaggcagagaacacccggattacggagcaactcgcaatgttgaccacatctcagatcgacgtgaccagggaccaggtcatcggctatctgaagtcctttcgagggggcgacattgaggacaaaaagtatcgcgcccagcttttccagacgtttctggttaaggtgtttgtgtttgatgataggttgaaggtgatatttgatcctctgggtagcggcaagaacgagatagatgtcacacttgacgatctcggagaaattgaaagcgagggcgatggcgtgcgactttcctctgatcttccacatcacataggacttaggcgaaccccttacatcatcttcatggtgtccctggtaactaag

SEQ ID NO: 1484 - DNA, 1365 bp, unidentified
  source 1..1365: mol_type = unassigned DNA; note = Bacteriophage uvig_483710 from the Index of /pub/databases/metagenomics/genome_sets/gut_phage_database (ebi.ac.uk)
atgaccaaagacaatcgcaaaacggccctctatatccgagtgagtacagattttcaggcggaagagggatacagtattgacgcccaaaaggaaaagctcgagcagttctgtaaactgaaagacatcaaaaactatgaattttacattgacggaggctggtcagggagcaatatcgatagaccacagatgaaacaaatgatgtctgacataaaagaaggtatgatcgattccgtcattgtatacaagctggataggctgtctcggtctcagaaagacacggtcttcttgttggaagacattttcatccccaacaattgcaatttcatctctcttaacgagaatttcgataccacgaccccttatggtaaagccatgatcgggattttgtccgtgtttgctcagcttgagcgcgaaaacatcagagaaagaacccggatggggatgtacgaaagggtgaaggcaggactgtggatgggcggagggaaggttccctatggctatagctatgacgcgaacaagaacattcttgttactaacgccgacgccgataacgtgcggaagatatttgatctttacatccagggttattcagcttgttacatagcaaagcttttcaatctctgtaacgattcacaagtgcgaaatattcttaaacgcaagacctacctgggcaagatagaatataacggggaggtctttgacggcaaacatacacctctgataagccaggaaacttacgacaaagctcaggaggagctgtctaaacggacatcaaaagatcagcagaagaatgtgtacctcctgaccgggctcattaagtgtggcgtgtgcggagcctccatgagataccaaaagtggggaaagcacgtgaagatctactgctatagtcagcagagttccaagccgaaattgattaggaacccaaattgcgataattataagaatgattccgatgaaatcgagaaggccgttatagatgacctgctcaggagaacagagaacatcgttggcgtaaaggatgtcaaagatactagcataagcgctatcagcatcctgaacaacaagaaaaagacaatcgaggaaaagatcaagaagctgtacaatctttgcctgaccatggacgacgacctgttgaaagagacaatttccgagtgtaaaaccgaactcgatgagatcaataagcaaatcgagcgagagaaagtcattggcgacactatcaacaagattaacgagaagcacaacactattaataatctgaagagcaattgggacaacatgacttatatggagaggcgcatggcaattaaaatctgcatcaaagagatcataattaacaaggacgcaatcgacattgtgtacaatttt

SEQ ID NO: 1485 - DNA, 1560 bp, unidentified
  source 1..1560: mol_type = unassigned DNA; note = Bacteriophage uvig_255651 from the Index of /pub/databases/metagenomics/genome_sets/gut_phage_database (ebi.ac.uk)
atgaacaagattgcgatctacactcgcaaaagcaagttcactggtaaaggagaaagcatcgagaaccagatagaaaaatgcaagaagttcattgagttcaagttcaacatagactccaagagtgtaaacatcttcatcgacgagggattttctggtaaaaatgaagataggcctgaatatcaaagaatgatgaatcagatcaagtccaaacagatcaacagcatcgtcatctatcaactgaatagactgggccggaacgctcgcgacatacacaatactatgcagctgtgcgatgatcttgggaccatcatctatagcgcaaccgagggctttgactcctctacaatttttggccgggccgtgataggcattctcgcctctctggctcagctggagcgagagcagctcgctgaaagagtgaaagacaacatgtacacactggccaaaatggggaggtggctgggcggccaatctcccttgggttttgacggaacccgcgaatactatattgatgaaaatgggaaagaaagatcagtgacagagctgaagccaaacaaggaggaactgaatatcgttaaacttatctaccagaagtacattgaggagaaatcattgtcccaggtggctaagtggtcactcacaaaccacctgaagggcaagaacgggggcaatataaccaaaagtgccattaatgtcattctgaagaacccagtctacgtgaagagtacagacaaagtactcgaatatctcgaaaaggagaattacgaggtatgtggatccgcaaatggaaatgggctgttgaggtatggtaaggataacgaacaaataattgcggtttcaaaacataaggggattatcaacgctgatgattggatgaaggtgcagaacatcctcaaggaaaacacagataaagcacctaggcggggcaaaactaacaccgccctcctgactggcattctcaaatgtaattgtggcagctcaatgaatatcgcccatggaaagcttaaaaatgggactaagacgttttactatcaatgcgccatgaaggttgcatcaggtgggacccgatgcaaaagcaagaatctgaatggacccttgttggaggaaaagttgattgattacctcaaaaactacagcgagatccagattatcgccgacctggagaatattttgaataagagcaatgaactcaacctcaaacttaccgccgagagcattgataacgcgatcgaacagtgtgataaaagtatcaaagtccttgttaacaagctcaaggtgatcgaggaccttgaagtgtccaaaataatcattgacgagttgaccaaagagaaggacaaaaaaaaggaccttgaaaaacagaaggaaaatctgctggaggatgaggcttctaaaagtctgtctgaggcagaaattcttgaggtgctgaacctggtggagcacttcaagaataacatagactctctggatttcgagtccaagaagaagttgcttaacgagatgatcgagtccattgtcatcgacacggacgagttcataatcaactttaatattaagaagaac

SEQ ID NO: 1486 - DNA, 1503 bp, unidentified
  source 1..1503: mol_type = unassigned DNA; note = Bacteriophage uvig_453602 from the Index of /pub/databases/metagenomics/genome_sets/gut_phage_database (ebi.ac.uk)
atgaacgccgtgatctacgctcgcttctcttcacacaaccaacgagaggagtctatcgagggacaggttagagagtgtcgcaagtacgccgaacagtacgatctgcacgtggtggaggtgtatgccgacagagcagtttccggcaaaaccgaccagagaccggaattccagaggatgataagggattccgcgaagcggaggttccagattgtcattatgtacactttggaccgatttgctcgcaacagaagagactcagccacctacaagtatgaattgcgcaagaatggcgttcgggtggtgtatgctaaacaggagataccagattcacccgaagggataatcctcgaaagcgtccttgagggttacgcagagtactacagcgaaaatcttgccagaaacatcacccgggggttgatggaaaacgccctgcaaggcaagagtgtgggaggcaccactccattgggatacaagcgagaggatgatagactcgtgatcgatcctgtcaacgcacaggccgtacggacgatcttcgatatgtatctgtccggaaaaagtagccaggagataattagatggctgaatgaaaaaggatactttactgcactgggtaacccctttggaaagaatagcctgaggaccattttgacgaacgaaaaatacattgggatctatcggtacagggacgtcgtaattgaagattgcgttcctaagatcattgacaaagacatctttgacagggtacaggagcgcgtgaaggtcgtgtctaaagctaaggcgcattataaaggggatacagactacctgctctgcaccaaagccttctgtggctattgcggcgcacccctgattggcgagtgtggaacaggcaaaagtgggcaggtctatcactactataagtgcgcttccaggaagcgggggaagacatgtaacaagcatattgaaaataaggacgctctcgaggaggctgtggtacgagagaccgtgaatcatatcctccagaaaaatgttatagagtccatcgctgcgcgagccatggcatcattggataaacttacggccgacgacgcgctccttaagagtttgcaatcacgcctcaaggagactgaaatagcactggccaatatgacaaaggccatcgagatgggtatcattactcctacaaccaagagtcggcttcttgaactggaggctgacaaaggcgatttgctggacaaaattaaacgggaacaagagtcttatcccgatatgtccaaggagggcatcatctattggctcagcagcttcatgcagggggacccaaaggacgagaacttcaggcgcagaatctttgagtccctgctgaaccgcgtggatgttttcgataatgacgatggtactcggaggattgtcctgacctacaatctgagcgaaaatagagtgtctgcagtgacatgcagctgttctgactccgccctgacacctccgccatcttcacgaaacgaaagctttaggcttttcttt

SEQ ID NO: 1487 - DNA, 1419 bp, unidentified
  source 1..1419: mol_type = unassigned DNA; note = Bacteriophage uvig_370654 from the Index of /pub/databases/metagenomics/genome_sets/gut_phage_database (ebi.ac.uk)
atgagaattgctatctacgtgaggaaaagcgtcgctggtgacgaccgatcaatctccctggagagccagaaggagttgtgtactaattacttcaagggggaaaatacttttgaggtgttccaggataggggtatcagcggcaaaaatacagaccgcccggcatttcaggaattgagcagacgcgtatccaacggagagttcgatatcgtcgtgtgttacaagtttgaccgcattgcccgaaataccctcgattttctgactacactcgaactgttcaagagctacaataccgatctggtgagtataaccgagggctacgacccctccactcccgcagggaaaatgatggtgacattgttggcctcactggcagaaatggaacgggaaaacataaaggctcgggtcattgacagtatgaatcagctggctcgagaagggaggtacagcggcggtcctaccccctttggatacgagatagataaaacaccttatggaagttatctgaagttgattgacggcgaaacgatttcctacattttcaactcattcctgaagggcaagagtgcgaacgacttgggcagagagcttaagatgacttctaaagggatcaaacttattctgaggaatccactctatatgaaatctagccagcttgccaacgagtatctgggaaatatcggatatgaagttatcagttatgaggatcggatggggaacggctaccttacatatgggaaaaaggggtcctctaatagcaacaagatagccgtgatatccaagcatgaggcagtgatctcagattctgattggattcaggttcaagttcgcttgaaaacatatgacggtcatagagcccctaggataagctcaaaaacctggttggcccaaatggtgaagtgtacccactgcaataagtatatgaaggtccggacaacgaatactggcgtttaccttatgtgcccaaacaactgcatgaaaaaatatatcaacgtgtcaaaggcggaaaatctcatcctggacgagttgaagaagttcaccctcgacgaggatacaatcaacgacaactccaaggagaataacctgctttctgagattaacgtcatcaccaaacagatagacgagaaagataagctgattatcggcctcgtggataaactggctctggccaacgaatctctggcaaatagactggtaaagaccattgaagcttatgagactgagttgaataacctcaagaatattaaaacgcagaaactcattgccatggagaacaagaagtccaaccacctctttaataacgagaaagagttcaatgatttcatcgactcttttaacaagctggacatgaaagaaaagcagcaaagtatccggaacatcatcgattacattgaatttgatggagactacttcaccatctac

SEQ ID NO: 1488 - DNA, 1509 bp, unidentified
  source 1..1509: mol_type = unassigned DNA; note = Bacteriophage uvig_208980 from the Index of /pub/databases/metagenomics/genome_sets/gut_phage_database (ebi.ac.uk)
atgaatgcagtgtatacacggcagagtctggacgttaaggacagtctgtccatcgagtcccagcttgatgcttgcttgaatgaaaatgggtccgctgaataccagcactacaacgacaagggatattctggcaaaaacacagaaaggcctgcattcagacaactcatggctgatgtgcgcaagggaacaatagaacgagttattgtctacagactggacagactttccagatcactgttggattttgctgagatgattgatgtctttaagaaaaaggacgttgagttcgtaagctgccgggaaaagtttgacacttctacaccaatcggcaatgccatgctctcaataattatggtattcgcgcagctggagcgcgaaactattcagatgagagtgaaagacaactatgcaacgcgcatggagaggggcgcgtatgacggggtggccccctacggctttgacaaagcaatcactaaggtcggggataaacaggtacataccctcgatgtgaatgaagtgtctgatacagtgaggtcaatgttcaacgagtacgcttacaccggtgatagccttggagccatagctaagaaactgaacgctcaggggatacctagccccggcgaggccccatgggacggtggtaaaatatctcggatcttgtccaacccgatctatgttcgggccaacgccgacatctacgcctactataacgcactgggaatgaccattaccaatcccattgaagattttctggcggtgaacgggtgcatcacttatgggggatgggagaggagccgacgcaagttttcacagtacgacaggttgaaactcagcattggcctccatccagggctggtggacagcgacacgtttctgcggtgtcaaaccaaacttaaggccaatagacaaatctgcaatgcaggcaaggggaaacatagttggcttacagggatggtgaagtgtggctattgtggacactcactgaaggtgatggttgatcagaaaggtcgcggcatcaagaggttcgtctgctccggaaacaccaactgtggcatttgcagtcaattcggctcccagagggtcgatgagctcgaagctggcgttgagcacgagcttatgcagatggtcgagaggagaaaatatattgaggccaagattgagatggaacgagacactgaggagtcccggatcaagatcgagcagactaagatatctgagaaattgaatcgactggtggatgccctggcagaaggtgagcctagcagcgcttctgccgtaatgaaaaaaattgccgagctcgaggaaaagaagaaactgctcgaagtcgagttgcgctctcacagagcaaaactccccagtcaacaagaactcctccagttccgcgataccgcgcggctgtggcctcatatgaccatccagcagaagcacgatgtggccaagctgctgattgacaagatcgaagtgaagtgtggagaaatccagatctactggaaatacaatttcgagttg

SEQ ID NO: 1489 - DNA, 1587 bp, unidentified
  source 1..1587: mol_type = unassigned DNA; note = Bacteriophage uvig_127373 from the Index of /pub/databases/metagenomics/genome_sets/gut_phage_database (ebi.ac.uk)
atgacaatccagaaggacaatacagctcttagagctgcagtctatgtccggtattcatccgagaatcagcgcgacggatacagcatagaataccagttggatgaatgcaagaaatacattaaggagcagcaatatgagtttctcaaggcctatgtcgacgaggcagtgagcggtaaaagtactaataaccgaaccgctttttttgatcttctcgctgacgtcaaaaatggactgtatgatgtggttgtggtgtataagtattcccgatttgcacggaatctccttgaggccacattgtacagacagcaaattgaaaagaatggcgcgaaactgatatcagccatggagcgcatcgatgactcaacccctgagggacgcatgatgcggaatattataatgaccatggacgagtactatagcgacaatctgagcacattcgtgttgtcaagtatgtatacagccgccaaaagtgggaagttcctgggcggaaagtacccatacggatatactgttaacgacgaaaataagtttatcgaaaacaaggccgaggctgatatcgtgaggagagtctttgacctgcggcttgcagggatgtcccctattgatatagtgcgaaccctgcacgcggatgggctgcgctccagaactggaaaacggttcactaggtctttcatctctaaaatgctgacaaacgaacgatacatcgggacctataagtatgaggtatctggctatgaacccattatcatagaaaacgcattcgaggggctcataagcttggataagtggcaggcagtgcaggaaatcattaaaagggagaagagagccccatacgtcaaaagtagactgagacatagggtgtacccacttgtgggcaagatctactgtggtaagtgcggggagcccttccggggtaacggacgccgcatcaaggaccccgagaccggcgaactgaacagagagatcgtgtactacacttgtcggggccagcacgtccataacaactgcgatatagggagcgtcaggaaagaggtaatcgaagatttcgttttcggcaaaattaaggagctcattctcaacgagaacgtgatcaatgatatcgctgaagttgtatacaagagcgtggacaatggggaaaatgacctgactgaggacatttccaaactcaagaaagaaaaggcacagatcgaacgcaaactcgagaatcttcttgatctgtttcttgacggcgagatttctaaagccattttgaacaagaagtccgatgagctgcagaccgaccttaaggacctgaactctaggctgcaaacaatggagttcacagccgctaacgaaatcacggtagacaggatccatggttttctgcttgatatgattaaccaactggagactgcggatgacaccgttaagaaggccattgcgagtcagttcatcgacaaaatcattgtttacgataccgaagtgaccgtgaaactcactgtgacgcctcactttatgacggataaacgatcaaatggcggcgccctttactctttgtccgctattcggaaaccgagccgacagggtaccaggcccgccccactgcga

SEQ ID NO: 1490 - DNA, 1533 bp, unidentified
  source 1..1533: mol_type = unassigned DNA; note = Bacteriophage uvig_311977 from the Index of /pub/databases/metagenomics/genome_sets/gut_phage_database (ebi.ac.uk)
atgaacaatgtgcagaagaagtatttcatcggattgacccacttcctgggtaatgttctcggtccaaagtacgaagtggtgttccactctttcgataaaaataaggcacatatggaggcaattgctaattctcacgtgtctggcaggacactgtccagccctctgagctccttcgcgtcctcattgcttcaagacaaggtgtacctcgataaagactttatcttcaactacaaggcagtggccgatagtgaaaaagtgatccgaggacagacggagaacgccttgaaggggaagtgcactggcgggacagggaccatcgggtacaagatagacgacgacaagttttaccatttggatcctcttacggctccgttggtcctcgaagcctttcaacgatatgacaacggcgacaaaatggtggagatcgtcaatttcttgaacgataagggcgtaaggaacatgctcgggggaaagatgacccatagcagtgtcaacactatgctgaaaaaccggagatatatcggcgagctgtcattcagggacattgtggtgcctgatgccatccctgttattgttcccaaggatttgttcgaccgcgtccagaagagactggataaaaacaaaagggcacccgcctgcggcaaagccgatgaagaatatctgctgacaactaaacttttctgtggtaagtgtggcgcactcatgtttggggagtcaggtacctccgccacaggacgcacttactactactataagtgtgccaatgtgaagcggcggaaaggttgcaataagaaaacagtgcagaaggactggcttgaggacttggtcgtacgagaaaccatgaaactcattcaggatgacgcagtaatagacaaaatcgttcaactggtcatggacgtgcaaaaccaggagaatacgacaatcccactcctggagaaacaacttagagaggtcaataagaagctggataacttgatgaaggctattgaggatggactgtatactcgcacgacaaaggagcgactggaggctttggagattcagaaggatgagctgaccgccaagattgccgatgagaaactcaagaaacccagttttaatgaagacttcatccggttttggctgatgaaattccggaaatttgacataagccagaagaaacagcgcaaagctctgattgaaatctttgtaaacgcgatctttctttacgacgacagaatgctccttactttcaattataaagatggaactcagaccgtgagatttgaagataccctgaccgcggattgcggggaaaaatcactcaggttgcgcagcaatgaatctccaagcggcgcctttgagcagcagaatggcctggctcaggcaagatggcggggactggcgcccaccagctccgacctgagctcctctgctgggaccggctcttgtggaattgcttggaacacaaagagtataacatcaatacgctctatcagatgttgcctcaacactattcggaacagttgggttagggacctgtccccagccagg

SEQ ID NO: 1491 - DNA, 1569 bp, unidentified
  source 1..1569: mol_type = unassigned DNA; note = Bacteriophage uvig_349522 from the Index of /pub/databases/metagenomics/genome_sets/gut_phage_database (ebi.ac.uk)
atgaaaaaaaagcagagggtggtcatctacatcagatactccagtcacaagcaggccgaatctttttcaatcgaataccaggtggcagaatgcacccggttcatagaaatgaacgattacgagcttgtggatacttatattgacgaggcaaagacaggccagaagattgcagggcgggatgccttcgacaagatgatgtttgaagcaggccaggacaagtttgacaagataatagtattctccttctcccgctcattcaggaacacgcgggatgctttgaattgtaatcacgaccttcaggagaagtacgggattatgatcgagagcgtgattgagcgaatcgacctgagcgaccctcacggaaagttcagcggaacaaatctttttgctatgcacgaactgcaggccgccatcatcgccgcacacgttcgctctgggatgtactacgccgcccaacagggatattatctcggcgggtttgttcctttcgggtacgagctctatgagactggcgaactctcccgcggaaaggagagaaaaaaatatagtcccaacccagaagaggccgaactggttagggaaatgttcgacctttatgctgacggctttagtctgaacttcatccagactgcgatgaagctcaaaaatgtgaggggcagacggggagatatcattggccagcaaacaatcgcccgaattcttaagaatcctatgtacatcggcacagtggaagcaaagtttaaaggccacgacccactgtctattcccaacgcagtgcccgccatcatagatatggatacctggggtagagtgcaggcccgccacaagggtaataagctggtccaaccccgacggaccaaaagactgtattctttgacaggcaaaatcacgtgtgccaagtgtgggggccatatgttcgggacatataaaggggacaaacggtcaaacaactggcattacgcctattatcattgcgctaacaagaagatcaaaggaacctgcaatgcattgaacgtgcggaaagaccagatcgatgcttactgcctccaagagattaaaaagcatatactcaacgaggaggccatgcgctctatttccgagcaaattgctaccgctgttggaaatagcgctgatgatatggcgaaagctaaggccaaggccgagaaacgcatggagcagatagtggatatcctcgccaagattaaggaggactactatgagggcaagatcaccgaggcggtagaaagaaggatggctgcaaagtacgaagcagaacaactggagctggaatcctctttgcgaggtttgaaaactgcgctgaagtcagctataaccagcgagactgtctacagttacctgcaggagctgctgtcactgtatggttccaacaatgatgagctccagaaaatgctttttgacaaacttatcgataaaattctggtccacgatgacaggattgaagtgaccttggtagtcagtccgtttgggcatattggagacaatagccctagcggacagccaaagtacgagcagagcttgatggtcggtagaaaagaaatcaggcatatt

SEQ ID NO: 1492 - DNA, 1446 bp, unidentified
  source 1..1446: mol_type = unassigned DNA; note = Bacteriophage uvig_53024 from the Index of /pub/databases/metagenomics/genome_sets/gut_phage_database (ebi.ac.uk)
atgcgagccgttatctatgccaggtttagcaccgacaaacagagagaggaatcaatcgaagcacaagagagagcgtgtcgggaatacgccgtggctcacggatactctgtatctgctgtttatgcagacagagcagccagcggcaagacagacaggcggccagatttccagcgaatgatgagggacgcgaagagtcagaggttcgatgtagtcctggtgcacaagtacaatcgctttgctcggcggatgagtgatcacgtgaggtatgaggataagctgaactcttacggagtgcaactcattgccgttgctgaagattttggaaccggcaaggaagccgtcatcatgaaagccctcatgcgcagtctgtcagagtactacattatcgacttgtccgacgaagtgaagaagggtcatcgagagaacgccatgaaagctctgcacaacggtggcttggcacccttcggatatgacattgtcgatcaaaagtacgtcataaacgaattcgaagccgcctacgtgcggagaatgtataattgtgcatctgattgcatcgggttcacagcactggtggacgaaatggcggcagccggcgtaaggggaaaacgcggtaaacctattaagtaccagcagatctacgatatccttcgcaacgagaaatataccggcgtctacctctattgccccgaacaggagagcagcaaaatgcttcagagatccaaaccaagcgccatcaggattgaaggggccatcccacctatcataagtaaggaacagtttgaggaggtgcaaaagattatgtcctctcggaaaatgaccgggcgcaaaaatagctatctgtgctcaagactggtgttctgcggcgagtgtggcgcagccatgcatgcaatcacaactgggaagtaccaatactattattgcaagaatcattgtgggaatccgaatgtgaggatggagactattgataacgccgcgaaactgtaccttcgggagctgttgacgcccgagaatcagctcactatcgctgaagctttgaaacgataccaggcttccgctgcctatcgcatggaggacttttacgattccgtgcacgaccagataactgagcgagagcagaagtacgaagcattgcttgcgaacctttccagtggcgctttgcccgctgatgtggtagccgatgtcggagcaactatgcagagactgaaggatgagattgatgtgctgagggacgccaagccggagaaagactataccgttgacaacatcacaacctggcttgaatccctgagacaggcccctgacgagaaagctatacggctcctcatttctaagattagcgtcaagaaccgcacggacgtgagcatagactcaatgctgacctcagttctcggtaatctcgggtgtggcacaacaatccctctgctgccaaagattctgtttgagtat

SEQ ID NO: 1493 - DNA, 1575 bp, unidentified
  source 1..1575: mol_type = unassigned DNA; note = Bacteriophage uvig_595447 from the Index of /pub/databases/metagenomics/genome_sets/gut_phage_database (ebi.ac.uk)
atggatactgtgaacaagtttggctcatactgcatgtatctgaggcgctctcgggcagacgatgacgccgaaagaatgggcgccggggagaccctggctcgccattatatgatgctgcaagaactcgccgggagaatgttgggccatcctattccggagagcgctgtatatagggaaattgtctctggcgatactattgctgaccggcctgaaatgagacgcctgatgcaggacgtggagcttggacggtggaatggtgtcttcgtggccgatatcgatcgcctggccaggggtgacaccatggatcaagggctggttgcccagacattcttgtactctcagaccctcatcgtcacacccttgaaagtgtacgaccccgaggacccagccgataacgagttcttcgagatcagacttttctttgcacgacgagagtaccagatgataaaaagacgaatgcagacaggacgcgttaatgctgtcaaggagggatattacgtgagctcccggcccatctatggctatgagcggtataagctgccagaccgccgcggatggtccctgcggattgtggaggaccaagccgcagtcgtgaggaagatctatgattggtacctgcacggcgagaatggtgaaacactgggctgccaaaggatcgctaataggcttaacagtatgggggttaagaccctccagggattgccttggcagagcgatcgcgtactcaacgttttgaaaaaccccacatacaagggctgtgtgcagtggtaccagcgcagggaacaggttcatatgcaggatgggcaaaaggtcaagaaacggcccttgagtgatgaccatatcgttgtgcccgggtaccacgaagcaatcattgacgaggccctgtttgatcgagcacaggagttgatagtagacagaagaaacgccccaatccctggcaaaagaaagtgtgtcaatccactgactggactcatcaggtgcggtcactgcggatatgccgtgcggatgtctaacgctggccgaggcctggatggtgcatacctcaaatgtacttatattaatacctgtacgagctttgggattcgcttccggccagtggagcaagtagttctgaataccctccagtcatgggtggactatgacgtgtcccggttgccagaagaacaaaaacagcagactgaaaacaatgacgcactgagggctgctcaggagaagcaaattgccactctcaacaagcagctttcccggctgagggatctgttggaacagggagtctacacggtcgacgtgtacctggaacgagagagagacttgcgagcgagaatagaggcctgccagaatgcactcgagcagctcagaccgaaggagaaacctatggagcaggtgttggctgaatttgcgcctttggtcaaaaacgtgctcgaagcctacgcggctacagacgatcccgccgaaaagaacgcgcttctgaagaccgtgattgatcacatagtgtactttaaaaccgcaaaaacattgcgagggcacagtccccttgagtcactgacgcttgaaatctacccaaggctgcctaag

SEQ ID NO: 1494 - DNA, 1542 bp, unidentified
  source 1..1542: mol_type = unassigned DNA; note = Bacteriophage uvig_231300 from the Index of /pub/databases/metagenomics/genome_sets/gut_phage_database (ebi.ac.uk)
atgaggattgccatctatgccagaaagtccgctttcagcgagaagtccgaatccgtgaacaaccaggatcggatgtgccgagagtacgctgggtttcactttcccggagatcatacttttctcaattacacagatgaggacttcacgggcgccaatacagacaggcccgcgttgaagaaaatgcttaaggacatcaaaagcggaatcatcgacaaacttattgtataccaactggataggctttcaagagacgtccgggactttagtaatatgtacgctgagctcgaagcttgcggtgtggaattcgtgagcgtcaaggagaacatagacaccgaatctcctctgggcaaagctatgatgtatatctgtgtagtttttgcccaaatggagagagaaactataagcaaccgcgtgacagataacatgatcggtctggccggggctgggtggtggactggcggggtgttgcctcgagggtataccagccgccgagtttcagatgggggtaaagaacataccatgttggtgccagaccctgaaaaggcggaagagcttcgggagatctttgctgaatttgtcaagcttggccagtccgcacagaggttcacaacctattgtaagaggaataacataaaaatcgttccggggaagtacctgagcgaggggcaggtccataagatcctgagagccccctacggcgccccggcctgcgctgaaactcgccgcttcttcgtggacagcggggctacagtgttgggatccgagaaggactgggacggcacgtgtggcattatgatctacggcagaactcgacagagcaaaggatattctaggaatccagccgagaattggcgcgtgtgtgccggcaaacacgagcctattttctcagcggagctctggcttgcagcacagtcacagttgaccagtaacatctacaccaagaagaccaagtaccccacccaactgctcaaaggatctctgcggtgcccttgtggaaggctcatgaagatttctcggtataagaagcgctctggtggttataacgcatattacacttgctctagactccagtccacaggcaagagtccagactgtgtgagccagattaacgctaatatgctggaccaaaaagcactggacatcttccgccagattgagcgagatccagatatgatcaatcggtgctcacccttgctgtgcgatgcggatccagcagccgtaaaaaagaaagaaaacgagattaaacggctggaggacaaaattggaaacttgtctgcagcgctggctgaatccagtggcagtgccgcggctaagtacataatcgccgagattgaaaagattgatgcacagatcgctgacaagaaaatgcagctggccggcttgcaagcaagtgcactggccgctgatagggccgcagccgagctggccgcaaaacagaaagaaattgcccacctcgtgagaaatcttgaagccctcgatatagaggagcagaataagatagccagatcagttctgaaaaagtgcgtctgggatggagagtcc

SEQ ID NO: 1495 - DNA, 1386 bp, unidentified
  source 1..1386: mol_type = unassigned DNA; note = Bacteriophage uvig_476161 from the Index of /pub/databases/metagenomics/genome_sets/gut_phage_database (ebi.ac.uk)
atgaaggccgaaatcgacaggattattagggtagccctgtacattcgggttagcactgaggagcaggccctccacggttactccttgcaagcacaggaagatgagttgctgcattttgcgaaagagaagaaatacaaggtggtggggacatatcgggatgaggggttttctgctcgcaagcctgctctcaagcgaaaagtgatgcaggagctcctggatgacgtgcgcgctggaaagattgacaggatcctgttcatcaaactggatcgctggtttcggaacgtgtgggagtaccatcaggtgcaagctgttctggatgagaataacgtcacctggcaagccacgatggaggactataacactgccaccgccgacggccgattgaaagtcaacataatgttgtccgttgccgagaacgaggcggacagaacctcagagcggatcaagttcgttttcaatagcaaagtcaaccgcggcgaatacccctacggcagagtgccaatcgggtataaagcagaaatcgtagatggactgagaaagctcgtgaaagatcccgaacttgaggccgcaattacagctttctgggagtacgccctgaagtacaattctgtgagacgcgccggttttctggtgaatgccgaatacggcaccactagggcagccaaagagtggctccggactggaaagctggaaatctactgcggaacgttcgagggaatcccagacttctgtcctgcctatgtatctcgagaaaattggaaaaaaattcaggatcgaaaaaacctcataaagaaggcccaggcgtggaacgtctaccttttcagcggcctgatcacctgccctagttgcggccacacacttaaggctacatacaagagctatcccaatgataggtcaattaagtataacgcttatcggtgtaaccatggccgggataatactgggtgtacctatagaagttcagtttccgaaaaaaagaccgagaagtacctgctcgaacacatccgcgaaatgattgaggaatatatcagcgaaaccgaggtcggtgccagttccaagaagaagaagcgcattatcaagtttgacgtggcaaaagctaaggagcagcttagaagactgaatgtggcatactttgctggtaacatgccggatgatgagtatacagccatggcagcaaaactcaaagaagacattgccaaagcgctcgagtctgaatacgaagctgaaaaggcaccagacataggcaaactgagggcatttttggacacggacttcgaggctatctatcgaactctcgagaaggacgaccagagaaggctttggaggtccataatcaaagaaatacgggtcgaggacaatcacgtagtgggggtcacattcaatgtg

SEQ ID NO: 1496 - DNA, 1455 bp, unidentified
  source 1..1455: mol_type = unassigned DNA; note = Bacteriophage uvig_590668 from the Index of /pub/databases/metagenomics/genome_sets/gut_phage_database (ebi.ac.uk)
atgaaacttgctgcctgttacatacgcgtgagcactgatgatcagcttgagtatagtcctgacagccaattggaaaagattaaagagtactgcgcgcggaacggctacatcttgaaccaggacaacatcttcgtggaggaggagggggtgagcggccggaaagcatctcgaaggcaggaattccagcatatgatcgcccgggcgaagagtaagccaaaaccctttgatgcaattatcgtgtggaaattttcccgcttcgcgagaaaccgcgaagattctatcgtctataagtctatgttgaaaaagattgggatcgatgtgatctccgtgaccgagaacgtcggtgacgacaagatgtcagtgattacagaggcaattatcgaggcaatggacgaatactacagcctcaatctcgccgaggaagtcagaaggggtatgaccgaaagaattaaacatggcaatcacaactctgtcgctccatttggatacaagatagtcgacaaggagctggtggtatttcctgagcaagccgaaattattagagaagtgtatagtcgatacctgaatggatggggccagaagcagctggccacttggttgaacaccataggtgttactaccaatcgaggtggcaagatcgagaacaggacggttaattattggctccggaatccagtttaccacggctacgtgcggtggaaccccgctgagcgcgcttccaccaagcggtatatcaatacaccagacacaatgatcgtaaaaggacatcacgaacctattatcgatgaggagacctgggaagcagtgcagaaaaggtgcgacgaggtgagacttaagttttctaaacacaggagggaaaacatacccaaagactatgctttgagtggcattattaagtgctcctgctgcggagcgagcatgtccaccgcccacaagcaaaaatatctgcaatgtacgaagtatgcacacgggctgtgtagcacaagtcaccacgtctcatacgagatgatttggctgatgctgttgtccacgatagagtgtgatctgaaatctgggaattttcagctggaacgagtgtccagacccgtggtggccgacgatgccgaagctcttaatgcccagatcgaacgcactgaaatgaagctcagacgaatcagagaagccttcgaggcagggatcgataccctcgaagaatataagagcggaaaagcacggatctcagctgaacttgaggagctgagggagcgggctgctcaggtcagccctactgaagtcgaaataacaccggaggagaagagggccttcgctgagaagcatctgaagacattggccaaactccgcaatacagaggttggggagctcgagaaaaaccatctgttgaaggagttcgtaaaagaggccacttaccgcaaggccgacaactcactgtcagttatctacatggttgtggtactg

SEQ ID NO: 1497 - DNA, 1476 bp, unidentified
  source 1..1476: mol_type = unassigned DNA; note = Bacteriophage uvig_150568 from the Index of /pub/databases/metagenomics/genome_sets/gut_phage_database (ebi.ac.uk)
atgccaaaagcgaaggacttcagaacagcctgcgcttacattcgggtttcaaccgataagcaagaggaactgtccccagacgcccaaaaacgactgcttctggaatacgcgaaaaagaacgatctgaacatcatcaacgagcacatctttaccgaaaatgggatatctggcaaaaaggccgacaaaagaccagaattcatgcggatgattggcatggcaaagagtaaagagcaccctttcgatgtgatccttgtgtggaaattcagcaggtttgcccgcaaccaggaagagtctattgtttataagtctctcctcaagaaagccaatgtcgaagtcgtgtctgtctccgaacccctgattgatggaccttttggcagtcttatcgagcgaatcatagaatggatggatgaatactacagcattcgactcagcggtgaggtgatgcggggaatgactgaaaaagccttgcatggagggtaccagtctacactgcctctgggctacagcatggacaagagtacgggcataccggttattaataacgatattaacatcgttaagcttatctacagcgagttcgagaatgggatgacatgtatcgagatagctaggaagttgaattccctcgggtataagactcagcacggcaataattatgagtataggactataaagtacattttggagaaccccttctacgtcggcaaggtccgctggaacagacaacaccatgagacacatacaattaaagataagagtgagtggatcacggcttctggtaaacatgaagctgtattttctgaggaatacttcgagcacatccaggagctgatgatcaaaaggtcccgaccttacaaagccaggatcaccggaactcggcactggctttccgggatggtgaagtgcagcaattgtggagctagcctgggtatcaaacgctcaaacggatcctacacttattttaactgcctgaactataccaagggcagctgtaacgaatcacattatatcaccttgaaaaacctggagaatgccgtgtatgagacgtttatcaagagtattaattatgggggtaaacttcagttcgctctgagacagaggaatactgacgaacaccccgtggacaccgcagcaataattaaagaacagctcaagagactggaatggaaagagtcacggattaaaacagcctacatggacggcatcgacaccctcgatgagtatagagagaataaggagctgttgatgaaagagcgcaaagaactcgaagacgagctgaataagatcccagactcctcagacattgattacgaggcccagcttaagaaggaaatgttgaccgtgtatgacattatcacagacaagaacgtagatgaccggaagaaggcagatgcattgcgctccatagtggataagattgtgtatgacaaggcgaaggatgagatccacatctttttctacctgctcgaccccctc

SEQ ID NO: 1498 - DNA, 1764 bp, unidentified
  source 1..1764: mol_type = unassigned DNA; note = Bacteriophage uvig_76620 from the Index of /pub/databases/metagenomics/genome_sets/gut_phage_database (ebi.ac.uk)
atggctaaaaaacgactggctgccgccctcgacgagaaaaaggccgctatatacaaaagggtgtctacgcaatatcaggtggatcgcgcctctctgccagtacaggaaagcgagctgattaactattgtaagtacgctctggggatagataactatgagatttttgaggatgcaggctactctgccaagaacactgatcgccccgattatcaacggatgatggctagaatacggactggtgagttcactcacctcgtcgtttggaagattgacaggatctcaagaaaccttctggatttcgcagccatgtacagtgagcttaaggatcttggagtaacctttgtgagtaaaaatgaacagttcgatactagtaatgccatgggcgaagctatgcttaagatcatcctggtgttcgcggagctggagcggaatatgacctccgaaagagttacacaggtgttgatgagcagggctaaagatggtatctggaacggaggcaggccaccctacgcctacagctatgataaacccagcaacaccttttccgtcgtcgaagatgaaaagaaagtggtgctcttcgtgtacgatacatatgaagcaactgagagcctcctgctgaccacaaaagccgtgaacgagaaagggatcgtctccaggaatggcaagccctggagccctactaccattcggaatttgttggcaaatcctttttactccggaacattgagatacaattacagagacatcaccaggtctaagaccgtctatattaagcctgaggacgaatgggtgctggttgaggaccatcatgaggccattgtgagtaaggaacgacaggcccgagtgatgtcaatcctcgaatcaaaacggagagggggcggaaaactgggactgacttatcagcgcaaaaatgtccacatatttggcgggcttcttaagtgtggttgctgtgggtctagtatggtttgcaccgtcgatactagggaacgaaagaatggcgtgaagccatcaatctacgcttgcagccgccgcagacgcttcaacgattgccaaaacaagtacattaccgacttgaccataggtccgtttatcttcaactttatagcgaatatgattaaggcttccaactcttttgggaagacgacatccatggacacattgcagaaaaaactgctgcggggcgaagctcttgcagacgtggaccatattggtgaggcaggactgagcgagctctacaatcacttcagatcaggatttgacggctctccttttgaagcgactaaagtggcccaggttcaggccgcaacggacctgtccgagcgggaaattctcctctccgagcgcaggagactggaccgcgcactctctcgactgaagaccctgtacctgtattcagaggaggctatggcggagaaagattatgttcttgagcggaaagaacttacagaccgattggaagaaaccgaccagcggctctcagagttggacgcccagattgccgcagccacacccatgagcgacgaggaattcatggctaaagcaagttatttcatcctcagccaagagctgcaaggcaaaagggaggtagactatccaaagttcattacaaacgcggatcctcagatcctgaagaacttcatcaagaacgtcacaacaaatttctgtatcaagaacggccgagtaacgtccatcttgtttaagaatgggatcgaactgcagttcttttacaagccgtccaaggacgacaagagtccagagaccgcc

SEQ ID NO: 1499 - DNA, 1542 bp, unidentified
  source 1..1542: mol_type = unassigned DNA; note = Bacteriophage uvig_419578 from the Index of /pub/databases/metagenomics/genome_sets/gut_phage_database (ebi.ac.uk)
atgagcaaaattgcagtgatctatgcccgatatagtagcgaccggcagcgcgaggaatctatcgaaggccaaattcgagaatgcaaagcttatgcgaagaagaatggtatcacagtgatccgagtctactgcgatagagcaatgaccggcaaaaccgacaaaagaccggaattccaagccatgattaaggatgccaaaaagcaagacttcgactacgtgcttgtttataaacttaaccggttcgcccgcagtagatacgatagcgcccggtacaagaacgttctcaaacagcacgggataagggtgatttccgcgatggaaaatatcgctgaagattcaagcggcattttgctggagtctgttatagagggcctcgccgagtactactcagctgaactggctgaaaacgtgctcagaggaatgactgaaaacgcactggagtgtaagtggcccggcgggattgtaccactgggattcaaactggacaagaacaagcacctggtgattgatgatgacaaagcctttatcgtgcgcgaaattttccaatcaataattgacggcaagaggaccagcaccataatcgatgagcttaacgccaggcatcttaaaacagcggcaggcaagccctttaggaagaatagccttgaaaagatactgaagaatgagaggtacactgggacatttgtctggaaggatatcagaaaagagaacgccttgcccgccattatcacaaacgatatgtttaacgctgtccagaagatactgaaaaacaggaagaaaacaaggagtcgggtttgctctgacaattatctgatttcaggtcgactgttctgtggtctgtgtcacgagaagatgatagggatgtccggccgctccgtaaccggactcccttattattactacgcctgttccaaccgcagaaatagaatcggaaagtgccataccaaaaatatccgcgccgacaaacttgaggaacttgtggtcgatactactatcaatattctgtctaacgataccgccatcgagtacattgcaaagcaggctatcgctgctcaggaggagaatcgagcccagtccagcatccccgcgattaaggaggagattaaagagctgagcaaaaaactgaagaattgtatccaggcagtggagaacggaattatcagccagacaatcgcagagaatataccaatgtacgaaaagcggctcgtggagttgaattctgagctctccgacgaactcgagaaggacaacgacttgaaggttgatgaagacatgattaggttcttcttcgagcgcttggtgcagcggacgaagaaagaaactaagtttaaaagtctcctgctttctaccatggtacggtgcgtggtcatctatgacgactacatcgaaatccagtataattataagaaagagttgcctatcctgacgaatccagtacgaattaactcttcaatactgtttgcagtggtcgagtgctccgggctccagtccaactttatcttctatcctgaagggtttagttacatcgtgcggagagtcgct

SEQ ID NO: 1500 - DNA, 1479 bp, unidentified
  source 1..1479: mol_type = unassigned DNA; note = Bacteriophage uvig_282819 from the Index of /pub/databases/metagenomics/genome_sets/gut_phage_database (ebi.ac.uk)
atggggcagaagtgcgtaatctacactcgctatagctccgatagacagcgggaggagtccatcgaaggacaaatccgggtatgcgaagactacgccaagcgaaacggcctggaggtgctgcatatctacgccgacagggctatgactgggcggtctgatcagaggcctgaattcctgaccatgatcagggacgccgcgagcatgtcttttgacactgtacttgtctacaagctgaacagatttgcacggaaccggtacgatagcgctaagtacaaacataagctgaagaagtatggagttaaagtggttagtgcgatggagaatattgctgacgatccatctggaattctgcttgaaagcgtgatcgagggcatggctgagtactattccgtggaactcgccgaaaacgttgtcagaggaatgacagaaaatgcacttgaggggaagtggccgggcggaatcgtgcctttgggttataagcttgatgcagaccatcaccttgttattgacgaacccaacgccctggtcgtgcgacgcatctaccagatgatcctggatggtcgaacaccagcctccatttgccgcattcttaacgccgaaggtaagaggactgccacgggaagagcattcaatcacaatagtataacccgccttctctccaatgagagatatatcgggatattcagctggcgggacgtgaggcgcaccggcgtcgtcccaaggatcttggatgatagaaccttctacgctgtgcaggagctccggaaatccaggcagcgccataagggcgtcgctaaacgatcagagaactatatgttgactgggaaaattttttgtgggagatgtggctcccccatggtcggaaagagtgggacaagtaagggtggctgcatctattattactacaattgccaacgccacatcgatggttccggctgtccggcacgccccgtgcgaaccgacaaactggaagacagggttgtgcaggtgaccacaaaaattctctcacaacctgacgctattaaagctatagcacggcaagccatagccattcagaaagagaggcgcgagagcctggaggttcagtctctgaaagcccaggtctcagacctctctaaaaagctggataactgtctgaaagcggtagataatggagcattctcagaaaccttgtgtaaccacatgcggggctacgagaatcggctgagagatatgaaagccgctctttctcgcgcgcagctcatggacagagggggcaaactcacggaaaagcagatcgagttttttttctttgcaattagcaggcaacttaagcaggagccccgatataaggagattctgctgtcatctttggtgagatgcgtgatcgtgaacgacgacagcattgagatacagtataattacaagaaggagctgcctacattggccaacccagtgaaggtgaagagtagccacaaagtgctcatggtcacacccgaa

SEQ ID NO: 1501 - DNA, 1650 bp, unidentified
  source 1..1650: mol_type = unassigned DNA; note = Bacteriophage uvig_577253 from the Index of /pub/databases/metagenomics/genome_sets/gut_phage_database (ebi.ac.uk)
atgaaaatcaacatgcgagttgccatctacgtcagagtaagtactgacgagcaggccgatcgcggcaccatcgaatctcaaattgagttcgggaataagtattgcgacttgcacgctatctctgagttcgagttttaccgagacgacgggattaccggaacccttcctttggaggaacggcctgaaggtgcgagacttttcaatgatgcgaaagagaagaagttcgatacgctgctgatctacaaactggatcggcttggaagaagcgccagggtcatccttaacgcagtgtatgagctcgaacagtatggcattaaagtgaagagtatgactgaaccgtttgatacaggagatccagctgggagatttcttctgacaatgcttgctggcgtggcagatctggagcggagcacaattctggagcggctctggcatggcgcaaatagggctgctagggacggcaagtggatcggtggcattgtcccttacggatatttcgtcaatgatcagcgcttcctggaaatctccactgagaaaatgcccgggctggacctgagcgaagccgatgttgtgaagctcatcttcgacctctacaccaaaaataggttgacccatgtgaaaatttgcgactatcttaacgcacttaaaatacccccaagctatgccctggccggaaggaaagttactaaaggtaaacgcaaagagaatacagccggaatttggatcccgcaccaaatagggagaatgataaagaacagtacctacaagggcatacacatctacggcaagaggtcttcaaaacaaagggagcttatcccacgggaggtacctgcaattgtctccgtagaacagtgggatctggctcaggtgctcttgaaggaaaacaagcttgaattctttaaggaaaagacgcggaactatctgctcagaggtttgattctgtgtgaagaatgcggccatcactacaccggcgctccctacacacagtataagacgaaggagaaaaagactttttaccgatgcattggtaaacaggtctacaagaacaaggagaaagagcggtgtaaagtgaagaatattccaggaacctggttggagaatatggtgtgggaagactgtctcaacttcatcaacaaccccggggacgtgctgcagtccattaaccaaaaaatagaggaaaccaaggtggaaactagaaattatgaggaggagctgaaactgattacctcctccatccagcaggtggatgccgaacgacaaagcattttggacctctatcgaaagaagctgataagtagcgcagatatagaaactcagttctcaaaaatcaatatggagtccgagctgcttttgaaaaagaagaacgagatcgagtcactcttggccgccaatgattcttcagtcgcacgcgccaattctgccgaagactacctggcgtatctgcggaataagatcaaagacgggaatccttcttttcaacagaagcgcgagatcgttaaagctatcgtggaaaagatcaaggttcgcaacatagacatcaacgggaagactgagatcgacattaagattctgtacaggttttcaccccaccagacaacactcagcccaaacacctgtaacacacgcttgcagctcagactgtttccccag

SEQ ID NO: 1502 - DNA, 1380 bp, unidentified
  source 1..1380: mol_type = unassigned DNA; note = Bacteriophage uvig_257578 from the Index of /pub/databases/metagenomics/genome_sets/gut_phage_database (ebi.ac.uk)
atgatcgaaaggtgcgcaatctacattagggtgagcactgccgaacagtccatgaaggggcattctctgcaagcccaacgcgagtatctcgaatcctatgcagcttcccatgatatgagggtggttgggatctacgcagacgaaggccaaactgcacgcaaggagttgaaaaaaagaaaggctatacacgctcttcttaaggacgtggaagctgataaaattgatgtcattctgttctggagaatggataggtggttccggaacgtcgccgacttttacaaagtgcaggacatactggatgcccatggcgtcagatgggtgagcgcctctgaaagcaatatcaatatggaaactcgagacggacgcctctgccttaacctcattctgaccatagggcaaaacgaggtggacacgacctccgagagaattaagtttaccgtcaataatatgattcagaacggtaggatggtgtggggagcaacaaatctgccttttggttacatgattgttgaagagaatggctgtaaacgaatggctaaggatccagagacagcgtgtatggtagaagagttctatcgattcttccggcagacacacaagaagcgcgccactgtgatgcacatgcgggacacatttggaattaatttttcatacaccatgcttagaacaatgttgagtagcgagttctacatcggcaagtatcggagcaacaataactactgcccggcgtaccttacccttgacgagtggaaggaaatccaagctattagcgagaacaacatcaaacggcccagaactggtagggtttacttctttagtggactcgtccattgccccgtgtgtggaacgaaaatggccgcctgtgccgggcggagtatcatcaatcggaagaccggcgagaaacgcgagtattattactatcgatgtaacaaggcgattttgaataagcagtgctcatatacctcacgcatatctcagaatctgatcgaggagtacctcttgaacaatctggacaccgaatacaggaaatatcaggtgagatgcaacaaggtgaaggaggctcaggcccacaaaaaaaagaaacgatccgctgattcagtaaggtccgaaatggaacggctgaatattctgtttcagaagggccggatcgagtttgactattatgaagagcagtacggcaagctcgaggacgagttgaagtcttttgatgaagtaatcatccgcgaaaaggatcactctaacgttgttgggatgctggattcagatttcaaagagatgtactctagcctgagtcttgagaacagacaggccttctggcagcagataatcaaagcaatctatgtgacaaaagaccgaaacgtcgactacgtcgatttcctg

SEQ ID NO: 1503 - DNA, 1386 bp, unidentified
  source 1..1386: mol_type = unassigned DNA; note = Bacteriophage uvig_437230 from the Index of /pub/databases/metagenomics/genome_sets/gut_phage_database (ebi.ac.uk)
atgtcaaacacacctaaaactattacaagggcagccctgtacattcgggtgagtactgaagaacaagcccttcatggctacagcctggaagcgcaggaagccgccctcaaacagtatgctatagaccacgattacaaagttgtccatatctatcacgatgagggctttagcgcgcgcaaacctgtaatgcgaagaaaggtgatgcaggaactgcttgccgatgtgcaggctggaaaaattgacctgatactgtttactaaactcgataggtggttcagaaatgtgcacgactaccatcaggtgcaagccgtcctcgacaagtatggcgtggcctggaaaaccatccttgaggactaccagaccaccacggctgatggaaggttgaaagtgaacattatgctctcagtagctgagaacgaggccgacaggacatccgagcgcataaagtttgttttcgacaacaaggtaagaaatggggaatattgtttcggcgggcccatggctccctacgggtataaagccgaggtgattaatggcgtccggaaacttgtgaaggaccccgaaaccgagtctgccaccgctgcattttgggacaaaatgatcaagtatcacaacacaaggagagcagcacgggagactaatctggagtatggcatatctagagaccatcagagctggcgcaaggtggtcaggaacaagatctacacaggagaactcagggggatcaaggatttctgcccagcctacatctctgctgccgattggcaagacatacagtatccagaacggcggatcaagagtacccagggtgaccgccactacctgttcgtgggcctgcttcgatgtccagtctgcggttgcaccctcaaggcgacttttaagacatatcctagcgacagatcaaaggagtactatggatatcgctgcagcgctaaaagtctggggcgatgtacgtactcacgacagctctccgagcggaacttggaaaagtaccttgttgcgcatttgagagagagcctggagtcctacatcgctaagctccagttgtctgccgccgcaccgaaaaagaagaggaaaaaggcagacactacaaaactgcgggaccagctgcgccgactgaatgttatctacctcggtggaaatatttccgatgatgactacaatgcacaggctaccattttgcgagacgcaatcatcaaagcagagcaggaagaaaagcaactggcccaagttattgatttcacggctttgcggcagttgctcgatagcaacttcgagctgtcttataagtccatggatagagaggaaaagcagcgcttctggcactccatcatcgccgagattcagctggatgataatcaagtcaaagagattatctttaagagt

SEQ ID NO: 1504 - DNA, 1692 bp, unidentified
  source 1..1692: mol_type = unassigned DNA; note = Bacteriophage uvig_594175 from the Index of /pub/databases/metagenomics/genome_sets/gut_phage_database (ebi.ac.uk)
atggaggtaatcaagtatgtggtcgcatatatgaggtattcttccgaggggcaaagggatggatactctatcgaagcacagaaagctgctattgaggaattttgcaaacggctggggtacataatcgtgcacttctacactgacgaagccaagacaggaacacttgacaacagagaggccttccagcagatgattgccgattctgcctctgggaatttccaggccgtcattgtacataagttcgaccggttcagccgcgacaagtatgacaacgctatctacaagcgggaactgagaaataacggagtgcgagtgatatccgtgctggagcccttggacgattcacctgagagcctgattcttgagacccttctggagggcatggctcagtattacagcgagaatctggctagagaagtaaaaaaggggcagacccagaaggccttgctcgcccagcactgtggcggcattgttccttatggatactccgtgaaccccgatacctccgagtatgagatcgtccctagtgaagccgaggtggtccgaaagatctacgagctgtataacaatggcacacctacacaggagattgctggccatttgaatgcacttgggctgaaaacccgcctgaacaagactaaaggtggagttccctttactagccagatggtgcggggcataatagcgaacgagaagtacaatggcacgtttatctatcggaagactaaaaggattcgggcaaaaggtaggtacaagaccgtaaagcaaaatgacgacgaggttatcgtttgtgaagataaggttccacgcatagtcgataacgaaacttgggttacagcaaataagcgcctcaggtctagaacctacaatactaccagagcaaaagtggaatatcttctcacggggctcatgttctgcggcgagtgtggctcaccgtttgtcgggggcggaagcgtaccaagatacgataaggagggtaacgaggtggcaaggtataactactacatttgtagtaaaaagcgcaaaacccacgactgcaagtgcagccaagtcagcaaagagcgaattgaagacgcggtgatcaaagggatcattgactattgctacaacgacaagagtatcaagatcttcgcggatgacttttcccaatggctggaaacccataataatgctgataaggctgagatcgcccgctacaagtctgagttgaaaaagttggagcagcagaagggaagactcgtgtcactcgcccttgagggagtgctgaccccagtggaaacaaaagatcggaaacgggaattggaggccaaaattacttcacttcaagcgaagctgcagtccatggaaaaaacaaacctcccatccaaaaaagacatcatgcgctttatggaagacacaaggcgagatattgtgaatgggacttttgatgactatgccggtctgattagacagcacctggccaggattgacgtctataacggttaccagatcataacgctcaaaaaagtgccgtacctgacagaacctgatgaaaacgatggcatcagtgcttatcattcacccgccaagagtatctcagactctgaatgtaagccactccactaccatagcgttagccttatggatctccccaaagaactgaccatcacgctgcgccttgagaagggctcccacgaggctgtgttcgtcgca

SEQ ID NO: 1505 - DNA, 1548 bp, unidentified
  source 1..1548: mol_type = unassigned DNA; note = Bacteriophage uvig_593397 from the Index of /pub/databases/metagenomics/genome_sets/gut_phage_database (ebi.ac.uk)
atgcagacagccgtgatctacgcacggtatagtagcgacaagcaaaccgagcagagcattgaggggcagctgtacgattgttataactatgctaagcagcatgggatcacagtggtgcaagaatacattgatcgcgcaatgaccggtcgcaatgatgacagacctgactttcagagaatgatttccgatagcgccaaacacacattcgagctcgtccttgtgtggaagcttgaccgattcgcaaggtccacagaggacgctgcctacaaccggggaaagctgaaacgaaacggagtccggttgctgtcagttaaggaagattttggggactctagtgccggggatctcatgatgcacgtcatggagtcttttaacgagttttactctgccgatctgcgcgaaaaaacagtacggggtatgcatcagtcagcactgaaatgtcagtccactgggggccagataccgatcgggtataagatcgagggtaagaagtatgccattgacgaggctactcgctttatccctgagacggtgttcagaatgtatgcggaaggtaaaaggcttgctgagattgccaggtaccttaatgaaaaaggatatcgaacccggatggggagaaaattcaccaccggaagcttctacaccatgctcagtaacgagaaatatattggtgtgtacaagtacggagatgttcgcatcgagggcggttacgaggctatgatcgacccagtactcttcgatgtggtacagaaaaaactggttgaaaataagaagagggctcccaaaatttctgaacgggagaacttctacctcaccgggaagctgttctgcggccactgcggcgaaccaatgaatggaatgtcaggaaattctaccaagggaaagcacttgtattacaggtgcaatggcgtgcgcaaacatactggctgcgacaaaaggacagagcgcaaggaggaactggaaaacgagatcattggcgccatccagagagcatttgctaatgccgatcctgaagagcttacgagaaaggtcatagaaaattacgagaagaattccagaccagccgaccaagtgaaggtgatgaaagcggagttgcagaaaatcactaacaaggtagataacgttgtcaacgccatcgctgagatgggcggcaacgaaactctctacacccaactgcgacagctgacagagcagaaggagcaaaaagaaacagagattaggattgccgagcataaggcggacgacatgcccaccgtggaactggttaagaagatacttgatctgatacagaacgcggacaccatgactgacgagggcagacagcttctcattgatggggccgtgtcacggatctatgtgtatgatgacagccttgacatctactttaagggagggaagaatactgaaatacccttgaatcccgcaaacaaggacgatgtgtccgacaactccttcgcttgttgtaaagaatggggcgcaaaagcacacacgggcgaacctttggtcattatcaatggcagcctgctcctgagtgtcaaaaggatcaaa

SEQ ID NO: 1506 - DNA, 1551 bp, unidentified
  source 1..1551: mol_type = unassigned DNA; note = Bacteriophage uvig_225515 from the Index of /pub/databases/metagenomics/genome_sets/gut_phage_database (ebi.ac.uk)
atgtcttactgcatctacctgcgcaagagccgaaaagatttggaagcggaacaggcaggacagggagaaacccttgccagacacgaaagaactctgctctctctggctcgccagaggaacctgattattgggaacatctaccgcgaaatcgttagtggagagtccattgctgctcggcccgtgatgcaaaagttgctcaaggaagtagagtcagggatttgggatggggtgctggttatggaaatagaacggcttgcccgcggcgatacaatcgaccagggcacagtccagagggctttccagtactccaacacatatatcattactccccagaagacctacgacccatccaatgaattcgatgaggagtatttcgagtttggactttttatgtctaggcgagaatacaagactatcaaaagacggatgcaagccggccggtacgccgctgccaaggaggggaagtggccctttaacgccgccccctacggatataggcgagttaaactccagaatgaaaaaggatggactctggccttcgacgacagcgaagcaagcgtctgcagaatgatcttctctatgtttaccggacctgacagaaaaggtatcacaattatcagacggtaccttaaccaacacgggataaagccaaggaatggtgatctgtggacggactcaagtatcaggtgtattctgagtaatccggcctatgatggtaaagttgccattggaaggaggaaagtcgtgcctactattgagaacggcctgcccaccaagactcgaccacgctccaacgactacgcggtgtatgagggcagacaccctgcgctcataagccatgcaatctatgcagaagctcagtcctatctggggcacggtacgcctaagctgcctgaatcatacggggtgaagaaccccctcgccgggcttattatatgtaaagagtgtggcaaacgcatgcagcgcaggccagccacaaatccgtgggtgaagaatggtgcaaagtacgacatgttgatatgccatacagacagttgccctaccgtaggctcacccctggatctcgtggaaagagaactgattcatgctctggaggactgggtgtctggctatgagctccaagagacgctgccagagtctcgcgtccctgagttggaacaaatgctggagtccgcgaagcaagagcacgacaccagcgagaagcagaaaagccgcttgtatgacctccttgagcagggcgtgtatgatagcgagactttcctcttgcgatcacgggcccttcaggatagactcgaggagtcattggcaggcgtcaccaggctcgagcaggagttggaatccgaacgaaagatccaggcaaacatcacaaattttttgccggcctgtcatgatctgctgagctgctactggagcctggacgctcccgaccgaaacaaggctctgaaaatcctcatcgattctgtggattatcggaaaacctcccggaataagaaaggcgaggcagagaaagctagttttgagctgaccataaagccaagaattccacggatc

SEQ ID NO: 1507 - DNA, 1521 bp, unidentified
  source 1..1521: mol_type = unassigned DNA; note = Bacteriophage uvig_107724 from the Index of /pub/databases/metagenomics/genome_sets/gut_phage_database (ebi.ac.uk)
atgaatgccgtgatctatgctcgatactcttcagacaatcaacgcgaagagagtatcgaaggacagctgagggagtgcagagagtatgccgaacgaaatggaatgaatgtggtagctacctacatcgatagggcccttagtgccaaaaccgacgataggcctcaatttcagcagatgatccgggatagcaacacgcacaagtttgaggtggtgcttgtgtggaaactggatcgcttcagccgcaataggtatgattcagccaattacaaaaggaaactggctcaaaatcatgtgagagtggtgagcgcgacagagcccatttccaacactcccgagggaattatgcttgaatcattgttggaagggatggcggagtattattctgctgagctgtctgagaaagtttcaagaggtcacaaggaaaatgccctgaaagctaagttcaacgggggtacgatccccctcggttaccggattgacgagaatcagcactaccagattgaccctgccacagcaccgttggtcctggagaccttcgaacggtacgcagatggagaatgcgttcggaagatagtggaaagttttaacgcaagaggcttgagaacgtctaggggcgcaccttttagcatcaactcctttcaagccatcctcaagaaccgacgctacctgggcgagtataggtacaaagacacagttattcctgacgctattccggcaatcattacccccgaggtctttgaaaaagtgcagagacgctgtgagcagaacaagaaagccccagcccacaccaagactgatgtcaattatatgctgaccactaaactgttttgtggcaagtgtggggctatgatggccggcgagtccggcaaaagtcatacaggggcgtggcattactattataagtgcgggaatcataagaggcatgggcgcagcgtctgtgacctcaaggccgtacggaaggagcctttggaacgcttcgttgtcaaggtagccatcgagaaagtcctgaagactgacactctggagctgctggctcagaagcttctcgaatatcagaacaaggagaatacacggctcccagttctccaggccggcctcaaggacatatccaagagaatcaataacatcgtgtctgcaattgagcagggaatctttacccccgcaaccaaacaaagactcgatgaattggaagagcagagaaaagagctggaggcttccatcctgcaggagcagatagcaaaaccactgcttacacgagaacagattcttttttggttcgaacggttccggcaaggagacccaagcgatccagcgtaccagcagaagattatagattgcttcgtaaactccgtgtacatatttgacgaccaccttgtgattaacttcaactaccgcgacggggataagcttgtctcactccaggaagtgaagagctccttccttggcggtaaccgatctcccattttcaaacctcactgcatcgctaagaacggccttactgtcaggttctttttcatcctg

SEQ ID NO: 1508 - DNA, 1497 bp, unidentified
  source 1..1497: mol_type = unassigned DNA; note = Bacteriophage uvig_286002 from the Index of /pub/databases/metagenomics/genome_sets/gut_phage_database (ebi.ac.uk)
atgtccgaaaatttgaaagaagtttgcgcctatatccgggtgtctactgataaacaggaggagctgtctcccgagagccagattcgccttattaaggattatgcggaacaacacaatatgcttctcactaggatctaccaagaggataaggggattagtggcaaaaaagctgataaaagaccagcttttcaggaaatgattgctacctgcaaagacaagagtcacccttacgacgctatattgctttggaaattttcccggtttgctcgcaatatagacgagtccacatactataagtcagtgttgcgaaaaaagtgtaacgttgacgttatatccgtatccgagccaatcacagaagggatgtacggcagacttatcgagatggtcattgaatggtctgatgagttttatctgtataacctgtcaggcgaggtgatgcgcggtatgacccaaaaggctctcaaagggggctataacagtaacgtccccattgggtatgtaaaagaacgcggccgggacaagatccctcagattgagccaaagggagccgagatcgtcaagaaaatcttcgatatgtacacagaacagaacatccctatgggtgacatcgcagctagactgaataaggcaggatacaggaccgcacggggctctctgtttgaaactcgggtggtaggttacattctggagaacccattctacattggaaaaatcagatggaactacttcgacaagcagtccaacaagaggaagagccccgataatgttattatcagtaagggaaagcacaaagcgataatctcagacgagcagttcagcaaggccgccaatcgaagggctcacgataggctgaggaccggatataataagaagcgcagacccgccccgctgctggccaattggctgtctgggatgataaagtgtagcaagtgtggaggtagcctcggctttgcccatggcggggcaaaaacagtcccgaatttctgttgctggaagtattctaaaggactctgctccacacgaaatgggattactctgaaaaatgcggaaaaagaggtgctgaccatcctggaggagctcagctcaagcggctacttctacaactataacctcaacgtgatcaatacggagaacaccgagagagcctatattcttaaggaacttcggtctctcgacacgaagatgaaacgcataaaagatgcatacatcaatgagatagacactctcgaggaatacaaggccaacaaggaattgattaacaagcgaagagaagaattgaacaagaagttggaagccgcatcagtcactgtgcatcctgctgcagtgcacaaagccgtggacttccaggccctgatcgatattatcaaggacgagaattccaatgacaccgagaagcataacgccctgcttgaagtcgtggagcatttcgtctgggataaagagacccaggaaatgacagtggtgctgaatagcgatatcagtctcgttaactgcaaa

SEQ ID NO: 1509 - DNA, 1434 bp, unidentified
  source 1..1434: mol_type = unassigned DNA; note = Bacteriophage uvig_25355 from the Index of /pub/databases/metagenomics/genome_sets/gut_phage_database (ebi.ac.uk)
atgagcaaagaacttaagaatgccgcggcttatattcgcgtgagcactgacagacaaaccgagctttcccccgattcccaactcaaagtcatacgacagtacgccaaacagaatgggtacattatccccaaagagtatgtcttccgggatgatggtatttctggccggtctgctgaaaagcgaccctctttcaatcagatgattgccacggcaaagcagaatccttctcctttttccgcaatcatggtgtggaaattttcaagatttgcccgaaatcaagaagaggcgattgtgtataagtcaatgttgaagaagaatggcgtgacagtgatcagctgctccgagacgctcgacgatggtccgtacagtagtcttatcgagcgcatcatcgaatggatggatgagtactattcaatcaggctgtcaggagaagtgaaaagggggatgactgagaaagtgcagaggggccagccagtaagtatatctgcttttggatacgacatcgctgacaaaaagtatgttatcaatgagcagagcgccccaattgtgagaaagatattcctggactaccttaatggcaaaggcacccggaagattgctagtgaactcaacagcctgggcatcaagacaagccggggaaataactgggaatccaggacaatagagtatatactgcagaatcccgtgtacaccggaaagattagatggaacactaacggtaggactgacaggaattacgatgatgataacattataatcacacagggagaacacgaacctattattgagcaaaacgccttcgacgaagttcaggaactcattgcttataatcataagtgtcactccaagtatactcattccacagttaaaaccgagttcatgttgcacggtctggttaagtgtagctcttgcggggcaagcatggcaatgaccgctaaaggccaggggttgcaatgcataaagtacgccaaaggcgcctgtaaagacagccactacatatccatggataaaatcaacgcgatcgtgctgagcggcatcgagaaggtctttgagaacgagaacatcaacctcaacattaaagggaacgatagtaaggacgacttcatcgactacaacgccctgatcaaaaaggagtacaagaagctgtcacgcatcaagaccgcatatgccgaaggactttacaccattgatgagctcaaggaatatagacaggtaatcgagcagcagatcaacacattgattaacagatgcaagtcatcagtcttcaacgagtccgactctgacgtgaaagtcatttctaagaacaagaatctgctgaatcatttgcgcaatcctaatatctccgagcaggaaaagaacgtgatgctgcgggggttcgttgacaaaatcgtatttgaccgcagtatcccaaaagtcgatatttttttctatatc

SEQ ID NO: 1510 - DNA, 1608 bp, unidentified
  source 1..1608: mol_type = unassigned DNA; note = Bacteriophage uvig_457901 from the Index of /pub/databases/metagenomics/genome_sets/gut_phage_database (ebi.ac.uk)
atggacatccatagttggaagcaaaaaatgacctatggcatgattctgccagtagccacagttttcgcagtggcttttagtattgaacggggtatcttcatgacccggaagtcaagaaaacaccagtacactgaggggttgaagtcctctgcgcctgtggcggtcggatacatcaggctgagcgtggcaaacaaggaggaatgtagctctatcgagaaccaaaagttcattattgaatgctggggcgagcagcatcagattcctatcagccactattacatcgacaatggcttctcaggtaaaaggttcgatcggccagcatttcaagagatgattgaggacatcctcgccggaaaaatcaattgtgttattgtcaaagacctctcccgcctcgggcgcgactacatcatcacaggctactacatcgaggtgatatttccgattaatagggtccgctttgtgtctgtgaacgatcagtttgatactattgacggaattacaaaccaggagcgcccctatagcagtaggatacgggtgccgatcactaacgcctttaacgagcaagtgagtatcgaaattaagaagaagatggaggccacgcttgacatgaaagctcagcagggaattttcatcggtccccgcgctccatttgggtatcagaaagcggaggataatcacgatcagctgattcccgaccccaaggctgcaatcatcgtgagaaaaatattcgaactggctgccaacggcatcggaattacagccatagtgagatacctgaatgagaaggaaatccctacgcctatccagtatgcccgagcaaacgggttgtctggtaattatgataatgggaatggaaattggaactcacgatccgtcaagtatattcttaccaacagaacttacacaggcatgctggtacagggtaaggagaaaagggtcgtctcagcgacccatgaagctctggttgataccaataccttcgatgcaatacaaaaaagcttccaggagaaggccttcaacattgctaagcatgggcagtctaccgaaaatattcttaagggcaaagttatctgtggatgctgcgggggcaagatgcagaggaaacacggaaccaatcacgccgactggtatttcttcacatgtattactaaaaatcggcttggcgttgataagtgcactgggatgtacgtgagagaggaagatgtcttgcgggcaatctattaccagctcaaactgtatgtaaaagagcatttcatctccgacagccagtataaacaggagctgatgaggctcaataacaagattgaccaatctgatagccagtatcaagaggcctttcggaacgccgtgcgccactacgaacgatttgtagacggcgagatttccaaagacgaatttcgagtggtgcaggacgccgctaacgagaagaaggtgattagaaacgacataatcacttccaagaccgcatacgagaagcaataccaggtctttagaaagttgctgaaagcttcatacaaagaaatcacgctgtccgaaatcatggattgcataaacgaaatcatcatctacccaaataagaacataacagttaagtgggccatagaattt

SEQ ID NO: 1511 - DNA, 1638 bp, unidentified
  source 1..1638: mol_type = unassigned DNA; note = Bacteriophage uvig_247278 from the Index of /pub/databases/metagenomics/genome_sets/gut_phage_database (ebi.ac.uk)
atgtctcgcaaaaagcaagtgtacgagaagatcacagctctgtactgccgcattagtctcgacgacggcggggataacgagagcatgagcatatccaatcaaaagattatgctgcgagacttcgccgaaaaacatggcatgttccaatatgaatactatgtggatgatggatatacagggcggaacttcaatagaccagcattccaacggatgattgccgacatcgaggcgggaaaaataggttgtgttattaccaaggaccttagtcgcctgggcagaaactatatcgaggcaggatcttacatcgaaatctttttccccaagcacaatgtgcgctatattgcaatcactgatggtgtcgatagccttacacgccaagagatggatatcacaccgttcaaaaacattctgaacgatatgtactcccgagacatctccaagaaagttcttgctggtatcactactagaagcaggcaggggaagttctgcgggggcacacccccgtttggattgatgcgggaccctgaggataaaggccatctcatcatcgacccagagacagctccaattattcggaaaatctatgattacgcccttgacggccttggctgcatgagaatttccaagcgcctcatggaagagaagatccccataacccacgtcaaagcgaacaccgagtttgacgctaattactacttctggggcggtgctcgaatatcacacatccttaggaatcccttttacaagggggcccacctcgtttttaggacccatcaaaaggggataagatctaacacctacgacataatacctagggatcagtgggaggtaattgagggttgccacgaagccatcgtaacccctgaagaatgggaacaggtccaggagttgatcgaccgaaggcctaccattcagggaaattcctgtccattctataatctgtttcatggtcttgtgtactgtgccacttgcggaaaaagtatgcaggtgcgatacgaaaaggtggggcgaacgggaaagaatcggtttacgggcgagatgcgggagcccattgacaaagcttactatatttgccagacctataacagaatggggtgtaaagtctgttcttcacacaagatcgaagccagggacctctacaacctggtgctcaaggacattcaggaattggccgcacaggcgatgaaggacgctgatgccttttatcagcggctgagtcgaagaatggaacataggtacttggtagacgccagccagacggagaaagagaggctgagactggaggcacgcaatcaggaaatcgatggaatgtttctctcactttatactgacaaggcaaagggcatactcaccgagcagcgcttcgttaaacttacagcggccctggagcaggagcaagagtctaatcagaagagactgcacgatttggccatgatgcagggcagggccgatgcacaggagagcgaggtcaggactttcatcaaggaaataagacgatatgctgcaattgaggaactggatgaagctgtgctgaaccggctgatctcccgcattctgatcggcgaaattaaaaaaattgatgggcagcggactcaggaggtgaagatcatctacaactttgtgggagaaatgtcacgg

SEQ ID NO: 1512 - DNA, 1383 bp, unidentified
  source 1..1383: mol_type = unassigned DNA; note = Bacteriophage uvig_374979 from the Index of /pub/databases/metagenomics/genome_sets/gut_phage_database (ebi.ac.uk)
atgaagaaggcggctctgtacattcgagtgtctacagatgaacaggccaagcatggttttagcctgggagaacaacagcacgacctggaacggtatgccgccaaacacaactacgctgtggtggatatctatgccgatgatgggaatactgctcgcaagagccttgggaagaggaaagaactccagcggctcctcgatgacgtgcgcgctggacacatcgacatcatcttgatgaaatgtctggatcggtggttccgcaacatcgccgactattacaaggttcaggaaattttggacgcatatggggtggaatgggagtgtacacaagaggagtacaacactaccactacaaatggaaggctcatgctgaatcttaaactgtccatcgctcagaacgaatctgaccagacctctgaccggattaagtacatcaatgagggcaaaaagcggaggcgcgaggaatgtacaggaaaacatccgtatggttacgaggtcattaataagaagctgatcgttgtggagaaagatcggccaatagtggagttcatatttcagcagatcctggccgggtccagtacgcattcaatcgctagtaaagtgtgggaccgattcaatttcggtatcgatgcaaagcgcgtgtggaggattctgagaaaccctacttacaaaggcgagcgatatgggatcgctgattactgccccgccattatacccccacacgactttgacgccgtacaggcaatcttggggcggaacaagcctccctccaaaacgggcatctcctaccttttcaacggaaaaattatctgcccttcatgtggaaatatactcgtcgtcaattgcgggaaaagtaagaagaccggcgagtataccagaccagtatacatctgcggcaaaaaattcactaccgggaaaccagtggccgcaggcggctgccaatttggaggcggtgtttctgaaagcgtcatagaaaaatggcttattaaaaacctctttcctttgctcgaggcatatcaagccgatctgcaatcaaagcagggtcagagaatcaactacgacaccaagatcaagaatattaacggcaagctgagcagactgaaggacttgtatctcgatgcacttattgacaaggacacatacaagtccgactatcagagacttcagaaggaacttaccgatctggcgatagccagcaagaggcagattgctctgccacccgttatgaatgagattctgcaagacgaagatttcgcgaagacctattgggagttgcctcgagagcagcagagggaactgtggcagatgttgattaaaagaatcacaattttgagacgcccggaggagaaaggcaagccctacaagtactttagggtcgagttcaac

SEQ ID NO: 1513 - DNA, 1605 bp, unidentified
  source 1..1605: mol_type = unassigned DNA; note = Bacteriophage uvig_140430 from the Index of /pub/databases/metagenomics/genome_sets/gut_phage_database (ebi.ac.uk)
atgcggattcagaacatccaccgggtcggcatctatcttagattgagccgagacgacggcaattccaacgccgagtcaatgagtatcgtcacacagaaacggatgctgacagactatgtgaaagaacgcggctgggacctgaccgaaacatacattgacgacgggtattcagggaccacattcgataggcccgcatttcaaaggatgttgaaggatatagagcggggtcacatcgattgcgtaataactaaagatctgtccagactcggtagaaattacgcaaaaacggggtattacacggaagagtacttcttggagcacggcgtgagatacattgcagtaaacgacaatgtcgacacgatgaaggacgataatgacattgctccttttaagaacatcctcaacgagatgtatgccaaagacatctctcgaaaggtgagggctgcccgagcggtgaatgccaagcaggggaaattcctgggcagcaagcctccattcggctataccagatgccccaccgataaacataaacttatcatcgatgagaagcctgcccagataatcgcacgcatgtttgaaatgttcgcctccggagactcaggcagacacattagcgatatctttaataaggaggggataccatctccacgggcatacttttaccagcaggctggcagggaaaacccattgaatgaaagcatgacttggaacagcaacactgtaatgcaacttctgaagaaccaagtgtacatcggcaacatggttcaaggaaaaaggcgcgttactagctttaaaacaaaaagtcgagccgtggttccggaagaagactggattgtcgttgaaaacacccacgatgctattatagggaaggacctttgggcaaaggtgcagaaaaagattgccaccggtaagagtcctcatgtgacaaagagtggagagatttctctctttgccggcattgctcgctgcgccgactgtggggccgcgatgactttcaacaccaagcagtatgatggaaagacctactatatctacaaatgttctcggtatgcagtgcatggaaaaagttcatgttccatccatcatgtccccgcttctgctctcgaggaagccgtcctgcagaatatccggttcaatgcacagctgctgtccgagaacgatgaagagcttctcggtaagcttatagagctgggggccagaggccagcagagggagattagggaggctgagactaaactcaacgagtccgtgaagcgcctggaggtggtggaaggaatggctcagaaactgttcgaggagcgatgcaccggaaatgttcccgattcagtcttcaaaaagcttatgcagaactatgatgtggagcaggcgaatctgaatcagatcatcgccgagaagcgcaatgtgctcatggaaatggaaaacgccgctatagatatttctgcatgggcggaagagttcaaacagtacactaatatcgacaagctggatcgcaggatcgtgaccacactgattgactccgtagaagttcacgagagcaccaaggaaaacggtgtggtgagacaacacattacagtcaattacaagtttgtcggacaattgaatgcc

SEQ ID NO: 1514 - DNA, 1539 bp, unidentified
  source 1..1539: mol_type = unassigned DNA; note = Bacteriophage uvig_249187 from the Index of /pub/databases/metagenomics/genome_sets/gut_phage_database (ebi.ac.uk)
atggagctttacgctcaatacttgcgaaaatcacgggccgatatggaggctgagcagcacggtgccggtgaaactctggcaagacacaagtacatgcttgaccagctggcgaacagtatgggcatcgtcatatctaaagtttacaaggaaattgtgagcggcgagaccatatcagaccgccctgtcatgcagcagctgttgcaggatgtcgaagccggcatgtacaagggagtactcgtcgtggaagttgagcggctggcacgcggagacacgattgaccaagggatcgtgagtcaaacttttaagtactccaatacccagataatcacgcccacgaaagtttacaatccaaacgacgaattcgacgaagagtacttcgagttcgggctgttcatgtcccggagagagtataagactatcaataggcggattcaggcgggcaggattgcctccgtaaaagaggggaaatatccatcacataaagccccatttgggtaccgcgtggttaagctgcaaaacgaaaaaggctacactcttgagatcattgaacacgaggccgacgcagttagaaagatctttgatatgtacgtgaataagcttgaaggggctaccaccatagcccacacactgaatgccctgggatataaacctcgaattagcaatatcttcagcacccaggctatcaccgccattctcgataatcccgtgtacgccggttatgtcacatgggaaagaaggaaggaagtgcgcactatgcagaatggaatagtgaagaagtctaggcctcgctcacataattatatcaagtgtaaggggcgacatcaggctatcatagatgagaacctttgggaaaaggcacatgagttgagaacaaacaagcggattgcaacaccccgcaagtctaaggagctcaccaacccattgtgcggcctgatctattgcaccaagtgtggtcacaaaatgcagagaaggccggcaggatctcgacagcccgcggatgtcatcatgtgccctaataacgaatgtaacaactatgccagctatatgagtctgattgaaaaagacatcattgaagtactgtgcgactggatcgacaagtactccatctgcagtaaacaggacaacgagctcaccctgaacatcaacactcttaacaacaatataacagctctcaacaaggagctgagcaccacaaaggagcagctcaacaatgcttataacttcttggagcggggaatctacacacccgaagtgttttttgagaggtccgccgctctgaaagacaaaattaacaccatagagcagaacatccacaatatccagaatgagattctgaaagagcaaaaacaacagcaggcaaaactcaattttctccctaaagtgaaaacaattgtcgattgttactgggagctcgacaatgctaaagccaagaatgatatgcttaaggaagtgattgatcacattgattatatcaaggaggtgaagggcaggggccatgaagatgatttcaagcttactatctatccgattatcagcaaa

SEQ ID NO: 1515 - DNA, 1479 bp, unidentified
  source 1..1479: mol_type = unassigned DNA; note = Bacteriophage uvig_199462 from the Index of /pub/databases/metagenomics/genome_sets/gut_phage_database (ebi.ac.uk)
atggtgctgctcgacacatactgcatctatctgaggaagtcaagggccgatgctgaggcagaagcgagaggcgagggagaaactcttgctcggcacgaacatgctctgctcgacctggccaagagagggaatctgactatctctcacatctaccgagagatagtatccggcgactcaatcgccgctagaccccagatgcaacagatgttgcaagatgttacagacaaggcttatacaggcgtcctggtgatggagatagaaaggctggcaagaggtgatacgattgatcagggggtggtggcgcaggccttcagagaaagtggtactaagattgtaacccctttgaaaacctatgatccgagcaacgaattcgatgaagagtacttcgagtttagccttttcatgagtcgacgggagtataagacaattaaacggaggatgcaagcagggcggatcgcctctatcaaagaaggcaactacctgggcacaaatccaccctatggatacaagaaagttcagcccgagcccaaagtgaagaccctggagatcgtttcagaggaggctgaagctgtcaaaatgatgtttaacatgtacctgagcggagacggtgcccgcgccattgctgccagactgaatcagctgcagatccctccacgaaaggcttcaatgtgggagcccgtcagcgtcagaaagatcctccgcaatccggtctatgcaggaaaaatcgagtggcatacgaagaaggatgggactattctttccgacggcgttcacccagccattatcagctgggaacagttccagcagtctgtagagcggaggaagaggacagcccctcaggttcctaccggatacaccacccagaactactatcacgggctcttgttttgtggaaattgtggccatcaaatgaagcgcagacccgtgccaaacgggaccccacatatgttgtgccgacgatacgagtgccgcggtaaggtggtgtccagtacaaccgagaaaattgacgaagcagtccttgaagcaattaagtatcgcataagcgagcttacactctttaaggatcagtccggcgaggagaagcgggcgaaagagaaacagaaggaatttcaacgcgatcagttgaagaaagctttggaaaaactcaaaagccagaaagaaaagctccatactctgctcgagaccgacgtgtacactgtggaggtgtttctcgaacgctctaaagccctggaagcgaagaaagaggaactcgagaaggccctgcacagtataaccgattctcttcaagagaaagaacacctggcacctgagcaggcagtgatctggctgaggtacgtcctggaccacttctccactgccgacgcctgccagaagtccaagatgctccagaggatcattaaacggattgaatacaagaaaacggagaagatgtgttatcggaaacaatcctcagacatgtctctgcacatagacttcctc

SEQ ID NO: 1516 - DNA, 1524 bp, unidentified
  source 1..1524: mol_type = unassigned DNA; note = Bacteriophage uvig_104410 from the Index of /pub/databases/metagenomics/genome_sets/gut_phage_database (ebi.ac.uk)
atgcccaccgtgacagtcatccaaccaacgattgcggaagagaaagctgttaagaagagatgcgcagcctactgtcgggtgtcctccgactctgaagaccaacttaattcctttatggctcagatgcgctactattcacaggtgtttgacaatagtgaaaccgaggaattggtcgacgtctacgcagacgagggaatcaccggtactcgagaggataagcgggatgaatttcaacggatgattaaggattgtcgcaaaggtaagattgatcgcatctacaccaagagtatcagcaggttcgcccggaatacaagggactgccttaagaatgtcagagagctgaaaagcctcgggatcactattttctttgagaaagagaacattgacacagccaatatgactgacgagatgatgataaccataatgggcgggttggcccaggaggaatctgtctccatctcaagaaacttgaagtggtcttatcagaagcggtttgaggaggggacaattaatgtgttcagcgcacccttcggatacaaactttccaatggaagcctgatcattaacgaaacgcaggcccaaatcgtaaaggaaatttttgagatgttcctcaacggaattggttatcagcgaatctcagaaatttgccagaacaagtactctagctataaggacaacttctcatattacgggatcaggtacatattgagcaacgagaaatacatcggcgacagcaagtaccagaagacttttaccacggatacccttccgtatcgaaaactgcctaataagggggaactgattcagtattatattcaggccactcataaagcaattatctccaaagaaacttttgagaaggcccaggcactgatagagtgtaggaaacacaagaatatcgttagtgagagccctttctccggcaagatcatttgtgccaactgcggaacaaagtataaacgaaagtgctccggcgataaaatctactgggtgtgtcgcaggcacgacaatcttgcgcagctgtgcactaataagcggatagaggagaaattcatcaggcaatctttcatcatcctccacaacaagctcctgtttaactacaagcagatccttataccactgcagaccgctctccaggatttgaagctgaaaaaattctcaggcaaaacacaggtaatggatatccacaaagaaattgcgaagcttagagagcaggctcatgttcttgcccgcctgaaaacaaagggtttcctggatgaggctaagtatatagaacagaccaccgagctcacggctaaaattaacaagcttcaatctgagctgaagaaactgacaagaagtgattacgaggacgaaaccctggatcagatcgaaatactgatcgacttttttgaaaaaagagacaaacccatcacagagttcgaggaaagtacttttgagtctatagtggagaaaattgtggtgatcgatcaacatgaactcgaattccacctgattggcggcctcaagttcaaggaaaacatt

SEQ ID NO: 1517 - DNA, 1332 bp, unidentified
  source 1..1332: mol_type = unassigned DNA; note = Bacteriophage uvig_324974 from the Index of /pub/databases/metagenomics/genome_sets/gut_phage_database (ebi.ac.uk)
atgttgagatgtgctatctacatcagggtgtctaccgaggaacagaagattaatggattgtctatcgaggctcagtcagcagcactgactgagtacgccgttcgaaataacctcctgataacagattactacattgacgccgggctgaccgctcgaaaaaagctgcagcatcgcaaggaactgctgcgccttttggaggacatctcaaataacaagatcgatatcatcatctttacgaaacttgacagatggtttcggaatatcgccgattattataaggtccaggaaattctcgatctgcacaaagtcaactggaaaacgatattcgaagactatgatacaagtactgcaaatggacggcttcatattaatattatgctctctattgcccaagacgaggctgacaggactagtgagcggattaaaatcgtctttgaaaacaagagagccaaaggcgaagtgcccgggtggaaggcacctctgggatataagatcaaggatagtaaactgctcttggacgatgacaccaagaggatagctatagacatttttgaacactatgacctgcaccactcaatcatggggtgtgtacgaatggccaaggagagatatgattacaagatctacgactattctatacgcaggatgcttgagaacaaaacttacatcggtgagttcaggggctataagaacttttgcgaagccctcatcaccagtgatctcttctatcgcatcaagaattacagagaggtgaaggagtacaagaatcagcggaaagctggccgcgtttaccttttcagcagcttgattctgtgtaaagattgtaaccatagcatgacatgctgtttcacaaagcagcatcaaaaggcaggtgtgaaagagtaccactattacagatgcaaagaggcgattctgggatgctgtatccataaaaaacgacttagagaggataacctggaggaatacttgctgcagaatatatgcgccggcttggggaattacattatacagatcaaccggtccgaaaaacaggaaaagaccccgatcctcaacattgaaaagctttccaaaaagctggaaaaattgaaagacctgtaccttgatgacctcattgacaaggagtcataccgcaaagagtatgacgcgctgcagaaacacatcaagctctccagcatcaagccaaacaagattaaggtggagcagatgcccctccaatataatctgaaggagctgtactattccttgtccatcgaggaaaggaaaatcttctggctgggcattctggactgcataaccgtggatagccaaaacaggattcagattttttatcgg

SEQ ID NO: 1518 - DNA, 1539 bp, unidentified
  source 1..1539: mol_type = unassigned DNA; note = Bacteriophage uvig_214087 from the Index of /pub/databases/metagenomics/genome_sets/gut_phage_database (ebi.ac.uk)
atgcttaagacagatatgacgaatgaaaagagcacagcagtcatctacgcccgcttttcctccgacaaacagagagaggaatccatagagggccagattcgagaatgcacccaattcgctaaagaccaaaacctggagatcatcgctacctacatcgaccgagcactgtcagcccgctctgataataggcccgactttttgagaatgatagcggactcagctaaaggcctgttccaatatgtgatcgtctaccagctggatcggttttctcgctcaagatacgatagcgcggtgtataaacataaactcaaaaagaatggggttagggtgctctccgccaaggaacgaattggggatgatccttcttctattattcttgagtccatgcttgaaggctatgccgagtactattccgctgaactgagtcagaaagtgaaaagaggcatgactgagaatgttctggaacataagtggaccggaggctatgtccccctggggtactgcttggcacctgacaagactctgcagatcgaccccgttggcgccgaggcagtaaaaattatctacgataagtggctgtccggatgtcggataatggacatcatacggtacctgaatgatcacaattacgtgacttccaggaaagcaaagtttcgatatagtagtctcaacaggatacttaccaaccctatctacactgggttgtaccggtgggggtctatcgaagtggctgactatgcaccacccattattagccagaagcagttcagcttggctcaggagaagatccatcacattaaggcccacccacgggccaaaaggcggagtgcggcctatgcccttacaggtatcatctattgcggagtgtgcggtagcccgatgacaggacagtcaggacactctaaaagtggcgctctgtaccactactatcgatgctccactaagaacaattatcacgaccgagggaaaaagctcaatgtcaagtgtaccaaccggaacatttcacgcgaaaagctggaagacttggtgttgcagaccacaattaatatcctgatgaaccctgaggccgttcatatgattgctaaacaagccgtcgctgtgcaacagaaggatccagtcagtatggagctggatcgcatcaaggaggacaaaaagatcattcagaagaagctcaacaactcaattaaggccgtcgaggcaggcattattagcacaacactcgctgcgaacatcagccaatacgagaaagaaattgccgaccttgatatcaaaatggagaaaatcaaactgagcagcacgcctgtaaagatcgatgagatagcagtggagttcttcctgaagaatttgttgttgcagaagaaggaacatgacaagtaccgcctggatatgttccagacttttatcagaagagtgatagtgtatcccgacaaggtagagatccagtacaactataccgccaccccgatactcgagaacccagtgattaaaatgatgacgggtaatccaggatgttctaggtgtgaaagactcgttaccagg

SEQ ID NO: 1519 - DNA, 1590 bp, unidentified
  source 1..1590: mol_type = unassigned DNA; note = Bacteriophage uvig_13945 from the Index of /pub/databases/metagenomics/genome_sets/gut_phage_database (ebi.ac.uk)
atgtcagacaaggaaaaaaccaatggaagcctggcgatggccccaagagtgattactatccctgccgcaaatcaggaaaccgctcgaaagttgcgggtggcagcctacaccagggtgtctagcaactcaaaggaccaggagcatagttttgccgctcaaaacgcctacttctctaagctgatcactgacaaccccgactgggagctggcggacatctatgcggatcaagggattaccggcacttccatcgataagagggatgattttctgagaatgatggaagattgcagaaagggccgcattgaccgcatcctcgtgaagagttcttcccggttcgctcgcaatacaaaggagagtcttgccgcggtgagagagctgaagagccttaacatctcagtttactttgaggagcagaatatagatactgcccaggtcagcggtgaggtcttgattgctatgttcgccgccttggcacagagggagagtgaggccatcagcgaacgggtgcgctggtcctatagggtgcgcatgtctaaagggcgattctccacatgtaaagccccctacggttatcggcttgtgaaagaccatctcgagatccaggaggatgaagccagcattattaggcacatctttgacagatatctcgcaggagtttccatggaaaacattgccaaagaaatcactgccctgggttgtccaactagagacggaacccagtattggcagctcacaagtatacagtacatcctgcaaaacgaaaaatatgctggcgactccctgtcccagaaaaaatataccacacgctcattcccgcgccagcaaaaaattaaccacggggagagaaagcaatacctggtgattgactcacaccctgccatcatctctcgcgaaattttccaaaaagtgcaagagctcctcacccagagaagcgcagctatccacccccggtcagacgtgccccatgcatttgcaaggaaggtcgtctgtggtcattgcggcactctgtgtaagcgaaagaattgcggcgggtctgtcaactgggcttgcaggcggcatgataaaagtataaccgcctgtcctaatacgcaggtgccagaggaacagatgaagaatgctttcctgcacgtttactacaacctcaaacactacggaacctctatactcacccagttgattagcgatctgcacgctgctcgaacaggcagccttctctggagcgagaatatagtggaaattaataagcaaatctctgacatagctagccaagagaggctgcttgcacagctgaagcagcagggagtagtagaccctgatatctttatctccagatccaatcagctggcagagcgattgcgggagttgaaactccagaaggaacgaatactgcggtccgaagaggaccacacgattcagcagacgcaggacctgcttgacgtcctcgagtcagggccagattggcaggacgatttcgatgagcagcttttcagtgatatgatcgagaaaattgttgtcgtagataacgaaacactctgctttcggcttcttaacggcctggaagttacagagaagatcgaaaggacaagaagg

SEQ ID NO: 1520 - DNA, 1386 bp, unidentified
  source 1..1386: mol_type = unassigned DNA; note = Bacteriophage uvig_11401 from the Index of /pub/databases/metagenomics/genome_sets/gut_phage_database (ebi.ac.uk)
atggcgaagaaagtgaccgtgattaaggcagccaaggaacaaaagcatactcaggaagagcggagactgaaagtttgcggctacgcccgggtgtccacgggtagccaagcacaggccacaagttataccgcccaggtggaatactacaccgagaagattgagagcaatccactttgggagttcgccggagtgtacgcggacgaggggatatctggaacaaacgttaaacaccgcgatgagttccagatgatgatttctgattgcgaagatgggaacattgatctcatcctgactaaaagtattactcgctttgctcgaaacaccgtagagtgtattcagacaatcaggaaattgaaagaaatcggtgtggggatctactttgagaaggagaacatcaacacactttccgaaaaatctgagctgttcatcaccatcctggcttctgttgctcagggggaatctgaaaatatttcatccaataataggtgggcaattcagaagcgatttcaagatggcacctatattataagcacccccgcatacggttatggaaaagacgaggacggaaatttggtgataatcgaatccgaggccgagacggtccgctggatctatgaatcataccttaatggcatgggggtctatgtcattgctaaggcactgaatcagaagggaatccctactatcaggggcgcggaaaaatggcaggacggcgttatccaggacattctcaagaaccccatctatgagggtgatatgctgcaacagagaacatacaccgagactaggttccccttcgtcaggcgagtgaataacggccagcggaaccaatacctgataaaagactctcacccgcctatcgtaacacacgaagaggccgaggcagtcagaaatctcatggcctatagagttgatgtgctgcacatgaataagagtgactatacaaaacggtacctctttagcggccgcattatatgcggggagtgtggaaaaaccttcaggcggcagaagatctacatcgggaaaccgtacgaaaaaataatttggacttgtagtggccatgtggaggacaaggagaactgttgcatgaaggctatcagagaagacgtcttgcatcgagctttcaccgatatgtggaacaagctttacaccaaccaaggaactatcctggaacctctgttgaaagagctgacagaactcgtagctgcccgccaggacagcgaggagatcagacagctcgacaaggagattaaggatatttccgagcagtcccagatattgaatcaggtgatgcgcaagggctatatggattcagccctgtttatggaatcaagcaacaagcttggctggtgcgaatttccatataagagccgggtgatcccaacg

SEQ ID NO: 1521 - DNA, 1755 bp, unidentified
  source 1..1755: mol_type = unassigned DNA; note = Bacteriophage uvig_81430 from the Index of /pub/databases/metagenomics/genome_sets/gut_phage_database (ebi.ac.uk)
atggcccggaaagaggggagattcaatgccctcgccgataaagtaccaagctctgacaaagacaagactgtaacgtatgtgacaactgagaagcagtatcacgtcgccctgtacgctagactgtccgtagaaaaggacggcaggaagtctgacagcatagagagccagttcatgatcatggagaactttatcaaggagaggccagaactgacacattaccaaaagtatttcgataggggtgtgagcggaacgacattcactcggcctgattttatgaggatgatggatgatgtgcgagccggcaaaattgactgtattattgtgaaggacctgagtagatttggtcgggactaccttgagacggggaattacattgaaacaatcctccccttcctgggagtccggttcatcagtgttaacgatcattttgatacagtcgaggactataatggcaacaaggggctgggcatctccctgatgaatctcgtgaacgacatgtacgccaaagatgttagtaaacgcataacctcagcatttcagtcatgcatggagcgcgggtctgtccttggccatgcgccctatggatactcctccgttaaaactgacgacgggcatcgactcgtgatcgacgagcctgcagcggaaatagtcagaaaaatcttccagatggccaagagtggtatgagccacagagcaattgcccgcgagctgacacaggccggagtccgaatccctgaggaataccggcagacccagctggcatatatcactgaaggcgaacctttgagcgagtggaagaatggaacaatttcacagattctgagcaatgaagcctacattggcaccttgcagcagggaaagaccaagaggtgtctctatcaaggactggagaggcaaaaagtgagcaagaacgagtggatcatacacgaggacgctcacgatgcaattgtaagcaaggagctgttttacgaagtgcgctcagtggtggacaagaagaaggaaaaaaaatccttcgtggctcgcgaggacctgccacttaccgccgacagatacaaggggatcctcaaatgccccgtgtgtgggggcgacttctctagagagtcctccatcatctattccggcgagggcgacgtgcggctctattactatcgatgccggcacaaccctctccccgtcgaggaacgggataaagaagctgtgatcaaaatctctgaagaacagctcgatctgctggtgtttgagtctctccaaaaagctgttaaagagctcgtaccagataaaaagaagcttttgaatgcactcgaaaaaggcttccagccggcggagactaccttgaaggctagaattgccgaccttaaaaagagggctgagcgcctgtcatttgagggcagcgaattgtacgggtcttatgtgaaaggtgagatatctagggatgaactggaggatgccaaccgcagacaagagcaggagagagtcaggcttgataaggaacttttgcaggcggagaaagattacaaagcatttgttcgcaacaccaaggaacaaaagaagtttgtgaacgctctggtttctgttaaggataagagtgtgcttacaccggaactggtcgaaacccttatctccggaattaccttgactgctgacaggcacatggaaattcagtaccggttcaattcagacaagagtactgggtacaccgacaccttcaggtttccccggcgcacgaagtggaacgagggaggtcgaacagatgtc

SEQ ID NO: 1522 - DNA, 1563 bp, unidentified
  source 1..1563: mol_type = unassigned DNA; note = Bacteriophage uvig_250870 from the Index of /pub/databases/metagenomics/genome_sets/gut_phage_database (ebi.ac.uk)
atggcccgcatcaccaagatcgaggctaccaaaagtttcatcgagaaaaagaaaattagagtcgctgcctacgcaagagtcagtacacgatccgatgagcagcttctgtcactggagactcagaaagaacattatgataatttcatctctgctaactccgagtgggaatacgccggactctactacgacgagggtgtatccggcaccaaagtagaaaaacgggacggcctgctggccctccttaaagattgcgaagatgggaagatcgatagggttataacgaagagtatcagcagattttctcgcaatacagccgactgtttggagatggtgagaaacctggcaaggctgaacatctacatgtatttcgaaaaggagaatattgacaccgagcatatgtcttctgaatggatgctgtcaatcctgtcctcaatcgccgagagtgaatcccgaagcatttcacagaataataagtggagcattaagcacaggtttgaggaaggcacgtttatcatctcctatccaccttacgggtacgagaacgaggaaggacgcatggtcatcgtgccagaggaggctgccgtggtgcgcgatatttttaacatgactattaatgggatgggtactcacgtgattgctcgagaactgaacgagaggggcgttcaatcccgcaagggaaccaagtggcacccgtctactgtcagaggaattctccagaatgagaagtacactggagacgtgatatttcagaagacctacaccgacgacaattacaaccgacacatcaactatggtgagaagaacatgtacttgtgcaagaaccatcatgaacccatcatttcacatgaaattttcgataaagccacagctgttattcaccagcgagcgaaggagaaatctatcgaaacaggcatcgggaagtatcaccatttgtatgccttctcagggaagataatctgcggcgagtgcggcagtacattcaagaggagacaacactacaagcccagcggcaattatgtggcatggtgttgtaacacccatattactgacaacgatgactgcagcatgatgtatatcagggatgaagatatcaaaaccgcatttctccgcatgatacggaaattgcagaccgtacacgcaaaggtgctgaaaccttttatcgaagggcttcggggcgcaaataacaaggagagactccaccaagtccttgcgctggaagaacagatagagaagaatgtggaacagaccacggtccttaccaacctcttgtctagcggatatattgagcccgagatattccacgcggaaaaaaaccagctcactagcgaggccgaccggttggctcgggagaaacaactgataagcaaaagtattaatggggatctcacacatcttgacgaggcccagaaactgctgcggttcgtcagcaaaaaggctgagattactgaatttgaggatgagatgttcctggaatatgtggacacaatgacagtgcactccagggacgagattacgttcaatcttaagtgtggtctgaatatcacagaacggcttgttgtggtt

SEQ ID NO: 1523 - DNA, 1638 bp, unidentified
  source 1..1638: mol_type = unassigned DNA; note = Bacteriophage uvig_590864 from the Index of /pub/databases/metagenomics/genome_sets/gut_phage_database (ebi.ac.uk)
atgtacagctccaaacgggcagtaatctactgtcgggtgagtaccgaggaggagtcccagaagaacgctctcgaggggcagattaaagaagctattaagagtgtagaggagaagaagtggattttggtggatcagtacgtggatgaagggaaaagtggcacaaccaccaagaacaggccacagtataatagacttatcaaggatctctcccaagaccggttcgacataattgtaatcaagagtcaggataggttgatgaggaatacactcgagtggtatatgttcatcgacctggtgaacaagaatcaaaaacagttgttcttctatctcgagaataagttttacaacacggaagactccctgatcgtcggcattaaagctattctggcagaagagtactcaagggaactgtctaagaagatcaataatgcccacaagaacgggcagaaggagtgttccaggatcatgcttaacaacaagacctggggatacgataagattaataagcaggtggttatcaacgaaaaagaggcggagatcgtcagacttatttttgatctttatattaaaggctatggggcccgcaccatatcaaaaacgctgacagaaatgggtgtcaagagtcggagcggaggagatttcgcctatgtgacgatccggaaaattgtcagaaatcctttgtataaaggcgatgtggtcatgaatagactgcataacgactttgattccaagaaagtggttcacatcccgaaggaggaatggatcgtacacaagaatgccgtgcccgccatcgtgagcgaggaaacttggcaggctgcaaacagcatcctcgataccaggtaccaagatactttttccgcacagggtctgcccatccggatcggcaaaaataagggagactatcccctgtcttctaaaatctactgcggcgagtgcggatcaacatactggcgcaggtatagacgaaacacaaaagatgatgtgacagtgtactggtcatgcagtgaatatgtgacccaaggccgcaagaatgaccagactaagcgaggtaagaatatggtgaagaaacaattcgacctccagcgaggctgtaactcccctcatttgaaagaggaagacatcatatctggactgaagatgatagcggaaaacatctttagcccatcagaccgagactctcttatttcagagagcattcagctgtttgaatcttctgccttggacaatgacaagaaggttaacggcctgaacgaaaatctggagaagctgaaaaagcagcaagaaaaactcttggacgggtacctgaacgactgtattagcgaggacctttataagaagaaaaacgccattctggttgaggaaatccgcactttggaggcaaaaaaagctgagataggtgacactgaagccgaagtccgccagaaaaaagagtacatagagagcgtgaaaaccgagatttccaaaattggacagaacgaagggtgcgtccacaagctcattaacatcatcgagcgcataaccgttttccagacatacatgctggtgagcttgggggctataggcgaaattaaactgaacgtcgagcggctctcttacaagagaactagagttactatcgccgatgagcagcataataat

SEQ ID NO: 1524 - DNA, 1263 bp, unidentified
  source 1..1263: mol_type = unassigned DNA; note = Bacteriophage uvig_135439 from the Index of /pub/databases/metagenomics/genome_sets/gut_phage_database (ebi.ac.uk)
atgaaactccgaaagatagagcctctgaagcctaagcaaaagaaacttcgcgtgtgcgcctacgctagggtgtcaacagactctctgaaacagggcgagtcctttgacaatcaggtttccacgtatgagagagtgatcaagagtaatccggaatatgagtttgtttccgtctacgccgaccagggtatgacggggagatccgagaataggccagagttccagagaatgattgcagattgcaaggctggcaaaatagaccttattattacaaagagtataagcaggttcgctaggaacactactacagtgctgaagtatacccgggagctcaaggagattggcgtcggagtcctgtttgaggaaaataacatcaataccctgtccagtgaaggcgaattgatgatgaccgtactcgcatcattcgcccaggaggaatcacgatcaattagcgagaataataagtggactctcaaaaaaaagttcgagcgcggggaaggtatggttaacaccgcccgattcatgggatatgacaaagatgaaacaggcgatctggtcattaacaaggaagaggcaaaggtggtgcgccaaatcttcaagatgtacctttcagggatggggtgtcatagaatcgctaaagcgttgaatgaagagggagtccccacgatcgctgagtctagctggcacgcctctactatcaagggcatgctgaccaacgaaaagtacaaaggcgactttcacatccagaaaacctacatcccagagggtacacaccagtccgtgaaaaacaatggccaagtacagtcttactacgtgaccgaagatcatccagcaattatcagtgccgaggagtggcagcaggtccaagaactcatggagtaccaccggaagcagcgaaacatcggaaagggagaaaaatatcagaacaggtaccccatgagcggaatgctggtctgcccttactgcggcaaaagtctgcggcggagatatgtgtataaccggaaggtggaatggctgtgtgcaacatacatacacaaaggtaaagaggcttgtaaggggattcgcatcagggatacagaattgactggcttgtcctttagcgaacccatggtagtggaggaggtgatgatagatggggaaaagcattatggatacactagcaaaagagcgtatgacgccggtgagagggccgccgaccgcattgagaaagaatcttctagcgttctgcccagagtgaacgggcctcgccggaccgttatcaagctt

SEQ ID NO: 1525 - DNA, 1542 bp, unidentified
  source 1..1542: mol_type = unassigned DNA; note = Bacteriophage uvig_166254 from the Index of /pub/databases/metagenomics/genome_sets/gut_phage_database (ebi.ac.uk)
atgggtatccctttgctgagtggcggcatctacatggataacaggctcaaagctgtggcctacgctcggtttagctctgataatcagagagatgaatctatcgacgctcagatcagcgccatcgagaattacgcgaagatcaataacattgagatcatcggcacatacattgatcgcgcaaagtccgccacaaccgatcaaagaccaaactttcaaaaaatgatagccgatagttcaaccggcacgttcgacataattatcgtgcataagcttgacagattcgcccggtccaagtatgactctgcaatctacaaacaaaaactgaaggtcaatcacgtgcggctgatttccgtgaccgagaatattgacggctcacccgaatccattatcctggagagtgtgctggaagccatggctgagtattactccaaaaaccttgcacgcgaggtgatgaaaggactctgcgaaaatgccaagaatactatccatacagggggcatcccacctcttggatatgacatcaaggataaaaaacttgtcataaacaggcacgaggccgaggcagtgcgaatcattttcgacatgtataacgatgggtactcatatggagagatcataaagacactgaatgataccggatacaagaccaaaattgggaacaactttgggaaaaattccctgtatgagatactgcgcaatgaaaagtatatgggagttttgacttataataagagttccgaaaaatcagcgaccggcacttacaatcggcataagtacaaggacaatgagaacattataaggataaacggcggatgcccggctattattacatctgatgtcttttacaccgcccgcgataggcaactctacaacaagcaggtttcccagagcaaccgcactaggcagaagtacctcctgagcggtatgctctattgtgacgtctgtgggtcacccctttatgctaatcgaagaaaaaaagacagtcagattacctatagatgttgcaaaaaataccgaagcgtagataagtgtacgtgcaaagagatcaaccagcagtggatagacctggagattatcaagatcataaaaaaacacattctcaacgagcagaacgtggactacatactccagacaatcaacgactataataacagccagaagtctaagcaggccaatatcttccttgagtacactaatgagcttaccgacattaagaacgcgaaagagaatatcttgaacgctgttgaagaagggtttgcaaaggaacacttcaaacacaggctcgatacactgattcagcgagaatcttacttgaagcaccaactgcatactatggacaatattcatcacttgagcatcagcaagaccgacattcttctgatttctaacaagttcaacagactgttgaaagaaaatgacatcaccgccctgagggcaatgctgaatgatttcattgataagatctacatcggtaacaacaaggtcacggtatatctcaaggaacgctggtttcggactactatcctgacacttgaccggtat

SEQ ID NO: 1526 - DNA, 1545 bp, unidentified
  source 1..1545: mol_type = unassigned DNA; note = Bacteriophage uvig_422831 from the Index of /pub/databases/metagenomics/genome_sets/gut_phage_database (ebi.ac.uk)
atggagctgagtaaaggagtaatctacgccaggtatagcagtgataagcaacgcgacgaatccattgaggggcaaattcgcgagtgtaaggagtatgcagagcgggagggaatagtgataacacacatctacacagataaagccctctcagctcgcacagatcataggcccgagtttcgacagatgatcgatgacgccaagaagcataacttcgagtacgtcattgtttaccagcttgacaggttcagcaggtcccgggaggactctgctgtgtataagagtatactcaagagaaacggcgtaaaggtaatatctgccaaggagaacatctcaagtgacccagccggaatcatcctggaatccgttttggaagggatggccgaatattacagcgctgagctggcgcagaaagtcagacgagggatgactgacaatgccctgaaaggcaaaatgaatggaacccctaccccactgggctacgataagacgaaagagaattcactcgtgattaacaagcgcgaggcgaaaattgtcgaacgcatttttgacatgtatctgaaaggccattcaattccctcaatatgctctttccttaatagcaagggctacctgtccaaaaaagggggtaagtttagctatgccgtcattagaaggatcctgagtaacgagaaatacataggcatcatgaagtggaatgacatcatcgtggagggcgcaatcccctctataatctccaaggaaatcttcgacaaggtgcagtcagcgaattctcggagaatcaagctcaaggcttcccgaagcgaattttacaatctttgcggtaaactctactgtggcaagtgtaacgctcattatgtggggtctactgctactagtcggtccggtgaaaagcactactattatgtgtgtaataatcggagaaagcaccacacctgtgacgctccgaacctgaagcgagaaatcgtggaagacatcgtgatcaaccagactctggaaattctgaaccagccatccaccattgagcagttggccgagctcgccatcaaagcaaacaaggatatgatgagcacgtcagaactggagctccaagccgtcaatgatcgaattaatcagttgcagagcgaactggataactacatgaaagcaattgcaaagggattcatcagcgacaccctgcaaaaccaaattgagaaaaccgaggctgaattgcaggaccatatgacaagaagggcaaaccacgaaatggcatccaaccagatccagttgaccgccgaacacattgagttctttcttcacaaaatggcgaaagaaaatcctacaactaaacgaggtcgggcttctattattgatacttttatcaagcaggccaccatctttgacgatagggttgagattattttcaattacagtaacgatctgcctcagttcaaggagcaggcaataacgtgctcccactcttgcgatatggtggtgcatactacacattgcacaaatcacttctacatagcccggagccgctatcccatcagacttgttatcacctat

SEQ ID NO: 1527 - DNA, 1485 bp, unidentified
  source 1..1485: mol_type = unassigned DNA; note = Bacteriophage ivig_3102 from the Index of /pub/databases/metagenomics/genome_sets/gut_phage_database (ebi.ac.uk)
atgattgcgttgtacgggagggtctccaccgaggaacaggctaccaaaggttattctctgagaaatcagattgaggaatgtagacggaaagcaaacactaaggaaattgttgagtatgtagacgacgggtatagtggagagttcctcgagcgcccagccctgaccaaactccgcgaggacgtgaaaggaaatcggattacaaaagtgtactgctatgatcctgatcgcctgtccaggaagttgatgaacgccctcataatcgacgacgaatttcgatctaaaggcgtggatatcatctacattaacggcgaatatgccgattcacctgaaggtaaactcttctactcactgagaggcgctatttccgaattcgaaaaggcgaagatcacagagaggatgagcagcggccgcaagagaaaggctcaggaggggaagatagtgaagaaccacaagatgtacgggtacgactacgacaaagaaaaggccatgtacgtcgttaatgagcacgaggcaagtgtggtgaagatgatctttcacaagttcgtcgtagagcagatcggaatgaacagcattgccaaggaactgactgctaagggcgtaaagaccaaaactggcaaagatgtgtggcacagacaggttgttagacagatcctgatgaatgaaagctacacgggagactattatcagaataagtggaataccgagggtatgatcagaaataagtacaccgataacccagacaataagattaaaatgcggcatagggacaagagtgagtggatccctatcaatattccccaaattatagaacggactcagtatgaggaggcagccgagctgctgaagcagtctcgaaggcgctacgccaaagctgctgtcaaccagtatttgttgtcagggcttctgaggtgcggcacctgtggcaatacaatggtgggtacaaagaccacttggtggggcaaaccccactttatctacacagatcgaaaaagccatgcaggggccaaacatcccgggtgcgtgctcgacataaagatggagaaattggatgaagaggtgtggaaggatgtggaacaatttgtttacaatccggagctgctgttcaagtatgataacacaaaagatgtgtcaatggaacttaagcaagcagagaagcttaaagaagacatcaaaaaagcggagaaaggaaggaagaagctgtatagcttgtttgccataagtgatgacctggacgaagaggagttgaaaaaagagatcgttgaacttcaggacaagcaacgcaaagccgaagaacggcttatggaggtcgagaaggaaatcaacaagaacaagaacgaccgggatattgactccataaaagagactatcaatgagctcatctccaaggaagatcggattacgttcgatgtcaaaaagtctctcattcgagtgctggtgaaggaggtcatcgtagagggaaaggagaaaatcaacattaactacttt

SEQ ID NO: 1528 - DNA, 1536 bp, unidentified
  source 1..1536: mol_type = unassigned DNA; note = Bacteriophage uvig_404379 from the Index of /pub/databases/metagenomics/genome_sets/gut_phage_database (ebi.ac.uk)
atgatctgcgctatgtaccttaggaagtcacgggcagactacgaggcagaggctcggggtgagggcgaaacccttgcaaaacacagggaaacgctgatggctgtggctaaagcgcgggatttgaccgtaaccgacgtgttcagtgagctggtctctggagacacaatcgccgagagaccagagatgcaacggcttatgagggccgttgagaggggcgactatgacgccgtcctgtgcatggacatagaccggctgggcagaggggatggcgcagaccagagcgcgatactgaagacactcaagtactccgataccatcgtgatcacaccttacaaggactataatacccggcgggagatggacgaggaattttttgaatacagccagttcatcgccagaagcgagtataagcgaatcaagcggaggatgtgggctggcagggtggcttcagttaaagaggggaaatggattagcccgaaagccccgttcggatatagaagggtgagaatcgaacccgggcggggatggactctgacaccagagccctctgaggccgaggccgtacgaagtatgtttgcctggtacgcctccggtgaatgtggaaaaaacactattgcacgcaggattaacgatatgggatttcgaacctacggtggcaagaacttcgatccctcagagatccgctctattttgactaatcctgtgtatattgggaaaattcgatggaactatcgccatcagaatatagaaatgaaagacgggaaggaaatcgtcactcgaccccgcagctccgaatgtctggtgagtgatgggttgcatcccgccatcgtggataaagatgtattcgatgcggttcagagatgttttacaagcttgggtgacccatgcgtccctttccgaagagaaatggtgaacccactcagtgggctcatgcattgcgccgagtgcggcagggcaatgcacatggtacctgaatataaacgctatggcgttgatgccacctacagatgccgcaagacgggcggctgtgccaccaccacgattgaggccaagtatgtctatgacgcgctgcttttcgcacttcgacagtggtccacatacggagacagcgatggttatgcccccgattgtgctgcaccggttaatgacacgcttccccaaattcgggctgtgtctgcccagattacccagctccgaaatcagctttcaaaactgcaggatctgctcgaaaccggagtgtacagtgccgatacttacgtggagagatccaaggtgattaacgacagaatagccgcagcttctgctactctcgctgaactgcgccaatcccaacctgtcgacgagcgcgcagctatcatcaggctgaagccaaagatacgccacctcctcgacacatgggatgattctactcctgccgaaaagaacgcactcttgcgcactatcgtgcgggagatcaagtacaagaaaacaaggagatgttttcgcaatgagaatcctgcggaatacctgaccctgacaatctacccaattgtcgac

SEQ ID NO: 1529 - DNA, 1398 bp, unidentified
  source 1..1398: mol_type = unassigned DNA; note = Bacteriophage uvig_554169 from the Index of /pub/databases/metagenomics/genome_sets/gut_phage_database (ebi.ac.uk)
atgccccagaaaacattggtgtttggttatgtccgcgtaagcactgagaatcaactggagaattacagcattgaggaacagatcagcagacttaaaagttactgcgccgccaaagacatggttctgcttaagatctacacagatgggggttattcaggaggaaatacagacaggcctgctctgaaacaaatgctcgcagacattaaaactgttaacgtggatgctgttttggtctataagctcgacagactctccagatctcaaaaggacaccctgacccttattgaggatgagttcctcgcccacgacgtggatttcatcagcatcaatgaaaactttgacacttctaccccatttggcaaagccatgattgggatgctgagcgtcttcgcacagcttgaaaaggaccagattaccgaacgctttactatggggcggataggcaggtgtaaagctgggtatttccacggtgggggcaacgccccatatgggtacacttatgagaatggcgacctcgtgataaactacacagaggcagaaaacgtgaaaaaggtctatagtatgttcctctccggcaagagtattaacgctatctaccgagaaatggagaacatcaatggaaagggctggagcgccaggaaagtgagcaatatactgtcaaacgttatctacattggcaaggtgaagtttgccaagaatgagtatgatggtaaccatgaacctatcatcagcgccgatacatttgaggctgcccagaaactgctgaatagccccgatcgagagaatgccaagacctccgcccagaaaacccccttccgggcaaactatctgctgtcttccctcgtatactgctcacggtgtggcgcacggtactccgcgaatcatgggtattacaagtgttactcaagatctaaaagttctaaacagttcatcaccgacccaaactgcaagaacgataattggaagattgaggagctggacaaactggtgctctccgaaatctacaatctgatcaagaagcctcagttgattaataagctggcttctaaggcgaaacaaaacaacacaccgtacgaccgaaagaagcttgaaaaaaggctgagagaacttgagcgccagatggaaaatctgttggatctgtatcagctgggcaacattcccatggagctgttgtccacccgcatccacaacattgatgtggaaaaaggaatcatccagaagcagttggagacgagttcaggaaatagctccacttcaatagaagcttttaaggcatcacttgcgagtttcagtgagttgttcgacatttcccctatcgagacgcagcggctcatagtctcttctttgatccaagctgttaacgtagatggacagcaggtctccgtggtgtggaggata

SEQ ID NO: 1530 - DNA, 1476 bp, unidentified
  source 1..1476: mol_type = unassigned DNA; note = Bacteriophage uvig_173267 from the Index of /pub/databases/metagenomics/genome_sets/gut_phage_database (ebi.ac.uk)
atggctgccattgactttaacaacgtcgtcgacctgtatatccgggtgtccacttccgaacaggcggaggagggctattcagttgctgaacaagaggagcgcctgcggtcatattgtgccgcctataactacactatcaatgccgttcatgtcgatcctgggttttccggagcttctttggataggcctgctatcaagaaagtgatgtccgatgtcgaacacggacgatgtaagaaggtgatcgtatggaagctggatagactgtcccgaagtcagaaagacaccttgattctgctcgaggacgtgtttctggcgaacgattgtaacttcatctctttgatggagagctttgacacttctactccctttggccggtgcattgtgggcatcctggcagctttcgcccaaatggagagagagaacattaaaattcgcacgatgatgggtcggcaggcacgcattagagaaggacatttccacggaagcaggtgccccctggggtacaagtttcagtacgcaagcgacggtacccttctttctaatgatttggtggtagacccttacacctcaaaacttgtgcaagaggtgtaccggctttctctcgggggctcaagcttctcttccattgcagcccatatggcaagcacctatggatgcagtctgtacgattggagtaggaacacagccataagaaggattctctctaatccaatctacatgggaaaggtgaaggtcgggaatgagctctatccaggcatccatgagcccctcgtgagcgagacggactggtacatggtcgctgcaatgctgaagcacaacaaggaacagcagaaaagaacctatgcctatcagatctcctgcggggtgtacgctgataacctgctgaccggtctgctgttttgcggggactgcggcgccaggatgtacgcgaggcgcgtgtcacaaaataagaaaaagtatatttgtcactccgtggccaaaacgagtcctgccatgattaagagtgatcactgtaccaaccgactgcaccccttcactgtccatcagctcgatgaaatggttatagacgagattctcaagcttagcttggatcgcccaggcttcgacatgctttgtgatcagccggacgactcttcaaaaagtgaagataaggaaatatacgaggagcgactggccgaagtgaatcggcagttggacaggttggtcaaactttaccagacaggcttgattgacctcgacaatatctctgcaagactcggcgacctgaaccaagagaaaaatttcctggaaggtaacctcgctaccatcaacgaagttacaccagccgaaatcagagagacagcttggaaaagcatacagagccttcagtccgttttgaataatggggatatggatgaagtgcaccgcatcatacacacactgatcgataaggttgtagtgcttaatactgacgtaacaatctattggagcttctgc

SEQ ID NO: 1531 - DNA, 1386 bp, unidentified
  source 1..1386: mol_type = unassigned DNA; note = Bacteriophage uvig_110260 from the Index of /pub/databases/metagenomics/genome_sets/gut_phage_database (ebi.ac.uk)
atgaagaaagtggcctgctatgtccgcgtatctaccgagaaccagatcgagaattactcaatagatgaacagaccgagagactcgaggcatattgtaaagccaaggactacgctatctacaaaatctacacagatggaggctactctggcggtaacatgaacaggccagcgctcaatgcaatgctggcagacatcgagcataagcttttcgatactatcattgtttacaaactggaccgcctgagcaggtcccagaaggacacgttgatgctcattgaggattatttcctggcaaacaacatcgacttcgtcagcgtgtccgagaattttgatacttcaaccccctttggacgggcaatgataggaattctgtctgtcttcgcacaactcgagaaagatcagattactgaaagattcacgatggggagaataggaaggagcaaaagtggccttttccatggtgggggcaacgcgcccaagggctataactacatcaacgggcacctggaaatcaataccgtagaagctgagcaggtgaaggagattttttccctgtttttgtctgggaagtcagtgaacgccatctcaaaaatcatgaccaaaaagtacaatgacaacttgtggaaaaacgctcttcaaatcacaaattgcatccggaactccatctacatcggcaaggtcaagttcaaaggtgtggagtatgacggtgagcaccagcctatcatttccgaagatgatttcaggcgggccaacgaactgcttaaaagtgacgaccgaattaagttccctgcccaaaaaactccattccgcgctgggtttcttctctcttccctcgtgtactgtaaaaattgtggggctcgatatagcgcctgccatggctattacaagtgttatagcagatctaagagtacagccaagtttgtgaaagatccctcatgcaaaaacaagaactggaagattgacgagcttgatgctctggttatatccgagatacacaaaattgccatagacgacgagtataagaagttgttcaagaaggaggagaagaccgatgacaccaagagtatcaaggctgaaatcagcaagatcgactttcagattaatcggctgctggatctttaccagattagtgacattccgatcgacactatcaaaagcaaaattaccgtgctgaccaataagaaagatgagcttaatgaactcctgaataagaataggcgcgccgacaactataaagcgtttcaggccgccctgaataggtttgaagctctcgatgatacttctggaattgatgagcggcgactgttgataagcacattgattgaacgcattacaatcgacgaagaatccgttaatatcacatggagaattgaaagcaagatagtc

SEQ ID NO: 1532 - DNA, 1434 bp, unidentified
  source 1..1434: mol_type = unassigned DNA; note = Bacteriophage ivig_1400 from the Index of /pub/databases/metagenomics/genome_sets/gut_phage_database (ebi.ac.uk)
atgaataaggtagccatctacgtgagagtttcaacgaccaatcaagcggaggaggggtattctattgaagagcagatagacaaactcaaagcttactgtatgattaaggactggagcgtgtacgacgtttatgtcgacgctggtttcagtggttccaacattaagagaccggccatccagaaactgatcaaggataccaaacgaaaggtgttcgacacagtgcttgtctataagctggatagactttctagatcccagaaagacaccctctatttgatcgaagatgtatttcttgagaacaagatagacttcgtgagcctgctggaaaactttgacacctcaacggcctttggaaaagctatggtggggattttgtctgtttttgcacagttggatcgagaacagattaaggaacgaatgcagctcggcaagcttggaagggctaaaagtggcaaacccatgatgtgggccaaggtggcctacggctatacataccacattggtactgggaagatgactgtaaaccagtcagaggctataatagtcaaagaagtgttctctagctatctgaacggacggtcaatcacaaaacttagggatgatctgaatgaaaagtatccaaaaacccccgcctggagctacaggactatccgccaaatgctggacaacccagtgtactgcgggtataacaagtacaagggccaagtctatcctggtaatcatgctcccattatctccaaggagatctacaaccaggtgcaggatgagctgaaaatccgccagcagaaggcgtatgagcacaacaataattaccgcccttttcaaagcaagtatatgctctctggaatcgcgcaatgtgggtattgcaaggccccacttaaaattaccctgggcactattaggaaagacggcacaaggttcaaacgctaccagtgcgttcagcggactcctcggaaaacaaagggagcaaccatctacaacaataacgaaaagtgcaacagtggcttttacgagaaggatgacatcgaagcatacgtcctggagtccattagcaagctgcagacagatagcaattgtattgacgatcttttcaatgacgaacccgaaaaactcgaccgggacgccctgaataaggagatcgaagccctctctaacaagatctcccgccttaatgatctgtacatcaataatctcattgccctggacgacctcaagacgaagaccgatactcttcagagtaagatagatatcttgaaggagagattggagaaagatcctgcactggagaggcagaagaacaagcagaaaatgttgaaaacacttgacactaaagacatcttcaaaatggattacgaggagcaaaagatgctggtgcgggcactgataaacaaggtgcaggtcaccgctgattccatcaaaattctctggaaaatt

SEQ ID NO: 1533 - DNA, 1578 bp, unidentified
  source 1..1578: mol_type = unassigned DNA; note = Bacteriophage uvig_144279 from the Index of /pub/databases/metagenomics/genome_sets/gut_phage_database (ebi.ac.uk)
atgcaggagatgaacatcagtataaacgatctgatcatgtatctgcgcaaatctcggtccgatgacccatatatgaccgtcgaagaggtgcttgctagacacgaacagcagttgcaagattacgctctgagctcattcggggcagttctcccggaggaaaagatcttcagggaggtggtgtccggcgagactataagtgatcgccctgtgatgcagaacgtcatgaaatacctggaaaccggactcatcaaaggcgtgcttgtaatcgagccccaacgactgtccagaggagacctggaggactgtggacgaatcattaacacctttcggtacaccgatacattggtaattactcccccgaagatctacaacctctctgacgagtacgacaggaaattctttgaaatggagttgactaggggcaatgactatctggaatatactaagaagattctgaaccggggcagaatagcatcagtgaagcagggcaattttatcgggactatccctccctatggttaccgcaaagtgatgattggtagcggcaaaaacactcggcatacactggaaataattcctgaacaggcggaagcagttagactcatgttccacctgttcgtcgacgaaggctacggttttacccgcatcgctcgctatctggatcgagtgggaattcgccctctgcactctgagtgttggaacccagccagcttgaaagatatactcgaaaatcctgtttatatcgggaaaatcaggtggaattggaggaaaacccaaaagaagatggtcaacgggcagatcattaaaacaagaccaaagacaaaggatagctctgcttggatctatgtcgacggaatacacgagcctattattgacgagaaaacgtaccaggccgccctggacaggagaaccgataaccccagaatcaggaagggaaccgaacttaaaaacccctatgcaggtttgcttttttgcggcacatgcgggagggcgatgaattacaagagaacacataacaagaagtacgggtccatctgcgaaaatatgctctgctctaatcaagcaaactgtcacacccattccgtgaagttttctacattccaggagcgcgtgatcacgtcacttaaggagactatagctgattttgaaattaagctcgaggaagacaatgggagcagccttcgatttcatatggcccaggttaataggcttagatccgagctggacaaattgaaggaaaaagacgagcggcaaaagaatgcttatgagaatggcatctacacgatggaggagttcgccccacgaaacgccaaacttcaggagcaaatttgccagatgcagcagaaaattcggaatatggagcacgccgtaccagaggcgatcgattacaaggaaaagattatgcgcttccgggactgtcttgatgccctccaggatcccaacatttcagccgaggagaagaacaatttcctgaagagttgtattgacaaaataatgtactacaatgacctggaaagtcggagcggaattggcaggtatatccagaatgagttccggctggatatctttctccgactg

SEQ ID NO: 1534 - DNA, 1674 bp, unidentified
  source 1..1674: mol_type = unassigned DNA; note = Bacteriophage uvig_193710 from the Index of /pub/databases/metagenomics/genome_sets/gut_phage_database (ebi.ac.uk)
atgagaagcatcgaaatttgtgataacaagtgcggagagaagatgatgcagacactggcccagggcgaaatgagagtggtggtcatccctgccaaaagttccgaggagaataagcaggcagccaagtgtctgcgcgtcgccgcatactgccgggtgtctaccgacgacgaggagcagaagacctcctatgaggcgcagatagggtattatacagagaagattaaccagaacccggagtggcagatggcaggtatatttgctgacgagggaatttctggcacccaggcaaaaaaacgccccgagttcctcaaaatgataaggctgtgcagacaaaggaaaatagacatcatcctcactaagagtctgtcacggtttgcccggaacaccgtcgacagccttgggtacatcagggaactgcgggccctggggatcgccgtgatctccgagaaggagaacatcaatactttgactgccgaatccgagatgttgatcactattatgagctgttttgcccaggcagaatctgagagtattagcaaaaacgtgtcttggggagtgcggcaatctttcaagaatgggaatgttccaatgcagtacgccaggctgttgggctaccgaaaaggtcacgacggcaatgcagaaataattcctgaagaagccgaggtggtcaaggagatctatagatgttatctggatggcatgagcatgaatctgatcgcagataggctgaatgaaaaaggtctgacaaccaagggcggaagttctccctatcggaaaacagttgtgcagcggatccttaccaatgaaaagtacacgggcgacgccctccttcaaaagacctacgtgacagactgcattacaaagaagacccgcaaaaacaacggagaacttcccatgtatctcgtgaagaaccatcacgaaccaataatctccagaaccgatttcaacagagttcaagaagaaatggcccgacgctccgctaagaggactatcgcggacaaactgacgaaaactggccaggggaaatactctgctaagtatgcactttcagagctccttatttgcggagagtgcggagaacactaccgcagagtgacatggacggctaaagggttcaaggagatcaagtggcgatgcgtatcccggatccagtacggaaaaaagaagtgtcattcaagcccaaccgtagacgagcaggcttttcatcgcgctattgtgagcgctatcaacgagttttgtgaggtgaaggatgatgttgcgaaggcgcttcgagagagtattattgaggcccttgatcagaatcagaacgggtcagtccacgctgctcagcagcgaattgacgaactggcacgcaatatggatgagctgatcaaactcgccacggtacctgagaccgccgaaaacgccatgagcgatatcgccaagttctcagaagagatgaaaatgctcagagaattcatcgaaactgaaaaagctaagcaagctgcaactcaaagaggttccgatgaggtcaataccattctggagcgcttggggcaagaagacttcaccctcattgagtacgatgacgtagcagctaggcagttgattgagaaaattacagttgcgagcaaggacgccataacagtcaggtttaaaggcggtttcgaaatcaggaaagatcttaacggcaat

SEQ ID NO: 1535 - DNA, 1476 bp, unidentified
  source 1..1476: mol_type = unassigned DNA; note = Bacteriophage uvig_256500 from the Index of /pub/databases/metagenomics/genome_sets/gut_phage_database (ebi.ac.uk)
atgtcacagctctcaaccagcaatgcacagccacttgaaataggtgccgcttacatccgggtgtctaccgacgaccagaccgaattgtcccctgatgcacaactgagaatgattctggatgcagctaaagcagatgggttcgtgatacccaaggagtatatcttcgaggaaaaaaagggcatcagcggccggaaagccgataacagaccagagttccagaggatgatcgctatagcaaaaagtcaaaagcccgcacccttcaaacgcctttatctttggaagttttcacgattcgcacgaaaccaagaggaatccacattttacaaaggcattcttcgcaagaagtgcggcatcgaaattaagagtatcagcgagccgatcatggaaggcatgtttggccgcttgatcgagaccatcatcgagtggtttgacgagtattacagctttaacctgagtggggaggtgaagaggggtatgaccgaaaaggccctccgggagggataccagaccgccccatgtctgggttacaaagccgtcggggatggcaagccattcctgatagacgaggacgcgtacagcattgtcgaatacattttccaagcttatcatagtggacgcgacatgacagggattgcccgctctgtcaacaccatcggatatcgcacacagcgaggcaatctctttgaccgcagggccatctataggatcctgactaatcacttttacacaggggaggtttcctggaacgggatcactttccagggaactcatgagactaggcctgctgtcacatccgttttcgacgatgtgcagaaacggattacttccgaataccaccccaagaagcggagagaggcctctgctaatgctcactggctgtctgggatgctgttttgtggcgtgtgtggaagctccctgggattcaaccgatccaacgatcaaaaaaagagaccggacttctttcaatgctggaagtatgctaagggttttcaccctggaagttgttgcgtttctgccaggatcgccgaaagaaccgtgctcagaagcctcgagaaagccttgagaaataaccatttggagtacgaacacataccaaaaacggagaacgacatttccgaggaggagattgcaatcaaggaagcgttggagagaattacagtcaaggagagaaggataagggaggcctatgagaacgaaattgatacgctggaagagtacaaacagaataagctccggctcaacgccgaacgaaaagagttggaaaatgccctggatcagctgcggcagaaagcgcagcagaccgaagctgcccctcctgaccaggccgaaatgatggcaaaggtatcttgcgtgtatcaggtactttcagaccccactgctgataatgaaactaaaggcaatgcgttgaggtcactgtgcgagaagattgtgtttgatcgggaaacacgctctttcacgttcttttactataccagc

SEQ ID NO: 1536 - DNA, 1785 bp, unidentified
  source 1..1785: mol_type = unassigned DNA; note = Bacteriophage uvig_206777 from the Index of /pub/databases/metagenomics/genome_sets/gut_phage_database (ebi.ac.uk)
atgagtgttaagcagacggaggaaaagattaccgccctctacgaacgactgagccgggacgacgagcttgcgggcgagagcaacagtatcctcaatcaaaaagcctacctcgaaacctacgcagcacagcatgggtataccactatcgcccactataccgacgatggttggtctggcggcaactttgaaagacccgactggaagcgaatgatcgctgatatcgaggctggcagagtgtgccgggtgatagtcaaggatatgtccagggccggccgcgactaccttcaaaccggattttacaccgaagtattctttcgccagcatggagtgcactttatcgcaatagcgaacggtgtcgactccgaggaccagaatagcaacgaatttgcccctttcctcaacatcatgaatgagtggtaccttagagatcagtcacggaaagtatccgccgcctacaagattaagggaaactcagggaagcatactagcacccatgccatctacgggtataagaaagatcccgaagacaagaatcactggctgattgacgaagaagctgcggccattgtgagaaggatctttcagatgtcaattgaggggcacggcgggtatgaaattgcccagattctgacacgagaaaaggtggaatctccctcatattacctggcgtcccgcggattgtataagaatagaaaagatatgagcagaccgtatgactggtacggaaactccgtgaatgtactgctgtcaaaacccgaatatatgggccacacggtcaatttcaggacaagtaaaaaatcttataaggacaagcgcattatgaaccctcctgaggagtggttgatcttcgaaaatactcacgaggccattgtcgatccggagacttggcatctggctcagcaaaccaggaaaactgtgcaccgcatcgacactaccggggaggctaatccactgacgggactgatgtactgcgccgattgcggcgccaagatgtataaccaccggtcctttaaaacaaagagtgatgggacccggacggccgttgataactacaactgtgctaattacaccctgacattgcagagagagacacataagtgttgttcccacagcgtgactacaaaagccattagaggaattcttctcgacactatcaggggcgtgagtaagtatgcaatctctaacgaagaggaattccgggacaaggtgatggaagcctctcgattgaagcaggagtccgatgcaaaagacctgaaaaaacggctcaaagctgcgcagaaacgctgccaggagctggacatactgatccagaagctgtatgagagctatgccgtgggtaagattactgagcaccgctttgatcttctgtctacacagtacgagaaggagcaagccgagttgtctgcagttatcgacagcaacagggtcgagttggcagactttgagaccgatacatcaagagccaaacaattcctcgcacttgccaaaaaatacaccgatttcagcgagctgaccaccccaatgatcaatgagttcatagagaaaataattgtccatgcacccgagaagatcaatggtgagcgaactatggagatcgaaatctaccttaagttcatcggcaagttcgaggttgaacctacaccagaagagatagcagtggctgaggctgaacgaaaccgcagggctgttgaaaggcaaaagtacctcaggaaaaaagctcagcaggagcagaagcggatggaagctcaattggaacagacagatgcaccaacacaggagacggct

SEQ ID NO: 1537 - DNA, 1449 bp, unidentified
  source 1..1449: mol_type = unassigned DNA; note = Bacteriophage uvig_158624 from the Index of /pub/databases/metagenomics/genome_sets/gut_phage_database (ebi.ac.uk)
atgactactcagagtacagtggagataggagccgcttatatcagagtgagcacaaatgatcagaccgagctcagtcctgatgctcagttgagagttattctggagtccgccaaggctgacggatatgttattccaaaagagttcgtgtatatagagaaaaagggggtgagtggccgaagagccgacaaccgccaagaatttcaaaggatggtggcaaccgccaaaacacagccctgtccttttaagcggctgtacctgtggaaattcagcagatttgctcggaaccaggacgagagtgtcttttacaagagcgtgctgcgcaagaaatgcggcgttgagatcaagagtgtctccgagcccattgccgatgggatgtttggacgactgatcgagtccatcatcgagtggttcgatgagtattattcattcaacctgtccggagaagtaatgaggggtatgaccgaaaaggctctgcgcgaggggtaccagtgttctcctagcctggggtacgcagctgtcggagagggcaaaccgtttatcattattgaaaaagagtacgcgatagtcgagttcattcatcaatctttccataaaggaaaagatatgacagccattgcaagggaagccaatgatatgggctttagaacgaagcgaggcaatcggttcgacaggaggggcatctataggatactcgtgaatgaattctacaacggcattgtggtgtggaatgggatcaagttccagggcgcccatgagactcgcagttccgtgaccgatatctttgaatccaaccagcagaggattaagaaggaatataggccccggagcagacgcgaaacctcaagctgccagcactggctttcaggcattttgaagtgtagcgtctgcggtgcgtctctgagctataacagatctaatgaccagaaaaagcgacccgacttcttccaatgttggaagtacgggaagggtgtccaccgagagtcttgctcagtatctgtcaagaaggctgaggaagctgtcctgacatcccttcggcaggtaatggcagaccagagcgtacagtacgaatacatcagaaagccagatcagaaggttatctctgaggagtcacggctttccgaagccttggaaaaagtggcgatgaaggaaatgcgggttaaggacgcatacgaatcaggcattgactcccttgaggaatacaaagccaataagctccgccttcaggacgagaggaaccacattctcgaagagcttgagcaactcaaagagacgcctggggaaccagaaggaccagatatgcaggaggtgttgaaaagaatcaccactgtgtatgacctgctcatggacccggatatcgacaacgtgactaaaggtaacgccgtgcggcgcataatcaaaaaaatcgtttttgatcgccaaatgaatgagtttcacttctactactatgca

SEQ ID NO: 1538 - DNA, 1743 bp, unidentified
  source 1..1743: mol_type = unassigned DNA; note = Bacteriophage uvig_46185 from the Index of /pub/databases/metagenomics/genome_sets/gut_phage_database (ebi.ac.uk)
atggaggacttttacaaaattaaagaggccttgaagataatgccaataacccagattcccctgcgcgtggtgatctattctagagtatctacagacagtgaagaacagctgacatccatcaccaatcagaagacctattataagaaactgatagagaacacgccgaagtggactttgattgaggagtatgtggatgaaggcatcactgggactagcaccaaaaagcgcgaggcttttcagcgcatgattagcgacgggatcgaggggaagttcgacatgataatcacaaaaagtgtcagtaggttcgcgaggaacactctggactcactgcaaaacgtccggatactgaccgcccatggggttggagtgtggtttcacagcgatggcattctgactttcgaagccgatggcgagctgcgactgagtattatgagcgcgtttgctcaaggagaatccgaaaagaaatccgaggccgtgaggttcgggctccaggagtctatcaagagaggaacagtgtttggcttcgacaacatgtttggatatcgactccggggcggtaaactcgagatagatgaagcagaagtgccgatgattcagaaaatcttcgagctttacgctacagacaggtacagtatgaaccaaatcgaaaaaatcctgtacgatgacggttatcggaatcacaatgggaaccgcataagtcacgcaaccctctctcacattattagaaatcctaagtataaaggtgtattcgctggtagaaaagtccgaaagaaggatctcttcgacgaccgagtcgaaatgttgccccagaatgagtgggtgatcattgatggggaaaagggccgctcaatcgttccacccattgtatctgaagagctctgggcgaaggccaacagagtcctggaggcaagatcaattgatgtcaagacacggcagaataagtgcaaccaccctaaccttctgaccggtaaactgtggtgtgtgcattgcaaccttccttaccataggaaggcatccaaaacttctaatgccgtactcaactccgcttgggtgtgtgctggcaaaatccgaaacggcaccgcatcatgccccagcatctacctgtacgagaatgaggtgaagcaatgtctttatgaattgttcatcgaggacgatttcgacatcgacgattacattgaccagtatatcaaactggtgagcgaggccagctcctccgagaagaacacgaataggcagaacgaattggagaaggaactggcactgattgagaagaagaagacaaagatcttggagttcaatgttttgggacaggtttctgatcaggactatattgcccagaataatgccttgaacgaagaatacaaacgcaagagcgaagagctggccaatgtgcggctggccctcgatactaagaaacgcacggaggaagattttgagaaaatgaggggcgctcttcaacagttgaaaggacggaagaatatcgattttatcgacccaacttttgtgcggacctacattgaaaggatcgatgtttccatgatcgacggcagaacaatgaacatggacgttatccttaagaccggcgataagatttctcggattctcaagaaaaatctgagctccgtcaacagacgcaaacacatctacaccggacggaggttgacctttcggcgcaaaacaccttacggaagagggtcacatgagatcccaatacagattaacatatgcttcttttcactcaat

SEQ ID NO: 1539 - DNA, 1572 bp, unidentified
  source 1..1572: mol_type = unassigned DNA; note = Bacteriophage uvig_593892 from the Index of /pub/databases/metagenomics/genome_sets/gut_phage_database (ebi.ac.uk)
atgcccgattgtttgtaccttcggaaatctagagtggatatggaggctgaagccagaggagagaaagatgttctggccagacacgaggcagagctccttcgcacagccaggaggctcgggcgcactgttggggctatctaccgagaggtcgtcagcggagacacgatcgcagcgaggcctgtaatgcaacagctgctgcgcgaagtggaggctggacagtgggaagccgtgctggtgatggaggtagagaggctggcgcggggagataccattgaccaaggtgtggtcgcacgggctttccagtactctgagactaagattataactcctatcaagacatacgatccaaccaacgagttcgacgaagagtactttgaatttgggctctatatgtcccggcgagagtataagactatcaaacggagaatgcagcgcggacgggaagcatctatccgagaagggaaattcgtcgggaacaagaacccatatggttacgtcagggtgaaactgcagggcgttaagggctggacactggcaccagaccctcctaggtcagaggtggtgcaggatattttccgctggtacactgaaggctatacagggccagatggagcgacccagctgctgggagtgacgtcaatagccaaccggttgaatgagctgggcattcacaccgctcatgggaccttctggaacgcctcagtagtgaacgcaatgcttcgaaaccccgtatacgctggctgggtccggtggaattatcgagccaccgtccggacagttaaagatggccaggtgagcttgagcaggcccaggaataaggccaatcagacactggtgcggggtctccatcccgcccttgtgagtcaacagacctttgacgccgctcaaaagagattgagtatcaacccttctcgcgtcggtcctaaaaatgctgctcgaaaaaatccgctcgctggcttgatattttgctccgtgtgtggcagctccatggtcaggcgcccatacagcaacggcgcagagccatgtgttatgtgcccccggccccactgcccgaccgtctccagccagatgtatgttttggaggacactctgatggacgccctcgctcagtggcttgaagagctcgagccagaaacaccccctgatcccgccgaggacccagaagttcaatccctccaagcccttattgacgacactagtaggcagctccagaagctcgacgcacagatcgacagagcctacgaacttgtggagactggtgtttacacctctgaggtgtttagcgccagatccatggaactggcgagacgaaggctggatgtacaggaccaaaagagaaatgccgaactggaactccagtccaggaaacaggctctgttcttttggcgccagctggcccctcaggtgagacatgtgattgatagttatagagcctcatctgatcctgacgaacaaaatgcactcctgcgaaccgtgttggcaagagtggagtataagaagacaacgcgcgcgcgctggggcgacgggagcgacttgtcactgaccctgttcccccttgtcccggatagtgat

SEQ ID NO: 1540 - DNA, 1575 bp, unidentified
  source 1..1575: mol_type = unassigned DNA; note = Bacteriophage uvig_36383 from the Index of /pub/databases/metagenomics/genome_sets/gut_phage_database (ebi.ac.uk)
atggggaggaaggtcactgtgattcctcccaccataagcctccagacccatctccctaccacccagaaagtgaaacggaaggttgcaggctatgcaagggtctctacggattttgaggagcagctgacctcatatgaggcccaggtggactattatacgaagtatatccaggagcgcgaggactgggagttcgtgaaagtatacactgacgagggtatttccgccactagcacagttcatcgggatggcttcaatcagatggtggctgacgcccttgatggcaagatagacctgatcgttaccaagagtgttagccggttcgcccgcaatacagtcgattccctgaccactgtgcgcaaactcaaggaaaagggagtagaggtatttttcgagaaggaagacatctacacactcgattccaaaggagaacttttgattactatcatgtcctctctggcccaggaagagtccaggtcaatcagtgaaaatgtgacttggggtcaaaggaaaagatttgccgacggcaaggtcagtcttccctataaacattttctgggataccggaagggggcagatggattgcccgaaattgtgcctgaggaagccgaaatcgtgaggtctatctacagatggtttatggaaggcatgactccatataagatcgcatgtatactgatcgagaagggaattccaacccctagcggcaaagagcagtggcacttgagcaccgttaaaagtatactgacaaatgaaaaatataaagggtccgcccttcttcaaaagaagttcacagtcgatttccttactaagaagaccaaagtgaacgagggcgaagtcccccagtactacgttgaagagtctcacccagctatcatctccccggaagaattcgagctcgtgcaggctgaaatggcgcgaagaaaagagctcgggaagagatatcatagcggtaatatttttaccgctaaaattgtatgcggtgagtgtggaggcttttacgggcctaagatctggcactccaacagtcactaccgccgagtcatttggaggtgcaataagaagtacaccaacgattgctactgcaaaacgccgcacattgacgaagacaccattaaacaggggttcctcaaagcatacaaccaactcctgacagataaaggaagcgtgctgtctctttgtgagatgctgctgcacgccttctcagattgttcagacctcgatgctaaaatgtcagtgctgggggacgaggagaagcagattaccaagaatatcagagagatggtcgtgatcaactctcggaccgttcaaaaacaaccagaatatacactggagtaccagagctacgaacgagagtatgaggccctcaaagcgaagtaccagaagctgcaagcggagaagttggacagaatcaacaagacaacagtgattcaggacttcatggaacagatcaagaagcggaaggagcccataaaggtgttttctagcgatgtgtggctgactgctatagagactgtcacaatttgcgaaaaaggcgaattgcagttccgctttaaaaacggcacagagatcacggta

SEQ ID NO: 1541 - DNA, 1419 bp, unidentified
  source 1..1419: mol_type = unassigned DNA; note = Bacteriophage uvig_384338 from the Index of /pub/databases/metagenomics/genome_sets/gut_phage_database (ebi.ac.uk)
atgagccaggctattgccgggactgctgttatctacgctcgattttcttgttccaaacagagagaggcctcaatagacgatcagttgcgcgtgtgcaggcagtggtgcgagagggaggggtacgcgattgtggccgaatactgtgactacgctatatctggcaggacagacgatcggccccaattccaacaaatgattgcgaacgcaggagagagcgacattgccctggtctacatgatggataggttcagtcgcggcgagtatgacgcacctatctacaagcgagaactttctctcaagggcgtcagactggtgtctgctcttgaagccatacctgacagccctgagggaatcatatatgagaaacttttggaagggcttgcagcatgtgaaagccggaagacctctattagagtgaagcggggaatggagggtaatgccctgcagtgtaaaaccaatggggtgcgctgctacggctataggacgggtgaagacggacactacgaggtggtaccagaagaagccgaggtggtgagagaggtgttcagacggcgacttgagggggaggcctgcaactcaatcgcccgggatcttgcacagaggggcgtgaaaacctacactgggcggccctgtggctactccatggtgtacagtatggtgcacaatgacaagtatcgaggagtatatagttggggaggcattacacaggaagggggcatgccgaggatcattgaggacgatctgttttaccgagtgcagggcgtcaagggtaaaaaacagagagcaaacgaatcctggggcgaattcatgctcgccggcaaggtcatctgtgcagggtgcggcagatccatgcctggagtctccggaagaggacataagaacgttaagtatgagtattacacgtgcaggaattgcaaggaggttaaacccgtcaggcgcgactggctggaggctgaaatcgtacgcgcactgcgcgagacactctcagacccagatgaggcgctgcgcatcgccaaacttaccctgggcgatcagagtgaaaatgacgcagaacggaaagccgctcatcgcagcctcgatgaagctgacagagggttgcggaacattctgaaggccgtcgaggagggtatcgtggtccccggtacaaaggagcgggtagctcagctggaggcccagaaacagcgagctgagcgcgatctcgcgatgctccaagggaaggaaatcgacccgcaggattttgcatatttcctccaatttggtagcaccttggacgacgcctccttgctggatgcctttgtttatcaggctatggtctcaaccgaagatgttgtggttactctgaattatgataccatcgagaacgaaccagcccggctgacactgagcagggtgcgcactaagttcgagtggtgcccaaga

SEQ ID NO: 1542 - DNA, 1581 bp, unidentified
  source 1..1581: mol_type = unassigned DNA; note = Bacteriophage uvig_329211 from the Index of /pub/databases/metagenomics/genome_sets/gut_phage_database (ebi.ac.uk)
atggaggagcgagcgaaggcagtgatctacgcaaggttctcatctgataagcagcgggaagaatctattgacggtcaaatccgggaatgtaccgcttatgctgagagccaaaaccttgaagtgattgatgcttacatcgaccgagctctttccgcacgcagtgataatcgccccgacttcctgcgcatgattgccgatagcgctcggaagaattttcgctacgtcattgtgtaccagcttgacagattttcacggagcaggtatgatagcgccgtctacaagaacaagctcaaaaaaaacggggtaagggtgctgagcgccaaagaacatatcggcgatgacccaagctccatcatccttgagtctatgctggagggttacgccgaatattactctgcagagttgtctcagaaagtcaagcgcggtatgactgagaacattctggagggcaagtgggtgggctgccgcgtaccccttggatataagctgaccgctgataaaaagctgcagatagtaagtcgagatgcagatgcagtgagactgatctacacaatgtataatgcaaatgagcgaatcatcgacattgtgcggtatttgaacgctcacagatataagaccgcggctgggcgcgccttcacaaggtccagtctcacaaaaatactgggcaataagatctacattggcacttatgagtgggacggccatgttgtcgagcaatttgcccctcctatcctcgacgacgacgtctgggaagccgcacagaagaggacgcagcagcacaaacttaatcctaggccaaaacgccggagtgccgattacgcgctgactggtttgatctattgtggggagtgcgggaatccaatgaccggacagtccggccggagcaaaaacggctcaatgtataggtattaccgctgctccacgaagaacaactaccactcaagaggaaaaaagcaacacataaagtgcaagagtagaaacatctcacgagaaaaagtggaggatctcgtgttggatgaaacagtacggattctctctaatcccaaggccgtgaagatcattgccaaacaggcggcaaacgtgcaaaaaatagaccctaccgcccaagagcaggctagaatcgctcaggagagaaaaactattcaggccaaactggaaaattccattgctgctgtcgaaaacggattgtgttcaaagactattgccgagaatattgaacggtacgaatctagaatctccgaactggaccagcagatagatgaactcaagtttgcatacgccccaataagaatagatgcaattgcggttgagtttttcctgaaaagcttgctgaacaagaaaaaggaccacgacaagtacaggcttgacatgtttagaaccttcatcaggcaggtcatcgtttatgccgacaaaatcgagattaggtacaattatacagcctgcccacagattctgaagaatcccgtgagcatcgccctcacaggactccccgagtgttccgggaacgactctgttgttcggttggaaggattcgagccgtcccatccggtgcccgagaccggggccctgagtcctgagctg

SEQ ID NO: 1543 - DNA, 1575 bp, unidentified
  source 1..1575: mol_type = unassigned DNA; note = Bacteriophage uvig_163634 from the Index of /pub/databases/metagenomics/genome_sets/gut_phage_database (ebi.ac.uk)
atgtggatgctgccccctatgtccgtggacgatatcataatgtacctccgaaaatcaagaacagacgatcctgcactgaccgttcttgaggtgctctcaaaacacgaacaaatgctggatgattgggtagtgcgaaatatacccgatgacggtcggcgaatccctgaagccaacaggtatagagaagtggtgagcggggagaccattgagagtagaccttgtgtgcaggaggtccttcgccgcgttgaatcccctcgagtgaaagcagtgctggtcgtcgagccacagagattgagtagaggggacctggaggacatcggacggttggtgaagctgttgagatatagcaatactattgtgattaccctgcagtacacttatgacctgagggacgaacgcgaccgggatatgtttgagcgggagcttaagagagggaacgaattcctcgagtaccagaaaaggattatggggaatggaaggctgctgtccgtccagaacgggaattttatcggtcagaagccgccctacggctacaataaggtggttatcaaagaaggcaaacgcaagtgccatacactggagcctgaccccgagcgcgctccaattgtgaagatggtgtttgagatgtatgccggcggcactagtgctacccaaattgccaagaccctcaggactatgggagttacgaccgctgacgggggcaagtgggtaacctctagcgtgaagcagatgttgaccaacgatcactacatcggtatggtgcattggaataagaggaagactgtgaaggtggtcgaagatggtgaagtggttgctacaagacctcgaaattctgatttcttggtttatcccggaaaacaccagccaatcatcgagaaggagctttgggacgctgtacaggcgattaaaggcaatatacccccaattaagaacagggccaagtacgccaacccattcgcaggactggtcgtatgtcagtgcggcggaaagatggtgcggcaacaatatgtgagagatggcgtcgaacggtgtgcccctcggctcgtgtgtccgaaccaggccgagtgccatactgcctcttgctcactgcccgagttcaccgaggctgtaattgaggccttggagaagggcatcaagaactttgaactgatgatggcggacgcaccagaagacgacgctactcaacaagaaaggctcatcgcacagttggagaaacggttggccgagctcgacaggctggagctcgcccagtgggacaagtatacacaggaggcaatgccgaagcacgtctttgatgctcttaataagaaagtcgtgcaggagaaagaagaaacgctccaagccctgaagacagccatggaaacagttcccatccgagtcgattacgaaaaaaaacgcgaaacattcgcaaccgctgttaaaacgctgcaggatccaaacgcgagcgtcaaagagaaaaacctcttgcttaagcagtgcatagaacggatcaactacaatcgcaaacccaaggaatccgataatcgacgctttgggaacccagagcctctggagttggagctgcagttcaaagta

SEQ ID NO: 1544 - DNA, 1527 bp, unidentified
  source 1..1527: mol_type = unassigned DNA; note = Bacteriophage uvig_351740 from the Index of /pub/databases/metagenomics/genome_sets/gut_phage_database (ebi.ac.uk)
atgatttggaatactgccctctacctgcgactgagcaatgacgacggagacaaagacgagtctaattccattggtagtcaaaggaatatcacaagtaactacgctgccgggcttccagacgtgcaggtaattggagagtacgccgacgatggctttacaggaactaattttgaccggcccgattttaaaagaatgatcgacgatattcagaccggcgcagtcaattgcgtgatcgtgaaggatttgtctagatttggccgggattacatcggggtggggtcatacttggagagattctttccggcttatggcgtcaggttcatcgccatcaacgatggatatgattcattgacccagagcgctaatgacgagttcattatgcccattaaaaacatcttcaatgcccaatatagcaaggacattagcaggaaggtgaaaagtagcttccggaccctgcagggtgaagggaaattcacaggcgcattcacatcctatggttatatcaaagaccctgacgaccgccataagctcatcatcgatgaaccagctgccgcgatcgtgatggaaattttcaacatgtacatctctgggatagggaagcagacgattgctaagaagttgaatgagcgatccatcccttgcccctcagagtacaagaagcttatggggcagaaatataataatggcaatcgcctggaactgaccaagtactggacctattcaactattaactcaatactgaagaacgagatgtacataggcaacatggtccagaataagagtgttcgaaacactgtcagaggcaaagcgaaagagaacagcaaagataagtggatcaaagtcgaaaacacccataagcctataatcaatattgaaaaatggaacgctgcccagatcctgcttaagcgcaacacgcggcaactggatttcaactctaatgtaggcctttttgctggatatgttttttgcggagactgtggtcgcgcaatgtccaagataagacaatccaacggtcagattatgtatatttgtgggagctataaacgatatggagccgacatttgtaccaggcacgcgataaagctggaaactctggaacagctcgttctcgacaaactcaacgagcagctgaagtacttggaaaatatagaactgaataaggccgaggaagataagcggaacgacgagttctctattaaaaaatacgacatcatgctcaacaggatctacaagctgaagaagtcctgctacgaggattataaagaaggactgctgtccagggatgattttatcgcatacaagaccgattacgagaaagaagagcaacttatcaggggccagatggccgcagcacagacacggcaggacgataacgacctcaacaatgagtggattgagactctcatgaaacacaaggagattaagaaattggaccgcgaaacggtggtggagatcctcgataaaataatcatctctgaaacaggcgataacctgaaggtggagatcagattccgctttgagcttaag

SEQ ID NO: 1545 - DNA, 1803 bp, unidentified
  source 1..1803: mol_type = unassigned DNA
atgaagacgaataacgtggaaatcattaaggctgatagcctcgtgaggcgaagaggcgtgaaggtggagagacacctgaaacgggttgccgcatattgccgggtttcctccgactcagaagaccagaagaattcctacgaaagtcaggtccgccactataaggattatatctctcagcggtctgactgggaactggccggtatctacgcagatgagggaatatctgggacacaagtggggaaacgccaagatttccagagactgattaatgactgtgtcaatggcgaaatcgattacattgtgacaaaagccatcgctcggtttgcgagaaatactcttgataccctgaaatacgttcgaatgctgaaggacatgcagatcggcgtgtacttcgaggaagagaatatcgatactctcaccatggacggcgagcttcttctgactatcctgagtagtgtggctcagcaggaagtagagaacacctccgcccatgtgaagaaggggctcaagatgaaaatgcaaaggggtgaattgattgggttccaaggatgtctggggtacgattacgacgttgagacgaagcagctgagcatcaacaagaaagaggccaagattgttaggtacatatttgagcgctacctggaaggtattggagggaaagttatcgcaagggagctggatgagcttggctataagtcaccccgcggactcgaccattggaacgatacaacagtactgggaataattaagaacgagaagtacaagggagacattctgatgggtaagacgtttacagtcgatcccatttcaaaaagacggctctctaatttcggagaagaggacaagtattacatcaaagacaatcatgaaccaatcatctccaaagaagactttgagaaagcacaggagatcagactccggcgcgcaggcaacaagaaaacagtcgctaacgtcaacgggaagcgagagcgatatagcaaaatgtatgcctttagctctatgttggaatgcggattttgcggttccatcctgtcaaggagatcttggcactgtaggtcagactaccgcaaagtagtctggcattgcgtgacctccattaaaaagggcaaaaagttctgcaagcacagcaaaggcctggaggagttggctattgagggcgcgttcatggaggcttatcgacagttgtatcacagtaacgaaaaccttatgacagatctgctggagaccatcgaatcagagctgaatgataactctctcaataaggagttgaaacgaatcactaacaagttgagaaccctgctcaagaaggaggagaaccttgtcaatctcaggctggaaggcaagattagcgacactatctacaatgaaaaatataacgaaatcagttccgagaaggaatttctcgcggaagagaaagtgaacatcgagaccacactgaaatccgaaatagacgtgaagaagaggttgacggagttcaagcaccttcttagctctcagaaaatgttgaccgaatttgaccgcgccgtgttcgaaagcattgtggagaaaataattgtagggggcgtgaatagcgacggagagatagatccggccatgctcaccataatttttaagactggggagacacagaacaaggacggcaagcaattcaaatcaaagcgaaagaatgccaaacttgagactgataagctgtgccctcagaatagtgacgaggataaaaaattgtactcccaggggaccgattatactcggggtgtctgttgtagcgcctgtaaaagtcttgaaaccttcgaacggaaaggc

SEQ ID NO: 1546 - DNA, 1596 bp, unidentified
  source 1..1596: mol_type = unassigned DNA; note = Bacteriophage uvig_587893 from the Index of /pub/databases/metagenomics/genome_sets/gut_phage_database (ebi.ac.uk)
atgaatgccgtgatctatgctcgatactcttcttacaaccagactgagcggagcattgaaggccagctggaagactgtacagagtatgctgataggaacgggctcacaatagttggaacatattgtgatagggccaagagtgggactaaagccgagacccggccggagtttcttaagatgatcaaggattcagaaaagcagaagtttcagatagtcctggtgtggaagctcgaccgattcgccagaaataggtatgactctgccatgtttcgcgcaaagctcaaaaagaatggtgtgggcttgaaaagcgtgaccgaaaacatcagcgacgagccagatggtattattttgcagggcgtgatcgaggccatggcagaatactatagcgctaacctgtctcagaacgttaagagagggctgcgcgttgcaagagaacggggtacctttacgggaggccgggtgatgttgggctaccaaataattgacaaaaagccagttcctcatccccaggaagctaagctggtcaggagcatcttcgaacgaattgccgacggacaaaccgtgcgacagataatcgacgactttaatgcccgaggcttgaggacccggagcggccagccctttacacgaaccagcttccaaactttgctgaaatcaccgcgggtagccggatacgagatcatcgatggcgaaaggagtccttccatctaccctgccattgtatccgaagagctgtttggcgctgtccaggcacgccttgctgtgaatgcacaccttggcgggagagagaaagccaaggatagataccttttgcaaggaaaagccttctgcgggcattgcggtgctcctatggtcggagagtcaggggtggggaggcgcggtaccttgtaccgctattatacttgcgccacacgcaaggccactcacgcttgtaaaaagaagaacgtccccaaacatgagctcgagaatctcgttgtgaactccatcgttgagaagatactctcctctgacaggattaaaagtatttgcgcggctgtgagtgattacttcgcagacaacgacgctgtcgcaaaaatcaaagaactggaggcccagctcagagaggtcgaagatagtattagaaaaaccgccgatctgatgcttgcaaacgccgacttgccagctcttatcaaacctttgcgagaaaaggcagtggccctgtcagcgcgggccgaggatatcaaggccgacctgagtgcaacgagagccgaggcaggatctgaaattacccctgagtcagtgcacgaatgggtatgttccttcgcgaaaaaggactttaccgtgccagagaatcgcattgcgttgatagagacattcctcaatagcgtatatgtgttcgatgaccacctgctgattttctgcaactcatccaaggacacggaacaaatcccgtacgcagatgctctgaagattccattctctagcccctccgagtccactgctgcgcctcccggaggctccgattctggatgtcagactcagccatttccccagatccggacagcttttatctgtttcgggtgcttcggcctgtttatccccctgcaccaggatggg

SEQ ID NO: 1547 - DNA, 1833 bp, unidentified
  source 1..1833: mol_type = unassigned DNA; note = Bacteriophage uvig_195542 from the Index of /pub/databases/metagenomics/genome_sets/gut_phage_database (ebi.ac.uk)
atgtctacatctaacacggattgtgacaatcggaaatatgcaatctacgccagaaagagcaagtttacagccaagggcgagagcatcaatcagcaaattgacagatgtaaactccacctgtctagcatgaatgtggcggaagaggacatcattatcttcgaggatgagggctatagcggtgggaatacagatcgaccacaattcaaggagatgatggacatgtgtgaagacaataagattcaatgcgtgatttgttacaaactcgaccgaatcagcaggtctgttagtgactttactaataccttcaataatctggaaaaacacaatattaggttcatcagcgtgtccgatggcctcaacgggaccaactcaccaatggataaggcaatgatacagctcgtcgcagtgtttgccgaattggaacgcaatataatcgccgaacgaatcatcgacaatatgaccgaactggcccagaaagggaggtggcttggaggcaccacacctacgggatacaagtccgtggagacattcggaagcactaataaggaaggtaaggtgcactacgcacggaaacttgagatcgttcccgaagaaatggagctggtgaaacgcatctacaaactgtatttgaagaccgagtcattgaccgcagtccaggctatcctgttgaatgataacattaaaactaagatggggaacgagtatactagattcgcgatcaaagttattctgagcaaccctgtatacgctaaagccgataatgcagtgctcaaattcttcgagaataaggggagtactatctatgctgagggcacagagtttgacggcaccaaagggatgatggtgtacaacaagacaaaacaagaaaaaaacacgtcccacaaggtgaaaccgtataacgagtggatcgtggctataggtgagcacgaaggcgtaattgatggagccgactgggtctcagtgcagaacatactcgataagaacaaggataaaaactacaaccggcccaggtcccattgtgcgctcctgtcagggctgcttagatgcaagtgcggctccattatgtatcctcgggttgccaagacatataacgagcgaggagaaaggaactttgcttacgcctgcaagatgatgctcaactccaaccgccagcgctgcaatgtaaagaggatcaatggtaatttcctggacgacttggtctgggagcagattaaggtgctgactagtgataagagtgagctggcaaaacagcttaaagaagcccagggaaacttcgaatcagacgaacagcctgtacttaaagagctggagcaaatgaagaagcggttgtctgacaacaagcagaagcagaaaaacctgatcaacttcatcgcaaacaacggctcaaagatgtcccccgagatgagtgacgacgctaacgagcagtacaggaaacttgaaaacagtaataaggagatatcctctaagattattaagctcgaggaagtcgtcgcacagagcgagcaggcctttgctaacttcaaagatcttgctaccagactcagtgaattttctgcggcccttgacactcagaccacctttgaggacaagcgctatgccgttcggcaagttattgagcatgcggagtgggatggagaaaatgtgaagctgttttttaccggtaatcggactgtggagctccaggatataaaggatgaattggctaattacaagaaagcccatagaaagtgggctaaaacatccagcgatgaaaatgccaccctgggcgaggactcagagcgcgatacgaacgccctctctctgccagaaaaagtctgccagagataccccctg

SEQ ID NO: 1548 - DNA, 1620 bp, unidentified
  source 1..1620: mol_type = unassigned DNA; note = Bacteriophage uvig_40909 from the Index of /pub/databases/metagenomics/genome_sets/gut_phage_database (ebi.ac.uk)
atgcgaaactaccctcctctttcatccgccgaagagtactgtatgtatttgcgaaaatctcgcgttgatattgaagcagaggcccatggcgaaggggaaaccttggcacgccacgagaaactgctgctggaagtggctagacgggataaacttaacgttactcagatctatcgggaagtggtctccggagagacaatcgcgtctaggccagtgatgcagcacttgcttcaagaggtggagcagggaagatgggcaggggtgctggtcgtggaggttgagcggctcgcccgcggcgataccatagaccagggcattatggctcagacgtttaagtacagcggaacaaagatcgtgacaccactgaaagtgtacgatcctaacaacgagtacgatgaagagtactttgagttcggccttttcatgagccggagggagtataagacaattaataggaggctccaacgcggtagattggctgctgccaaggaagggaagtgggtctctggcgtggcaccatatggatacgaaaaaataagggtgcccaacgacaaaggctggactctgcgcccagtcgaagccgaggccgatatcgtgcgattcatcttcaggctttacacaagcggtgaggagggggagtccggggaggttaaaaagctgggcacttattccctggccgtgcggctggaccgcatgggtgtgacaccacccgggggtgctccttgttggtcaagcaccaccatccagagtattcttgaaaacccagtttatatcggaaagatccggtggaatgtccataaaaccaagaaacgagttatcggctcatcagtgcgagtagagcattacacggcgccggaagaggaacaagtattcgtggagggacttcaccctgctatcgtggatgaagccgtctttcttgccgcacaggaattgataagccggaaggggcccccgccggttcaggctgccaacaccgtaaccaaccctctcgctggtgtgttggtttgcggcaagtgcggtaggtccatcgtccttagacctaatgcctatggcggcctgcttatgtgccccaatcgggcctgtaataacgtaggctcaaagtacgacatagtggaagaacgcttgcttcaggctctgtctcagtggctggacgactaccgactggaatggtccgacagacccccaagcgaagaacaagcactgatggagctcaaagcaaagagtattaggaaggcccagagcgaagtcgagaccctgcagagacagctcgagcggactcacgatctcttggagcagggagtgtatgacacagagatgtttttgagcagatctaggagcattacggggagaattaatgctgcacaagactccattgctagtctgacttccgagctcgcggaagaggaggccaggtcagccagtagacagaatatcgtccctaaagtcgagaagctcctggaggtatacagtgcgctgccctctgcacaagccaaaaacgacatgctcaagggggtgctcgagaaggtcgaatatactaaacttcacagatctggacgcaatggcccctttgataatttcgaactgctgctctatcccaagctgccacccagtgggctgggagag

SEQ ID NO: 1549 - DNA, 966 bp, unidentified
  source 1..966: mol_type = unassigned DNA
aagaaaaaacgcaaggtggagggagctgataagcgcaccgccgatggttccgagttcgaaagccccaagaagaagaggaaagtctagttctgcagagggtgatgccattcgacgaacttgtttattgcagcttataatggttacaaataaagcaatagcatcacaaatttcacaaataaagcatttttttcactgcattctagttgtggtttgtccaaactcatcaatgtatcttagtaccgcattcatttcagtgagagcttactcatcagagttcgtaataaacaaaatttatattgatggtgaacaagttactattgaatggctctagtagcttgtttatttagattgtttagttcctcgttttctctcgttggaagaagaagaaacgagaaactaaaattataaataaaaagtaacctatttttctgtagattgctttttatcatttatatagaagaaagccgctttttattagattataattgatgttttttgatttatatttcacttcttgtgcaaataacgatatagtagcaacctcggactttttagttcggtgtatttttttgaaattagacgtccgtatcagactaacgcttatccattattgatgtatatgattctaaaggcacgatgggtgaaagatacccactcgacaacacgaccggaaaaataccaaacggaaaaaatatgaatgcacaattccatgcagggattaatgaaagcggaaatattgaaatcatctttaacttattttccgatgcaaatttaacttttcatgcaaaaatttaaaagagagcctcctggcttttctttttaccgaaaaaagaacatacgtacggaaggagaaaggaaatgaaggcagctatttatatacgtgtttctactcaagagcaagtagaaaaggaatcgtcgactgcacgatcaaacatcgatcgaagctgtcgcagtgagacggaagaa

SEQ ID NO: 1550 - DNA, 966 bp, unidentified; identical to SEQ ID NO: 1549
  source 1..966: mol_type = unassigned DNA

SEQ ID NO: 1551 - DNA, 966 bp, unidentified; identical to SEQ ID NO: 1549
  source 1..966: mol_type = unassigned DNA

SEQ ID NO: 1552 - DNA, 966 bp, unidentified
  source 1..966: mol_type = unassigned DNA
aagaaaaaacgcaaggtggagggagctgataagcgcaccgccgatggttccgagttcgaaagccccaagaagaagaggaaagtctagttctgcagagggtgatgccattcgacgaacttgtttattgcagcttataatggttacaaataaagcaatagcatcacaaatttcacaaataaagcatttttttcactgcattctagttgtggtttgtccaaactcatcaatgtatcttagtaccgcattcatttcagtgagagcttactcatcagagttcggtggaacaggaaaggctagagaaatcattattgtttcagcctcagctaaataaagtgtcttttgtaggtaacagtactattatacccacaaaagacacacaatttacaactcataaaaagacttaatatcacaagggagtttctcacacaaactgaggaactctctttttcttttttcgctcattgtaaatatacaaagcttaggttgctgtccgaaccggttcttaatttcttgccacatctctttatacttttgtattttcttcctattatcctgcatacttctggtattatcaatctgacgtccgtatcagactaacgcttatccatcttaatagacccaacggaagaaatcaaaaatggagacattgcggctgtatcagttaatggatacgatgctacgcttaaaagattttataaattccaagacgggataaccttagaaccggaaagttataaccccaacatcacgactcagtttttcagttccaaagaacaggagtacaaccccattcatttaaaaggaaaattagtttggtatatggcccctctcgacattaaattctaggaggaaaactgaatgaaatgtattgcctacgttagagtatccacggaagaacaagcgaaacaggaatcgtcgactgcacgatcaaacatcgatcgaagctggtcaagaggtaaggtagaa

SEQ ID NO: 1553 - DNA, 966 bp, unidentified
  source 1..966: mol_type = unassigned DNA; note = Bacteriophage uvig_401611 from the Index of /pub/databases/metagenomics/genome_sets/gut_phage_database (ebi.ac.uk)
aagaaaaaacgcaaggtggagggagctgataagcgcaccgccgatggttccgagttcgaaagccccaagaagaagaggaaagtctagttctgcagagggtgatgccattcgacgaacttgtttattgcagcttataatggttacaaataaagcaatagcatcacaaatttcacaaataaagcatttttttcactgcattctagttgtggtttgtccaaactcatcaatgtatcttagtaccgcattcatttcagtgagagcttactcatcagagttcgatgggctggggtacatccctctggatgaactggaagcaaaagaaaaggcgtgaccgaagtcacgccaaatcttccccatttagggagcttttgcaaatactgttttatgggaactctgctacaccagcaggccctcgtcgtacttgctggcgaggttcacgctgttcttcagggttccggtgttaaagggcacatagctgtcgatcagcttggccgcttcctgtgcaagggcgtactgtgccttttgcagagcggctgttttctctgcgccgaagtccggccgccacgacagctgcatctgacgtccgtatcagactaacgcttatccattgtccgctttctggattccagaactgaccaccacggagaaagtcggtcacaccacctacaccgtgaccggcagctatgagggcaaggagtcctttttgaagaagctggagcgcattgttgccaagaacgcccagcaaaaatttgaagatgagggtgcagacgaatgacaactgcgcccaattctgctatacttgacccggtaaccaatcctgtactgacagttgctccacagagtaaggaggacacaacaatgtctggagcaacgaataaaatcaccgcactttactgccgactgtcgcaggaatcgtcgactgcacgatcaaacatcgatcgaagctaacgtggcagttacgtagaa

SEQ ID NO: 1554 - DNA, 966 bp, unidentified
  source 1..966: mol_type = unassigned DNA; note = Bacteriophage uvig_576757 from the Index of /pub/databases/metagenomics/genome_sets/gut_phage_database (ebi.ac.uk)
aagaaaaaacgcaaggtggagggagctgataagcgcaccgccgatggttccgagttcgaaagccccaagaagaagaggaaagtctagttctgcagagggtgatgccattcgacgaacttgtttattgcagcttataatggttacaaataaagcaatagcatcacaaatttcacaaataaagcatttttttcactgcattctagttgtggtttgtccaaactcatcaatgtatcttagtaccgcattcatttcagtgagagcttactcatcagagttcgattaaaaaaaattaaatgtcgaaaaaaggcgaacgattttttggcaaaaatcataaaaaaaataaaaacgctgttatattaataaaaaggaaattaatagaggaggcatttaagtggcaaagattaatgttaagaaatgtaaaatagatgagaagcatttatatgagatagagttagaggaaattatatatcaaattttaaataatagtattaaagatgaaataagaaaggcgagttgaggtgatttaagatgaagatgaaagagttaatagatattttagaggatcaaggttttagtatgacgtccgtatcagactaacgcttatccatagaggataactatatatgaggaaaatagaattagtattgaatggcgttgctaggagcatatctcctagtatttttttgcattaaattttgaaatattaatagtatatattatagcaattataatcagggtgaaagtgtgagagttaatattatttatggagaaagagattttgaggagttatttaagaagttaatagaggaaaaagtaaatgatttaattcttgaagtgaaaagtcattatgatttacgttataatgataataactatctatccactttaaaggccgaggtggataaagaggaatcgtcgactgcacgatcaaacatcgatcgaagctaaggctcgcgtgtcctagaa

SEQ ID NO: 1555 - DNA, 966 bp, unidentified
  source 1..966: mol_type = unassigned DNA; note = Bacteriophage uvig_205537 from the Index of /pub/databases/metagenomics/genome_sets/gut_phage_database (ebi.ac.uk)
aagaaaaaacgcaaggtggagggagctgataagcgcaccgccgatggttccgagttcgaaagccccaagaagaagaggaaagtctagttctgcagagggtgatgccattcgacgaacttgtttattgcagcttataatggttacaaataaagcaatagcatcacaaatttcacaaataaagcatttttttcactgcattctagttgtggtttgtccaaactcatcaatgtatcttagtaccgcattcatttcagtgagagcttactcatcagagttcggataaagttttaatcaataatatagaaaaatatgaattatcattttttaagatagcaatgcaattaagagcaattaattatttggaagaaaagaatgcattaaatgaaaaaatttgcaaatgtgcaaaagcaaaaattaaagaaaatttacagctttgtactattacaccaaaacctttagaattttacaaagaaaggttaggtggtaaatgtggagataattaaaataccgaaaaaagaaggaataattgatagaacaacaggaaaagtgttaaatagaaaattgagagtagcagcatagacgtccgtatcagactaacgcttatccatataaagtacttcgaaatggcttgagaattagagtagaatgtgatataacataaataataattttttgaggaggtactatatgagcaaagaaacagagaaaatattctcacaaatgaacaaatatatggaacaatttaactttgatagtgaagaacaaatggaaaaagaaatgaaaaattttatacaaaaactaaacaataacgaaattgaatttgatgatccaaaatttaagtcggatgatttattggaaggggcatataatacatcttcaaaaacaaaagcaataaaactagcaaaacaggaatcgtcgactgcacgatcaaacatcgatcgaagctagtgatcactgatgaaggaa

SEQ ID NO: 1556 - DNA, 966 bp, unidentified
  source 1..966: mol_type = unassigned DNA; note = Bacteriophage uvig_281475 from the Index of /pub/databases/metagenomics/genome_sets/gut_phage_database (ebi.ac.uk)
aagaaaaaacgcaaggtggagggagctgataagcgcaccgccgatggttccgagttcgaaagccccaagaagaagaggaaagtctagttctgcagagggtgatgccattcgacgaacttgtttattgcagcttataatggttacaaataaagcaatagcatcacaaatttcacaaataaagcatttttttcactgcattctagttgtggtttgtccaaactcatcaatgtatcttagtaccgcattcatttcagtgagagcttactcatcagagttcgccaatataggcgttgattgcaaaaagaccagatacggaattgactatattatcaatgtaagtaattcaagcattctttaccaaattcagaaagcacgataaaatacactttataggtaaacaaaaagccccgacgcctaagcatcggggcaagagacacatcaaggagtgtcatcaaaaaaccattaatattatatcacactcctatatttgtgtcaaatttttctatacacaaaaaggagtgattttttatgaacgcagtaatatacgcgagatattcatcggataatcaatcagaggagacgtccgtatcagactaacgcttatccatcgacgacttatggaaaagtcgccgctgctgttggaggcgccacccagatttgaactggggaataaagcttttgcagagctctgccttaccacttggctatggcgccgattttctgtttaattataattatgataaaagacgcaaaaatatgcgtcttttatcacttggagcggaagacgagattcgaactcgcgacgttcaccttggcaaggtgacgctcgcacaaggcggcttgcgttatactgcgaattgttctgaaccccggcaagctcttccgccatctggttataagtcttatggggaatcgtcgactgcacgatcaaacatcgatcgaagctcaatgttcttgagtgaggaa

SEQ ID NO: 1557 - DNA, 966 bp, unidentified
  source 1..966: mol_type = unassigned DNA; note = Bacteriophage uvig_22285 from the Index of /pub/databases/metagenomics/genome_sets/gut_phage_database (ebi.ac.uk)
aagaaaaaacgcaaggtggagggagctgataagcgcaccgccgatggttccgagttcgaaagccccaagaagaagaggaaagtctagttctgcagagggtgatgccattcgacgaacttgtttattgcagcttataatggttacaaataaagcaatagcatcacaaatttcacaaataaagcatttttttcactgcattctagttgtggtttgtccaaactcatcaatgtatcttagtaccgcattcatttcagtgagagcttactcatcagagttcgaaatcatatatgttaagccggaaaaccggcttgatattattttttatacttaaatcatctctttttgccgtcaagagggccggacggcgaattgggtgcgtcactgcgctacctttcccagcgctattctatgccgctgcccgaattaaaaggcctgctgacggatataggtgcagagcacacagaagcgcgcattttgctttcataagcgtttatttcctttacgccggcaagtatctgcacctgccatctgtcggggataaattttaaatgtatatccatttttcttcccttataaacgacgtccgtatcagactaacgcttatccatacatattgatggtttgaaatctcagtgtcaaaaaccaccgtataatacaagagatcaattacatatatctcatatttcaacagatgaaaacaaataaaaaatccctcaacctcgccaaaggttaagggaaaagcagagtgtaaaaagatacacatctacctcgcaaactgattgtatcacactctgcttgaaattgcaagcagggtatttttatgcccttttttaagtaaaaattaaagggagtggtactatgggtctgaagatcggcgctgcctacattagggtatctgatgagcggcaggaatcgtcgactgcacgatcaaacatcgatcgaagctgacgcgatataacgacggaa

SEQ ID NO: 1558 - DNA, 966 bp, unidentified
  source 1..966: mol_type = unassigned DNA; note = Bacteriophage uvig_274113 from the Index of /pub/databases/metagenomics/genome_sets/gut_phage_database (ebi.ac.uk)
aagaaaaaacgcaaggtggagggagctgataagcgcaccgccgatggttccgagttcgaaagccccaagaagaagaggaaagtctagttctgcagagggtgatgccattcgacgaacttgtttattgcagcttataatggttacaaataaagcaatagcatcacaaatttcacaaataaagcatttttttcactgcattctagttgtggtttgtccaaactcatcaatgtatcttagtaccgcattcatttcagtgagagcttactcatcagagttcgccgtgtgcatgttcggcaagcccgcggcggttggcgtgggtacataccggagggctatactttagtaggacgataaataatgcgtttctaaattgaaaataggctatcaaaatcggtcttggaacttcaaaaaaatattttgattttcttgaaaaacagttccgctttgtacccctattttctcctattagcagagggagtaatccctgtaatgctaaatcggattacataaggaaaggaggataagagaatgtcaaggagttcaaagattacagcactctatgagcgtttgtcgagagagacgtccgtatcagactaacgcttatccataagaactggtatccagtacgaactcatcggagattattactatccctgcttgacgatagaaaacgaagaaccgcccactctcacaaaatacggaagaatgagggaaaaatatttaagagaacacaggaaagtcttatattgcaatctgcttacaagtggaaagttatatgaacaccttgttgaaattgatacttcggcgtgtaatatggcggagcatctgataaaggaaatggcaagaaaacagggtgtgacggaacaactgaaagcggaggatatgatgagatgggttggattgatgaaggaatcgtcgactgcacgatcaaacatcgatcgaagctgaactgcacctgcatcggaa

SEQ ID NO: 1559 - DNA, 966 bp, unidentified
  source 1..966: mol_type = unassigned DNA; note = Bacteriophage uvig_176095 from the Index of /pub/databases/metagenomics/genome_sets/gut_phage_database (ebi.ac.uk)
aagaaaaaacgcaaggtggagggagctgataagcgcaccgccgatggttccgagttcgaaagccccaagaagaagaggaaagtctagttctgcagagggtgatgccattcgacgaacttgtttattgcagcttataatggttacaaataaagcaatagcatcacaaatttcacaaataaagcatttttttcactgcattctagttgtggtttgtccaaactcatcaatgtatcttagtaccgcattcatttcagtgagagcttactcatcagagttcgatattatgaaaaagtatgggtatattaagaagatagatggagatagtaattaaacaaacaatccccagcccaccaattaaggcaagctggggtttataattaaaatttaggcagaaatcttagaccacctaccatttaccaaggcaaatctttgagccttatttgaagggatcataataaccttcttatagtagttaccgttatcggctgctgtagtagtcggacagtacttataatctatagtaccaaagttcctaatactgcttacagagtaccaataagcattaactttagttccatgacgtccgtatcagactaacgcttatccatgataaactataatgccctatgactaaaacaagaattaagacagaattagcagccgcaatagtactagtattagtaggatgcttcttattgccggtcgatcacctcgtttatcttcttctcgacctcagccatggcctctgggctaggctcctccgccaatagataatcgcatttagacttcttataattaaatactattgtaaatttcaataagagttgtatatttgtactacacttaaagcaacaagatatgaagaaagctgcaatatatttaagggtttcaacttctgatcagaattaggaatcgtcgactgcacgatcaaacatcgatcgaagctgtcctatctgccgaatggaa

SEQ ID NO: 1560 - DNA, 966 bp, unidentified
  source 1..966: mol_type = unassigned DNA; note = Bacteriophage ivig_2328 from the Index of /pub/databases/metagenomics/genome_sets/gut_phage_database (ebi.ac.uk)
aagaaaaaacgcaaggtggagggagctgataagcgcaccgccgatggttccgagttcgaaagccccaagaagaagaggaaagtctagttctgcagagggtgatgccattcgacgaacttgtttattgcagcttataatggttacaaataaagcaatagcatcacaaatttcacaaataaagcatttttttcactgcattctagttgtggtttgtccaaactcatcaatgtatcttagtaccgcattcatttcagtgagagcttactcatcagagttcgaaacgatgattgcggaagaattccgtcagtcgttatctacagacgaaatatatacatcttcttattcattcgacgattatgacagtgatgaagatgaataaataacaaaaaaccgccccggcgccaaccaggacggccctgcgaatataccaggttatggtaaaacgccttgacaagctcaattttatcatttccccgggatatttgcaaatattacggggcttttttcgcccttttaggaggaaattgtatgaaaagaataggtatttatggtagaaagtctgttttttcagataaatcgacgtccgtatcagactaacgcttatccataaactctgacagaatgtgtttatgatggtgaagtactccatataaaattataatatggttttttatttttaccttacctctcttttttatcctgataccttccgcatccatcccttgcgacactttaattataaaatactcttttggaaaaatcaatatccttctttactatttttaccctcaccgaaacatttgtaaaatgcatcggtgagaacggccaattcctccggtgtcagtttttcctttattggatcaggaatacgattataattcacagcaaatgtatccgtaaattttccaggaatcgtcgactgcacgatcaaacatcgatcgaagctggatagatggcgcactggaa

SEQ ID NO: 1561 - DNA, 966 bp, unidentified
  source 1..966: mol_type = unassigned DNA; note = Bacteriophage uvig_594158 from the Index of /pub/databases/metagenomics/genome_sets/gut_phage_database (ebi.ac.uk)
aagaaaaaacgcaaggtggagggagctgataagcgcaccgccgatggttccgagttcgaaagccccaagaagaagaggaaagtctagttctgcagagggtgatgccattcgacgaacttgtttattgcagcttataatggttacaaataaagcaatagcatcacaaatttcacaaataaagcatttttttcactgcattctagttgtggtttgtccaaactcatcaatgtatcttagtaccgcattcatttcagtgagagcttactcatcagagttcgacgatttagtgatcgccgctattttcatataggaggacgcatggagaaatcagtaattataatatccatgcctaaaaacagtacaaaacaggacattctagacatgcgaaacaaatataaagataaatataaagttcatataataatctcagggcaagaaaatccgcaaaagaacattcaaaattttttaataagcaggcttgcaaaatagcctgtttttgtattacaatgatattaatgaaatataacaatgataaaagaggtgatatatttggggataaacgtgggctatgccagattgacgtccgtatcagactaacgcttatccatttatagatgacgccccaagggtgcataataacaatgttaatattgctcttattattaaaatacaaaaatggatatctagtatttattataaaaagaaaatattattttaaggaggaatatacatatggcagaaagatcaagaaggaacaaaactacttacgaaaggataaaggacgcacaaaagaaaattattagtacagaagaaaggcttactcaattaaaacaagaattggacagtttatacacaatattatttgaagaaactgccagacaacaaaatacagagatgaaaaaactattggaatcgtcgactgcacgatcaaacatcgatcgaagctgaagatgtgaggtgcacgaa

SEQ ID NO: 1562 - DNA, 966 bp, unidentified
  source 1..966: mol_type = unassigned DNA; note = Bacteriophage uvig_181433 from the Index of /pub/databases/metagenomics/genome_sets/gut_phage_database (ebi.ac.uk)
aagaaaaaacgcaaggtggagggagctgataagcgcaccgccgatggttccgagttcgaaagccccaagaagaagaggaaagtctagttctgcagagggtgatgccattcgacgaacttgtttattgcagcttataatggttacaaataaagcaatagcatcacaaatttcacaaataaagcatttttttcactgcattctagttgtggtttgtccaaactcatcaatgtatcttagtaccgcattcatttcagtgagagcttactcatcagagttcgtctatcatgggcagatgcctttgattccgcaagcaccgatgtgaagcgctcgatcatttcagcgctgattgaccgaataacggtctatgacgattgttcactggacatccacttcaggatttccgcggaacagttccttggaaaagccgcgtaacgcaaatgtcgacaactcccattggaaagaatgatataatcaatcaagccaatcatccgggtgaggtggttggctcttttaatgggaggattgaatatgaaacgagtctattgtctttaccgcgtttctacagttggacaggtggagacgtccgtatcagactaacgcttatccatttgaaattgtgtttcgcagcgttataaaggaactatgccaaatgaaagtgtaaaagaaaagcgctcatgccgaagtcatccttccaggcatgagcgcttttcttgcggttgtaaagttttttgctttcgaccttcttgggcgtgggggagaaggcccagacggtgcgcttctggctgtccagctcttttcgggctttcttgctgagcttttcgcgggagatgaattttgccatgaggttcacatcctttcaagcatggcggtagggtaagaaaaaaacctgacaagcaaacttgccaggcggaatcgtcgactgcacgatcaaacatcgatcgaagctctgtgaatcactaaggcgaa

SEQ ID NO: 1563 - DNA, 966 bp, unidentified
  source 1..966: mol_type = unassigned DNA; note = Bacteriophage uvig_154782 from the Index of /pub/databases/metagenomics/genome_sets/gut_phage_database (ebi.ac.uk)
aagaaaaaacgcaaggtggagggagctgataagcgcaccgccgatggttccgagttcgaaagccccaagaagaagaggaaagtctagttctgcagagggtgatgccattcgacgaacttgtttattgcagcttataatggttacaaataaagcaatagcatcacaaatttcacaaataaagcatttttttcactgcattctagttgtggtttgtccaaactcatcaatgtatcttagtaccgcattcatttcagtgagagcttactcatcagagttcgattagagctggattctgctgctggttttgtaaatatggtcacagtagatgttgccgaatatgcaaaaacccattttgaaaaatccgtaaaaaagactttgacaattcccgcatggcttaatcaagccgcgttggagcacaatattaatttttcacaggttttacaagatgcgttgaaagcacaattacatttaaactaactctcccctactctctcctatccttttatgtctcaagaaagaaggtgtaacatgaaaggggtaatctatgcccggtacagttccgacaagcaaacagagcagacgtccgtatcagactaacgcttatccattattcgtggtaaaaaatattttcggaattgtaaagcgctttatcgaaagataaggcgcttttcttttattcttcttgctttctttaccataatttacagctagaattcagcgctttgaatctgtacaatgtctttaaaatattgtagaaaggagttcctctgtatggatttaaagcgtgagttaaaacgcttcacaaaacctatcaagaaggatatgaaattttctaagaaacataaaagacttttttatggtaacttagaagtatctgcccgtagttatttacaagggcaccccaatgcggaatcgtcgactgcacgatcaaacatcgatcgaagctgccattagttatggcgcgaa

SEQ ID NO: 1564 - DNA, 966 bp, unidentified
  source 1..966: mol_type = unassigned DNA; note = Bacteriophage uvig_569447 from the Index of /pub/databases/metagenomics/genome_sets/gut_phage_database (ebi.ac.uk)
aagaaaaaacgcaaggtggagggagctgataagcgcaccgccgatggttccgagttcgaaagccccaagaagaagaggaaagtctagttctgcagagggtgatgccattcgacgaacttgtttattgcagcttataatggttacaaataaagcaatagcatcacaaatttcacaaataaagcatttttttcactgcattctagttgtggtttgtccaaactcatcaatgtatcttagtaccgcattcatttcagtgagagcttactcatcagagttcgagaaaatccagattttctaccgctttatcggcccattggatgccatcgagtaacaaagtcagaaaagtcacctccgagaactatcctacagatgctgccgccatagcggacgaagtgcagctgaacggtcaccatctggcctacgagttgtgcatcccgaagggggatgcgcacagctgggacgacgttacggtggagttcttcggccagaaatggcacacctatggcggtgtacagcagtacatcgaagaacttgtgccgctggactggaacaaaaaggtgaaggtggagcgctatggggacgtccgtatcagactaacgcttatccatgcccaccacacgcaaacgtgcgccgagaagtccgaagtccgtgcgcctgatcgtggaacgccattatatcggcaatgtgccgatgaatacgctttttcagcggcttgtggaagaagaaattcgtaaaactgccgaatcgtatctcgccgctggctaattggacgttttactgcggaaaagggcttgcatcgtcacgcagcatccgctacaatgtgattgatgaggtctcttttccattatggaggtacacatggaaaaggacaaaaaagtaactgctttatactgccgactgtcaaaagaggaatcgtcgactgcacgatcaaacatcgatcgaagctgaagcgtctcgatccgcgaa

SEQ ID NO: 1565 - DNA, 966 bp, unidentified
  source 1..966: mol_type = unassigned DNA; note = Bacteriophage uvig_187460 from the Index of /pub/databases/metagenomics/genome_sets/gut_phage_database (ebi.ac.uk)
aagaaaaaacgcaaggtggagggagctgataagcgcaccgccgatggttccgagttcgaaagccccaagaagaagaggaaagtctagttctgcagagggtgatgccattcgacgaacttgtttattgcagcttataatggttacaaataaagcaatagcatcacaaatttcacaaataaagcatttttttcactgcattctagttgtggtttgtccaaactcatcaatgtatcttagtaccgcattcatttcagtgagagcttactcatcagagttcgggaatcaaaaagtgataaatatcattggctggattattttgccgagcatcagaatatacaggaacttacaagaactgttgctgttgaactgattgaccagatattagtatatgacaaaaaacatattgaagtcagatttaattttgatgactgttatcaatccctgttacggcagatacagtcggtgggatgcgatgtcagcacaggtatggacggaagaatagaaattcaaaagagggaggtcgtataaatggctcgaaaatcaagaaaagtagattatgtgaatgttggaaataaagagacgtccgtatcagactaacgcttatccattggaagaattaagaaaatatgcaaaagaacgggaggctgagttatgccagtaacagaatgtatcgctgtttatatcagactttcgtcggaggataatgatgtagatggcagtataaaagccgaaagcaacagtgtcagtgcacagagaatgctgataaacgaatttatcaaaaaacaggacgaatttactaactgtccagtagttgaatatgtagacgatgggtacagtggtacaaactttaaccgtcctggctttcagaggatggtggaagatgcaaaagcaggacgtataaaaagtatggaatcgtcgactgcacgatcaaacatcgatcgaagctgacgacctcgatgtcgcgaa

SEQ ID NO: 1566 - DNA, 966 bp, unidentified
  source 1..966: mol_type = unassigned DNA; note = Bacteriophage uvig_166991 from the Index of /pub/databases/metagenomics/genome_sets/gut_phage_database (ebi.ac.uk)
aagaaaaaacgcaaggtggagggagctgataagcgcaccgccgatggttccgagttcgaaagccccaagaagaagaggaaagtctagttctgcagagggtgatgccattcgacgaacttgtttattgcagcttataatggttacaaataaagcaatagcatcacaaatttcacaaataaagcatttttttcactgcattctagttgtggtttgtccaaactcatcaatgtatcttagtaccgcattcatttcagtgagagcttactcatcagagttcgatttcacgcttgatatctaccctaaaatcccgcgtaaattgcctatgtcttgaatggggctacacctatgggccgcccatggccgttgcccccattccatctgtgagacgtgttcttgaatatgcagttacagaaatccccccggaaaagatatccatgggcataccaaactacggatatgactggcctcttccttttgtccggggcgaaacagccgccagaagtataggtaaccaggaggctgtggccatcgctgctgccaacaatgccgtcatacagtacgatgagacatcgcaggcagacgtccgtatcagactaacgcttatccatagatatgatgctaccattgtttatttacataattttacggagctctttttaaaagggctttatggtcttagttgattatattataaaaaccgccccaggcggcaacccggaacggttttaagtggattctgtataggcctaagccaatacaatataccctaagcaagtatattgtatcacaaacttttggcacctgtacaggtgtattttttatacctatttttacatatagtagaaaaggagtggtacaatggaatattatatttatctcagaaaaagtcgtaaagacagggaagctgaggaatcgtcgactgcacgatcaaacatcgatcgaagctgtgagagcatagcgtccgaa

SEQ ID NO: 1567 - DNA, 966 bp, unidentified
  source 1..966: mol_type = unassigned DNA; note = Bacteriophage uvig_169676 from the Index of /pub/databases/metagenomics/genome_sets/gut_phage_database (ebi.ac.uk)
aagaaaaaacgcaaggtggagggagctgataagcgcaccgccgatggttccgagttcgaaagccccaagaagaagaggaaagtctagttctgcagagggtgatgccattcgacgaacttgtttattgcagcttataatggttacaaataaagcaatagcatcacaaatttcacaaataaagcatttttttcactgcattctagttgtggtttgtccaaactcatcaatgtatcttagtaccgcattcatttcagtgagagcttactcatcagagttcgcgtcgccaattctgctcccgtgactgctatttgaaattccgcaggaaggaggccaaccatgagtgattatgataagcagctgtttgcctatcagacagcgatggctctcgcccggagtatgcgttccaaggggctgatttcagccaaagagtacgctaagatcgatacaattattgccgaaaaatacggcatatcttcgtgtagtatattccgctgaaatcgctggatatagcccactttcagaggtaatatgtcacacaccaagggggtgaactatatggagagagttgtaaaaagggtgacgtccgtatcagactaacgcttatccattgaaagaacaggcgcgccaacgggcactgcaggcaaggaggagcaaaaaatgagcagaacagcagcacggtcggtcaccgtcattccaccgaccatcaatccgctgacacacctttctggggtggcaaaacagaaacggcgggtcgccggatacgccagagtgtccacggacagcgatgagcagtttaccagctatgaggcacaggtggactattatacccagtacattcagcgcaaccccgaatgggagttcataaaggtctataccgacgagggcatctccggcacgaacacgaaacaggaatcgtcgactgcacgatcaaacatcgatcgaagctgcatcggacgttcaatcgaa

SEQ ID NO: 1568 - DNA, 966 bp, unidentified
  source 1..966: mol_type = unassigned DNA; note = Bacteriophage uvig_284816 from the Index of /pub/databases/metagenomics/genome_sets/gut_phage_database (ebi.ac.uk)
aagaaaaaacgcaaggtggagggagctgataagcgcaccgccgatggttccgagttcgaaagccccaagaagaagaggaaagtctagttctgcagagggtgatgccattcgacgaacttgtttattgcagcttataatggttacaaataaagcaatagcatcacaaatttcacaaataaagcatttttttcactgcattctagttgtggtttgtccaaactcatcaatgtatcttagtaccgcattcatttcagtgagagcttactcatcagagttcggttactaagaacaataataaaatccttggtataaaaataatctatgacgaggatgaagaagagtttgaagatgactgggaagatgaagaagaatactaaaaataaaaataagttatttgaagagggattttccctcttcttttaatactggaggtaaatatggatactattattagaaatgaaaatataacacctgaagagaaaaatactatcttaagactattattacaagcagctaaagaagaattaaatgtcgaatagttcttcttttcctgctaaaatttcagctatttattgcaggacgtccgtatcagactaacgcttatccatatgaaatcgaaatggtaaatgattatagattctacatccatttaaaattttaggagcggctatgttaataataaaagagaaaattttggaaaaatattcaattttggaattaaaaaagatctttggaagttggttcttatattttaaaagaagtgattttaaaggcgagctgtataatataacctcttatttaactataaataatttggattattctcttgaagaatttaagaaagattatcccaaattatcaaataataaagagatagcaactgtttttaaattatataaaagcgggttggaatcgtcgactgcacgatcaaacatcgatcgaagctttggcggcttgtgtgtcgaa

SEQ ID NO: 1569 - DNA, 966 bp, unidentified
  source 1..966: mol_type = unassigned DNA; note = Bacteriophage uvig_366143 from the Index of /pub/databases/metagenomics/genome_sets/gut_phage_database (ebi.ac.uk)
aagaaaaaacgcaaggtggagggagctgataagcgcaccgccgatggttccgagttcgaaagccccaagaagaagaggaaagtctagttctgcagagggtgatgccattcgacgaacttgtttattgcagcttataatggttacaaataaagcaatagcatcacaaatttcacaaataaagcatttttttcactgcattctagttgtggtttgtccaaactcatcaatgtatcttagtaccgcattcatttcagtgagagcttactcatcagagttcgctctcggcaaaattttagtaggtgatactatttctttcactttcagaggatgatacatacttatgtgtcgtgacagaacggtcacgacacataagtatattgcaacgaaaaagccgccaacgtacggcgacttcttcggaaagtgtgtgtgtatattcgtgcgaaagataggatttttgcactattattatacctctgatgtttttatgcgtcaagaaaatacttcgctactttgtatttctttccatcaacgtcattgatgaagttgtccgccatgctgtaatagaattctgcgtcctcgacgtccgtatcagactaacgcttatccatttatttggctgatattgcttgcttggtattgcttctatgattataggaaatccaagagtgccgaaactatgacttttgatgaatttatagagcaatacgaaaaaaacaataatgatctataaaaatgaaaaaccgcccctgttgccgcaggagcgattttcgacgtgctacatgtgtttacatagatatacgttacaaacatattgtagcacgtccttatttttttttcaactttattttgggggaaattatgagagttgcactatatgaaagagtaagttccgaagaacaagcacttcaggaatcgtcgactgcacgatcaaacatcgatcgaagctgaatagacatccttctcgaa

SEQ ID NO: 1570 - DNA, 966 bp, unidentified
  source 1..966: mol_type = unassigned DNA; note = Bacteriophage uvig_121245 from the Index of /pub/databases/metagenomics/genome_sets/gut_phage_database (ebi.ac.uk)
aagaaaaaacgcaaggtggagggagctgataagcgcaccgccgatggttccgagttcgaaagccccaagaagaagaggaaagtctagttctgcagagggtgatgccattcgacgaacttgtttattgcagcttataatggttacaaataaagcaatagcatcacaaatttcacaaataaagcatttttttcactgcattctagttgtggtttgtccaaactcatcaatgtatcttagtaccgcattcatttcagtgagagcttactcatcagagttcgttgactttgagcagttcagcgctgggctggacatttcggcaatcgccgcataagaaaagcccgcttcaaaagagaagtgggcataaaacaaaaaacttgcttttttcaaagcaagcatttattaagaatactcagcgcacccgattggtggagataagcgggatcgaaccgctgacctcttgactgccagtcaagcgctctcccagctgagctaaacccccatcggttcaaggctttcgcgctcggaacaatggaaagtatagcatagggagggacggctgtcaagaccttttttcaactgacgtccgtatcagactaacgcttatccatgctacgccatcaccgccagcttcgcagactgcaaaaatgcggcagcgctccatcatgtaaagcagattttactatcttcctttgccaacaatacggcaaaaaatagctccggcgacatccttgcaatccctcccgaacagagggataataatagtgggggtagtccctatgtaccttgaaaacttcatattccccgcgtattgattgcgttttttcattgacccatcgacaaatgaaaggacggatcaatatgatgatggaaaacagaatgatgacaggtaatcgagtcgattgcctataggaatcgtcgactgcacgatcaaacatcgatcgaagctcgatacacgtggtcaatgaa

SEQ ID NO: 1571 - DNA, 966 bp, unidentified
  source 1..966: mol_type = unassigned DNA; note = Bacteriophage uvig_190766 from the Index of /pub/databases/metagenomics/genome_sets/gut_phage_database (ebi.ac.uk)
aagaaaaaacgcaaggtggagggagctgataagcgcaccgccgatggttccgagttcgaaagccccaagaagaagaggaaagtctagttctgcagagggtgatgccattcgacgaacttgtttattgcagcttataatggttacaaataaagcaatagcatcacaaatttcacaaataaagcatttttttcactgcattctagttgtggtttgtccaaactcatcaatgtatcttagtaccgcattcatttcagtgagagcttactcatcagagttcgattgataatgggaaagatatctctatgcgtacagaaaagatagataccatactcgagtataataagaagaaaatacatatgacattggaatttccttatacagtagatcctaaggatgccgaacgctttgagaaaactttgagacaggtatatctcaataggattcaaaaagggtctggacaaatggcatataatgcggtatcctcccactccttaaaagaaaagtcaggtgtaaaaggaggatacgataatgagtaaaagagtaaggacattattacgtgtgtcatctaggcaacagttgacgtccgtatcagactaacgcttatccatacgaaaaattacttgaaaacaatggctccgatttatcgcggaaagggctataattttaatattacttcgtccacggcatatgaccacaaattcatctatggcagaaatatatatgacaatatctcgctgatagtaaatgaaatgtttgaaaactatctgtcgagacctaatgtgaagcagccgattctgacgcagtactgtgacggacagaaggtctcctgtccgagctggatgaccagattgcgtttgcgtataaactctctcaaaccccagtatttacaaggggtttgaggtataaaaggaatcgtcgactgcacgatcaaacatcgatcgaagctgtggatccgacttgtatgaa

SEQ ID NO: 1572 - DNA, 966 bp, unidentified
  source 1..966: mol_type = unassigned DNA; note = Bacteriophage uvig_152630 from the Index of /pub/databases/metagenomics/genome_sets/gut_phage_database (ebi.ac.uk)
aagaaaaaacgcaaggtggagggagctgataagcgcaccgccgatggttccgagttcgaaagccccaagaagaagaggaaagtctagttctgcagagggtgatgccattcgacgaacttgtttattgcagcttataatggttacaaataaagcaatagcatcacaaatttcacaaataaagcatttttttcactgcattctagttgtggtttgtccaaactcatcaatgtatcttagtaccgcattcatttcagtgagagcttactcatcagagttcggaacaagaaatgatgattccccttttactatcaaaatcattcttaatctttaattccatcatcaatgtgctaattcttcagtacctacattgtgctcagaaatgttccaaattaagccttatgcggacaagcccagtgctttcggattatttgtacatagctttgtaagctatgaaaggattggcaagtgggatgaggacagatacaggaaaggtggcagaaagccttattttatcgaactttgcggcactccaagatggataaatctctatgcggtagctgatgcagatgtctattatagacgtccgtatcagactaacgcttatccatcaacacggcctttcgtattttttgtcgaatccgattacagttattattatactcggcattttttcaattgcaatagttttggcacggaactaaaaaaatgcgtctcggtaaattttgggcacgaaaaaatacagttttatttgtacaagataaacaataaaatttacattaatgcccaataaaaataacgccctgcaaatatacagagcgttataaaaaacacaatcaataataaaataaggaggaatttatgcaaaaatatctaatgtacctaagaaaatcaagagccgacggagaacaggaatcgtcgactgcacgatcaaacatcgatcgaagctgtattgaagctaggactgaa

SEQ ID NO: 1573 - DNA, 966 bp, unidentified
  source 1..966: mol_type = unassigned DNA; note = Bacteriophage uvig_500555 from the Index of /pub/databases/metagenomics/genome_sets/gut_phage_database (ebi.ac.uk)
aagaaaaaacgcaaggtggagggagctgataagcgcaccgccgatggttccgagttcgaaagccccaagaagaagaggaaagtctagttctgcagagggtgatgccattcgacgaacttgtttattgcagcttataatggttacaaataaagcaatagcatcacaaatttcacaaataaagcatttttttcactgcattctagttgtggtttgtccaaactcatcaatgtatcttagtaccgcattcatttcagtgagagcttactcatcagagttcgaccttgtgggctttatcccgctgaatgaactgatgaaggaggaaacggcatgaccgaagccatgccgttcctgcaaaaatacgatattactttcttacgacccccgaccatttacggcgggggattttttaggtatacttaccctttgtgtccgccaaggtaaaatatgcctaacgcggcgttacgaaaaacgcgccatcgttgtctgcatcaatccgcttgatgaagcgcgtccagaattcctttttttcttcccgagagtatgtgccatattcgcccagcccgtttctcaaggcgtcggacgtccgtatcagactaacgcttatccataccccgacccctatcttaaacccacaccgctgccgcctgaccatcccagacacaatttctggtttgacgaggatggacacatccgtgtgaaaaatccatccgctttctggctgccggagttcaccttgcagaaagagatcggcggcacgatctactctgtcacaggcacttatgacggaacggaaacgctggataagaaaatggagcgtattatggctgaaaagtttacagaaaagttggaggatagcgaatgacaaattcacagaatcttggtacaatagaagcaaccaatcctgtactggaatcgtcgactgcacgatcaaacatcgatcgaagctagcgtctgtctacgcgacaa

SEQ ID NO: 1574 - DNA, 966 bp, unidentified
  source 1..966: mol_type = unassigned DNA; note = Bacteriophage uvig_356689 from the Index of /pub/databases/metagenomics/genome_sets/gut_phage_database (ebi.ac.uk)
aagaaaaaacgcaaggtggagggagctgataagcgcaccgccgatggttccgagttcgaaagccccaagaagaagaggaaagtctagttctgcagagggtgatgccattcgacgaacttgtttattgcagcttataatggttacaaataaagcaatagcatcacaaatttcacaaataaagcatttttttcactgcattctagttgtggtttgtccaaactcatcaatgtatcttagtaccgcattcatttcagtgagagcttactcatcagagttcgagaaatatcaaaaagaattatcagaactgaaccatgaagagcaaaggcagcgggcggcggtcaatgaaacaaagatatggttggagcactttaatcgcagaagaataacggtaaagcagcttaccagagaagcgcttgtggagttagttgataaaatttatgtatatccagagcagaaaatagatatatattttaagtttgcttcagtagagagttcaccagatagaatacttgagaaagatggggtgatatgatgtatcagatgggtgtatattgtcgtctgtcgaaggatgatggagagacgtccgtatcagactaacgcttatccatatattgtatttaagtatcagtcgccttatccggtagaaaaacaggcagtgtaaagactgcaaatttttttacagtaattttcccctagttataatgaacacatgaaggaacttctctgttggaacgatatctggatgatatgtcgaattactggaaaagtgtgatctgtgttgggagcggaaacgagggaacatccgcagggcatacttccggcatgttaaaagagcgggaagagcaaagagtagagttgggagtgcagcagagagaacctgctctgaatgtacagctctggaaatcttaggaatcgtcgactgcacgatcaaacatcgatcgaagctccaaggttcatattcgacaa

SEQ ID NO: 1575 - DNA, 966 bp, unidentified
  source 1..966: mol_type = unassigned DNA; note = Bacteriophage uvig_527188 from the Index of /pub/databases/metagenomics/genome_sets/gut_phage_database (ebi.ac.uk)
aagaaaaaacgcaaggtggagggagctgataagcgcaccgccgatggttccgagttcgaaagccccaagaagaagaggaaagtctagttctgcagagggtgatgccattcgacgaacttgtttattgcagcttataatggttacaaataaagcaatagcatcacaaatttcacaaataaagcatttttttcactgcattctagttgtggtttgtccaaactcatcaatgtatcttagtaccgcattcatttcagtgagagcttactcatcagagttcgagacattgctcctagtcaactagcgagccgaactcattaagccctatctgtcgatagggctttttgttttatctaaatgaattttattacctaaaataaaaaactcccggggctaaccgggagcaactgcgaaataccgaattaacgataccacgccctgaacaagcatattgtatcatctagcccggtattttgcaagtccgggctatttttatgcccattttcatataatttgaaagggtgatacataatgacactgaaaaacgcatgtgcatatatcagagtctcaactgataagcagacgtccgtatcagactaacgcttatccatacgaaaaagatactcttgatatatactttagattaatagaaaaaagcccgtaaatacaggctttttaatgattataccttacggaagtacggtggtccggatggtgaggcaagtgcaagtatgcgatatatgtcacagcgttattcaataggtgacaggcaggttgcaggagtccttaccgatatcgctacagaagaattggcacattgatgttggatattgtagcaaaatgctttcattatgttatttttttaaatgacaagtttccgttttctcttggcaggaaagcgaactgtccgaggaatcgtcgactgcacgatcaaacatcgatcgaagcttctctgtccatagctgacaa

SEQ ID NO: 1576 - DNA, 966 bp, unidentified
  source 1..966: mol_type = unassigned DNA; note = Bacteriophage uvig_415064 from the Index of /pub/databases/metagenomics/genome_sets/gut_phage_database (ebi.ac.uk)
aagaaaaaacgcaaggtggagggagctgataagcgcaccgccgatggttccgagttcgaaagccccaagaagaagaggaaagtctagttctgcagagggtgatgccattcgacgaacttgtttattgcagcttataatggttacaaataaagcaatagcatcacaaatttcacaaataaagcatttttttcactgcattctagttgtggtttgtccaaactcatcaatgtatcttagtaccgcattcatttcagtgagagcttactcatcagagttcgtaacctgacatcacaggcaatgaatggtggtcagcttattctacctatgataaacttttttgaaatgaaaacagtcaaagacaaaaaagagagtgaaaaaagcgaataaaaaaccgcccgcttctgttggcgcagaaacgagcggcaaaaatagaacagcttacccaaagtggataatgcgtccaaacaatgaaattataccactttcggggtaaacttggcaagtcttactttggaggtggtttttattatgaaagcggcggcttatgcgcgctactcaacggacaagcaaacggaaaagacgtccgtatcagactaacgcttatccatatccatcatattcaatatgtacctttttctttcctgcgaaaagtaaaacataaaataaaaatcccttcccaccgaaaacggaaaggagggcggagttatataataatttatagttggcgttcgctatttggggcaagtatcgtggaaagctatataggtgaccggtatttaattcctctcatcttctgttcgccgtttagggtatcgcatttcgttacgacccttgccgatggggtaagtttgacttacgtcataggtgcatttctgttctccattcagggcgagcgttggcggcggaaaggaatcgtcgactgcacgatcaaacatcgatcgaagctcttccaactctcagacacaa

SEQ ID NO: 1577 - DNA, 966 bp, unidentified
  source 1..966: mol_type = unassigned DNA; note = Bacteriophage uvig_593675 from the Index of /pub/databases/metagenomics/genome_sets/gut_phage_database (ebi.ac.uk)
aagaaaaaacgcaaggtggagggagctgataagcgcaccgccgatggttccgagttcgaaagccccaagaagaagaggaaagtctagttctgcagagggtgatgccattcgacgaacttgtttattgcagcttataatggttacaaataaagcaatagcatcacaaatttcacaaataaagcatttttttcactgcattctagttgtggtttgtccaaactcatcaatgtatcttagtaccgcattcatttcagtgagagcttactcatcagagttcgcattagtttttatcaccgcattcgggatgctcaagattcaggtgcggcgatgacaataggcccttcccattttggggagggcctattgctttactttttgtacatcccttgcaggaccccgacttcttctgcgtcgccgattgcccgcttgtggaggtattcgtagagggccttcatcccttcgggcggctcccctttttgtcgtttgtacgcctcgatgtgccgcacgacatccttgtgcaggaggttcatatgggtcatctcctcgccggacagtttgtaaaacagttcggccatctcgacgtccgtatcagactaacgcttatccatatgatgcagaaggggctccaaagcaggcggacgcttatttgcagcctcaccggtttgtgcattctgctggcggcagccctggcggcttacgtgatcctggatgcgctcaaccccgccatgggcctgatccggcagaccgggaccaatattggcgtgtatctcatggctatggccatcatcggagtctgcctgtacattggtcacagcatggtcaagcgccgaaataaaagattgagagaggagcaaaaccatgagcaaagctgacatcctcgcccgatactccacggataatcaaaatgcggaatcgtcgactgcacgatcaaacatcgatcgaagctgcctactatctaatgcacaa

SEQ ID NO: 1578 - DNA, 966 bp, unidentified
  source 1..966: mol_type = unassigned DNA; note = Bacteriophage uvig_200526 from the Index of /pub/databases/metagenomics/genome_sets/gut_phage_database (ebi.ac.uk)
aagaaaaaacgcaaggtggagggagctgataagcgcaccgccgatggttccgagttcgaaagccccaagaagaagaggaaagtctagttctgcagagggtgatgccattcgacgaacttgtttattgcagcttataatggttacaaataaagcaatagcatcacaaatttcacaaataaagcatttttttcactgcattctagttgtggtttgtccaaactcatcaatgtatcttagtaccgcattcatttcagtgagagcttactcatcagagttcgaattatatgaggctattaatagttatcttggaattgatgaatttgatgaagatttattcaataagaaaatagattatattattgcaaagcctaacaatgttttagaaattcatttatttgatggaaaaattgatgaaattaaatggactgatccaactagaaaaaatagctggactcctgaaatgaaagaaaaagcaagaattaaatcaaaagaaatagaaaaaaatctaaaaagaggagctgatggaaaatgggtaaagtcagagtaataccatcaacgattaatcctttaacgcatcagacgtccgtatcagactaacgcttatccataggacggaagtataacttttaaattcaagaatggaatggaatataaaaactaaatttaaaacaacccatccaggcttattgcttgggtgggctttttgtctttctttcaaaatgttctataggcttccatcttacaaaattctcggtaattagtcctttattaagaaaatgaaaagttaatgtattttgagtaatttctgcataatcaaccagtactggccatgatgtcttttcatattcactaattataaaattaggtttttctttaaatgcttttttaagtctattttgttttcttttggaatcgtcgactgcacgatcaaacatcgatcgaagctggcggccgatgagaatacaa

SEQ ID NO: 1579 - DNA, 966 bp, unidentified
  source 1..966: mol_type = unassigned DNA; note = Bacteriophage uvig_188594 from the Index of /pub/databases/metagenomics/genome_sets/gut_phage_database (ebi.ac.uk)
aagaaaaaacgcaaggtggagggagctgataagcgcaccgccgatggttccgagttcgaaagccccaagaagaagaggaaagtctagttctgcagagggtgatgccattcgacgaacttgtttattgcagcttataatggttacaaataaagcaatagcatcacaaatttcacaaataaagcatttttttcactgcattctagttgtggtttgtccaaactcatcaatgtatcttagtaccgcattcatttcagtgagagcttactcatcagagttcgggtattacggagggcagcgcaatgacgactgaacagcttaagcgggagatgctctttcaggccagcatggcctgcgtgggacggatgcgcagatcgggcttgctcacggatgccgaatatgaaaaatgtcgcgaaatgatgcttgagaagtacaatccgccgctcggtaaaattgtctcaaactgagcaggattctattgactttaggggcgttcagagtgattaatcgtgtctgaaaggagggagtccaatgaccaaaacaatcagaaggatagaagcacaaatccccatcacgacaaagacgtccgtatcagactaacgcttatccatagaaaatgaagcagatcaggaaggagcgcggagcacagtggcgaaaagagtaacgacgatcatgccgacattggtgcggtttacggaagcgcccattgccgagcatcgcaagcggaaggttgccgcttatgcgcgtgtctctacggacagcgacgagcagtttaccagctatgaagcgcagattgactattatacccagtacatcaaggcgcgggacgactgggaattcgttcaggtttatacggatgaaggcataaccggcaccagcaccaagcaccgcgaaggcttcaagcagatggtggaatcgtcgactgcacgatcaaacatcgatcgaagctcgtgaaccaagacagagcaa

SEQ ID NO: 1580 - DNA, 966 bp, unidentified
  source 1..966: mol_type = unassigned DNA; note = Bacteriophage uvig_323580 from the Index of /pub/databases/metagenomics/genome_sets/gut_phage_database (ebi.ac.uk)
aagaaaaaacgcaaggtggagggagctgataagcgcaccgccgatggttccgagttcgaaagccccaagaagaagaggaaagtctagttctgcagagggtgatgccattcgacgaacttgtttattgcagcttataatggttacaaataaagcaatagcatcacaaatttcacaaataaagcatttttttcactgcattctagttgtggtttgtccaaactcatcaatgtatcttagtaccgcattcatttcagtgagagcttactcatcagagttcgtcgccgaccgtttcaaaggtggtgacggcgatgagtaaggaagaattcagaaacgaaaagctctatcagaccaccatgcaccttgccaggaagatgctcgaagagggcattatttctgaggaggagtatcgtcagattgatacaattttccttgagaaatataagcctgttttcggcacattattctcggatatatcgttgacttccggggcgtaaagagtgatgtatagtgtcggaaaggagtgatttcatggcaaaaatcacaagggtcgaacaggcagtgccgaccataaaaacgaagacgtccgtatcagactaacgcttatccatacatgaagcagctacggaaggagcgtgggaaagcatggcgcaaagaaaagtaacggcgatcccggctaccatcagcaggtacacagccacgccgataaacagtacgaagaaacgccgtgttgcagggtacgcccgcgtttcgaccgaccatgaagaccagaccaccagctacgaagcgcaggtcgattactatacgaattacatcaggagcagggatgattgggagtttgtggccatatacacggacgaaggaatctcggcaacgaacaccaaaaagcgcgagggctttaaaacaatgatggaatcgtcgactgcacgatcaaacatcgatcgaagctttagacagacgcacgagcaa

SEQ ID NO: 1581 - DNA, 966 bp, unidentified
  source 1..966: mol_type = unassigned DNA; note = Bacteriophage uvig_81430 from the Index of /pub/databases/metagenomics/genome_sets/gut_phage_database (ebi.ac.uk)
aagaaaaaacgcaaggtggagggagctgataagcgcaccgccgatggttccgagttcgaaagccccaagaagaagaggaaagtctagttctgcagagggtgatgccattcgacgaacttgtttattgcagcttataatggttacaaataaagcaatagcatcacaaatttcacaaataaagcatttttttcactgcattctagttgtggtttgtccaaactcatcaatgtatcttagtaccgcattcatttcagtgagagcttactcatcagagttcgaggaagtagaatggacgaactgatagaacaaaaagctgtcagtgaagagatagaggaaactataggttgtgagcttgccggggatattcataccacaaagtatggggaatacaaggtaatcagcacattttcagataccggggagagtatcacggatttgttgtcagcctatattgatcgagtcgcttcactgaaatactagagaatttacagacggtggcagattctgccaccgggaaaggagaacattatgagtgagatgaaataccgtgcttgtgcctaccttcgtctttcaagggagacgtccgtatcagactaacgcttatccattagagcttgtaaagggtgaactggaagcggaagccatgagggaggtgtcctaggatggcaagaaaagaaggaagatttaatgcacttgcggataaggttccttcgtctgataaggataaaactgtaacatatgttacaacagagaagcagtatcatgttgcgctgtatgccagattgtcggtagaaaaggatggcaggaaaagtgattccatagaaagtcagtttatgattatggaaaactttatcaaggagcgaccggaactaacccattatcagaagtattttgacaggggtgtgtcgggaatcgtcgactgcacgatcaaacatcgatcgaagctcactacattaagctgagcaa

SEQ ID NO: 1582 - DNA, 966 bp, unidentified
  source 1..966: mol_type = unassigned DNA; note = Bacteriophage uvig_395648 from the Index of /pub/databases/metagenomics/genome_sets/gut_phage_database (ebi.ac.uk)
aagaaaaaacgcaaggtggagggagctgataagcgcaccgccgatggttccgagttcgaaagccccaagaagaagaggaaagtctagttctgcagagggtgatgccattcgacgaacttgtttattgcagcttataatggttacaaataaagcaatagcatcacaaatttcacaaataaagcatttttttcactgcattctagttgtggtttgtccaaactcatcaatgtatcttagtaccgcattcatttcagtgagagcttactcatcagagttcgcctacgcctttttaaagtgtccaaacagatattgtgataatgtgtctgtaccgcttttccttgttgagaaaaatctaatcgcattcctccaggattggattaaaaattatcagattgagatagagtcaggagcaaatacctcttatgaatctcagcttactttgctgcaatcctctgagcaagctttggataaagaaaagcagaacctgcttaagcagcttaacaatgcctataacctggtagaacaaggagtatataccgctgatattttcaagtccagaaatcagatacttacatcacgacgtccgtatcagactaacgcttatccattgaaaaggcaaaatcctaccaggaatccatggacatgtccccagaagcaattcgtgatcagcttgtttctgattatggggaacagtttactaaagaagaggccgactatgcaatagatcatcttgaataacactatagttgctataccattttgaaataatggagctttgctattataagatgtaccggtgcaactattgagttacatccttatcaaacggtgacaaattgtcaccgtttgataaattaaatgtccgaaaatacgattcaaataattaaaatcgctcagggcataccgggggaatcgtcgactgcacgatcaaacatcgatcgaagcttgagctgtctcgcatagcaa

SEQ ID NO: 1583 - DNA, 966 bp, unidentified
  source 1..966: mol_type = unassigned DNA; note = Bacteriophage uvig_255494 from the Index of /pub/databases/metagenomics/genome_sets/gut_phage_database (ebi.ac.uk)
aagaaaaaacgcaaggtggagggagctgataagcgcaccgccgatggttccgagttcgaaagccccaagaagaagaggaaagtctagttctgcagagggtgatgccattcgacgaacttgtttattgcagcttataatggttacaaataaagcaatagcatcacaaatttcacaaataaagcatttttttcactgcattctagttgtggtttgtccaaactcatcaatgtatcttagtaccgcattcatttcagtgagagcttactcatcagagttcgttttcaatatggtgggcgttgagaggctcgaactcccgacatcttccttgtaagggaagcgctctaccaactgagctaaacgcccgaatcaattggtttgtataactatattactaaataaatatgctctgtcaataattttgttatttttttgaaaaaagtccgagaagtttatctaaaaatccctgttcatcaaccatttcaccactggcaagaagatcaactttcttttttatttcctctttttcatcagaattcggtgcaaatttaagatatttttgataataatctatcgcttcggacgtccgtatcagactaacgcttatccattgcctgatataaacaaacaaaaccaacaggtcagcttgattttagatgaacaaaaaagatatgcacctgtagcagattatttttcaaataatgatggtttagtaacaaacaatgaaacacttttgccgggtgaaaaagtaagatataacttattagttcctttgaatgaaaagccccaaatcagtgcttcttttcagaacttaaaaacttataaatttataaatgttacagaagaacaataaaggtttatatggcaaaacagcaagcagttatatatgtaagggtatcaagtaaagaacaggaatcgtcgactgcacgatcaaacatcgatcgaagctcaccttcggtgcaatggcaa

SEQ ID NO: 1584 - DNA, 966 bp, unidentified
  source 1..966: mol_type = unassigned DNA; note = Bacteriophage ivig_2835 from the Index of /pub/databases/metagenomics/genome_sets/gut_phage_database (ebi.ac.uk)
aagaaaaaacgcaaggtggagggagctgataagcgcaccgccgatggttccgagttcgaaagccccaagaagaagaggaaagtctagttctgcagagggtgatgccattcgacgaacttgtttattgcagcttataatggttacaaataaagcaatagcatcacaaatttcacaaataaagcatttttttcactgcattctagttgtggtttgtccaaactcatcaatgtatcttagtaccgcattcatttcagtgagagcttactcatcagagttcgtaccgcccacaaggatattgtaccacgaaaacaccgcgctgcatagtctcttgcacctattttggacagcgaggtgttttctttatgtcttttttaccttttccacagtgatttttacaggcgttccccgccctgaaatgatacgcgccagctctgcatatatctttactgcatccattgccgcgccccctttctgttgcattcatacgcgggcggcggcagcggtatgcggaaggaggcatgctgcagcatgaatgtaattcgcggcgttggctatatccgcgtttctaccgccgagcagacgtccgtatcagactaacgcttatccatgggaaatccccgtgaacaacggcgctgtatcaggcgacccgatttttttataattttccgttgtactttctatgtgcgtgacaccaacgccacgaagaacacggccgccgcgctgccggacgttatccgctggttcaaaaatgcaggctaccgattcgataccgtggaccatctgaaaaaaaagccgtaaccgccgccgccacccgcctgctgtggacaaaatacggccggaatatgaaaaaatgcaaattttaacagcaaaaagcctgaaaatccgtcgtgagaattgtaaaaaggcacggaatcgtcgactgcacgatcaaacatcgatcgaagctccgtggaccataactcgcaa

SEQ ID NO: 1585 - DNA, 966 bp, unidentified
  source 1..966: mol_type = unassigned DNA; note = Bacteriophage uvig_78894 from the Index of /pub/databases/metagenomics/genome_sets/gut_phage_database (ebi.ac.uk)
aagaaaaaacgcaaggtggagggagctgataagcgcaccgccgatggttccgagttcgaaagccccaagaagaagaggaaagtctagttctgcagagggtgatgccattcgacgaacttgtttattgcagcttataatggttacaaataaagcaatagcatcacaaatttcacaaataaagcatttttttcactgcattctagttgtggtttgtccaaactcatcaatgtatcttagtaccgcattcatttcagtgagagcttactcatcagagttcgaaacgcaatatgaaatgttagaaaacaaaatttatactccagaattcttcaaaaattggctgcggcaggttttttctcctggtccggatttgttgcaatctgcatacgagcatccccacgataataacgggcaatccaccaattattacactttacgagttttctatcaatatgttcgttgtagtagctcataccagtataaacaccaaacaaataacctctctcctctacaacctgttgtgcggcgttaacgatttcggcaatctttgttttacttaggcttgcctgcgctttatcttcgacgtccgtatcagactaacgcttatccataaaacgacaagaaatcattggcaaaatcaacaccctttccctgataccccctcctgaatcttgtaacgacaagaaaatgcgttttaaagatgcacttcttgctttaaaagatgaatctatgcccccaaaagaaaaaaatcatttgttaaagaaatgtatagaaagaattgattatgatatagagggagtaagatatcactcaaaagtcaaattggatgtttattttaaattttaagcgaggtgtttcaaaatgcaggaaaatgaaacttatgtaatctatttgagaaagtctcgtgcagaggaatcgtcgactgcacgatcaaacatcgatcgaagctacacagctcttgagaaccaa

SEQ ID NO: 1586 - DNA, 966 bp, unidentified
  source 1..966: mol_type = unassigned DNA; note = Bacteriophage uvig_205989 from the Index of /pub/databases/metagenomics/genome_sets/gut_phage_database (ebi.ac.uk)
aagaaaaaacgcaaggtggagggagctgataagcgcaccgccgatggttccgagttcgaaagccccaagaagaagaggaaagtctagttctgcagagggtgatgccattcgacgaacttgtttattgcagcttataatggttacaaataaagcaatagcatcacaaatttcacaaataaagcatttttttcactgcattctagttgtggtttgtccaaactcatcaatgtatcttagtaccgcattcatttcagtgagagcttactcatcagagttcgcgcacatacatatatccctattttgtcgcactgtcagacccgaagataagcagcgataaagagttcatagcaaactggctcgcggcgaataacgcgaagttgtacaaaacgcccgcaaaaggtgttcgctccgtcataattcaaggttctatggaatacgagcggtattacgattacagaagcaagggcaagaagctgtatcgggcagaagatgttatcgagtttataagagaaagaaaggtgggcagcaatgccgaaaaacaaaataatgacccctaaccgcaacggcaaaatagctgtgacgtccgtatcagactaacgcttatccatgcgaacaagtgttcgtccgctgtgcgcgatggacgaccatattggtgcaatagaatagatgcacacctcgaaaagctcgtatttacgagctttttttgcgttttgagggtgaaaatttcaggtgttgttgcccgccgcgcaaaacccaaaaaacgcaacaatccgtaagtaaacgtgaaaaatatacaaaacccttaaaaaccctgcaattacagcgttttcggagtgcaataaactgattgatgtgtaatgatgtaaatatatggtgtcaaaaaaataccgccaaaaatagctgttttaggaatcgtcgactgcacgatcaaacatcgatcgaagctttaacgccaagtgtagccaa

SEQ ID NO: 1587 - DNA, 966 bp, unidentified
  source 1..966: mol_type = unassigned DNA; note = Bacteriophage uvig_580229 from the Index of /pub/databases/metagenomics/genome_sets/gut_phage_database (ebi.ac.uk)
aagaaaaaacgcaaggtggagggagctgataagcgcaccgccgatggttccgagttcgaaagccccaagaagaagaggaaagtctagttctgcagagggtgatgccattcgacgaacttgtttattgcagcttataatggttacaaataaagcaatagcatcacaaatttcacaaataaagcatttttttcactgcattctagttgtggtttgtccaaactcatcaatgtatcttagtaccgcattcatttcagtgagagcttactcatcagagttcgcaaaagaaggagccgcctcgaggtgttcgagtacggctcaattagtggagtagacgggagtcgaacccgtgtccaaaagcctattccctgtccttctacgaggaccagcacgctgcaagtcagaactaaaacatgttgcatgaggtgcctctttactttctcaaatatttgctcgatgcgtaaccgacaacattcttgtaaactacatacaaccatttcactccgttattgtcgttataataaccgtaacactggatgctctcaccgttctgcatctgtgcgatgattgcttttcctgttgacgtccgtatcagactaacgcttatccatgcacccagcccgctgaggttcttcggattgcccaagagcaggaagaggcggccactcgtgccttcatcctccggagttttcaaaaagctcagctgggcgcagataaggcgaaaacggtgaagggaaaacagagccagtttgatcaccttttggataaaatggcaccatattatgatcggatgactctcgcaaatgttgaactggtgaagcagctccacgccagtgcagttctcgagattggagggcaatcatgagtaaaatgaagggcgttatttatgccagatattcaccaggaccagaggaatcgtcgactgcacgatcaaacatcgatcgaagcttcatccgacatggccgccaa

SEQ ID NO: 1588 - DNA, 966 bp, unidentified
  source 1..966: mol_type = unassigned DNA; note = Bacteriophage uvig_94393 from the Index of /pub/databases/metagenomics/genome_sets/gut_phage_database (ebi.ac.uk)
aagaaaaaacgcaaggtggagggagctgataagcgcaccgccgatggttccgagttcgaaagccccaagaagaagaggaaagtctagttctgcagagggtgatgccattcgacgaacttgtttattgcagcttataatggttacaaataaagcaatagcatcacaaatttcacaaataaagcatttttttcactgcattctagttgtggtttgtccaaactcatcaatgtatcttagtaccgcattcatttcagtgagagcttactcatcagagttcggaacccctgtccaaaaagcctgccccataagcatctccgagtgcagttcctgattgcagtgtcagtgaagtatcgttcaggaacaaactgccttcacccattccggtacggttcccgctgaggtaccggacattccccattggtatcctgctgtatgatgtctgtccaaagccgcaggaaagcttcagagagacattagcagatcaagctgctaaagcaaaatcacgttttgcgtttattttttcccaccgttttacggggttgatggaatcccggctcgcttcttatgacacagatgctgacgtccgtatcagactaacgcttatccatagcgtctcgtcagctatcagcgatgcgtagggaatcatttttctgaacaagtcgtaaagacgaatctgtaaatctttttctatttatgcaaaataaaaaggcccaccgcatactttccatatgcgatgagccgggccgcgggtgttgcgagcacccgtcggccaaatgtaatccccctgcgctggggctgactacgtatgtattatacaatatcagccccttttttcagcatgaatggaggctgttttttatgaaaaagaatccctgcagatcgtccgatctctccggccagcgcgccgtggaatcgtcgactgcacgatcaaacatcgatcgaagctcgcttgaggcaagatgccaa

SEQ ID NO: 1589 - DNA, 966 bp, unidentified
  source 1..966: mol_type = unassigned DNA; note = Bacteriophage uvig_401826 from the Index of /pub/databases/metagenomics/genome_sets/gut_phage_database (ebi.ac.uk)
aagaaaaaacgcaaggtggagggagctgataagcgcaccgccgatggttccgagttcgaaagccccaagaagaagaggaaagtctagttctgcagagggtgatgccattcgacgaacttgtttattgcagcttataatggttacaaataaagcaatagcatcacaaatttcacaaataaagcatttttttcactgcattctagttgtggtttgtccaaactcatcaatgtatcttagtaccgcattcatttcagtgagagcttactcatcagagttcgttttctccgacaacgcgcccgcgctggaagccgctttacataaagccttcgaggatcgcaagctgaatatggtcaaccagcgccgcgaattcttcaacgtcaccctcgacgagatcaaagaggtcgtgcgcagccattacgacaaatcggttgaatttatcgatgttccgcaagccgaacagtatagaaccagtttgaagatgaaagaggcgacgacctgaaccgtttttattatgtgtgaggaaagaatatgaaaccgttatcgagaccgtccggtttacccccaaaagcggttatatagacgtccgtatcagactaacgcttatccatatgccgacctctcggggtgttcgtataagctcccctcaaacccaccaacgtaaaagttgacaattgaaagttgacaattgaaagtgataaaagatggacaatattattgaaagtaaaagctttgattttgcaattcgaattgtcaacctgtataagtacctgactgacggaaagaaagaaaatattctttcaaagcagttgcttcacagtggaacaagcatcggtgcaaatgttgccgaagccgagcaagcacagggcaaatcagatttcgtttcgaagatgagcattgcattgaaagaaggaatcgtcgactgcacgatcaaacatcgatcgaagcttgcgcttcgtatggctccaa

SEQ ID NO: 1590 - DNA, 966 bp, unidentified
  source 1..966: mol_type = unassigned DNA; note = Bacteriophage uvig_183461 from the Index of /pub/databases/metagenomics/genome_sets/gut_phage_database (ebi.ac.uk)
aagaaaaaacgcaaggtggagggagctgataagcgcaccgccgatggttccgagttcgaaagccccaagaagaagaggaaagtctagttctgcagagggtgatgccattcgacgaacttgtttattgcagcttataatggttacaaataaagcaatagcatcacaaatttcacaaataaagcatttttttcactgcattctagttgtggtttgtccaaactcatcaatgtatcttagtaccgcattcatttcagtgagagcttactcatcagagttcggggaaatgacttcctcgcttcaataaggtcaaactccatatggagcaaggtcaagacaacgatagccaaggcgacgggggatgcgtctttggatgttataaaggcgctggcagagaagatttcaaccaacatgctgctaagcagcgtgtagctatgggctttaagcataaagaagccccgtggcagtcggcaaactcacacggggcaaagccaatccccataggcaaggaataggcaaggtgattctatcatggccaagaggcgtgccgccatatacgcccgcttttcgtcgcacaatcagacgtccgtatcagactaacgcttatccatttgtaagggtatcgaaaaactggtttgttgtcgttggaacgtgccagaaatagccatttccggtgtttgcaaaataccagatgggcggcttgctgtaagcccgtctaacgccagaaagcggggcaccctgacaaggggtgccccgcttgaacgctaataagaaagcttctggccggggtagatcgtataaggtgccccaatgccgttcttgcttgcgatggtgtgccagtcgatgccgagcgaagcgccaatctcgctgagcgtgtcgccgctcttgacggtgtagacgccatactcgccggaatcgtcgactgcacgatcaaacatcgatcgaagctggtacatccgcattcatcaa

SEQ ID NO: 1591 - DNA, 966 bp, unidentified
  source 1..966: mol_type = unassigned DNA; note = Bacteriophage uvig_19322 from the Index of /pub/databases/metagenomics/genome_sets/gut_phage_database (ebi.ac.uk)
aagaaaaaacgcaaggtggagggagctgataagcgcaccgccgatggttccgagttcgaaagccccaagaagaagaggaaagtctagttctgcagagggtgatgccattcgacgaacttgtttattgcagcttataatggttacaaataaagcaatagcatcacaaatttcacaaataaagcatttttttcactgcattctagttgtggtttgtccaaactcatcaatgtatcttagtaccgcattcatttcagtgagagcttactcatcagagttcggtgttccagggcaggatataatttttagaccaacacctactaaaaaatatcccgaggctatcggcgtatttaccaccaaaggaaagcagctcggaaacgtaaatgcagagttagcaagcgatttgatacataaatatcctaacaacaaaatgaaagttacaatttcagatataacaggcggcggagacaagaattacggttgtaatcttcacgtcgttatctacaaggcataattaaggaggcgggcaaaatggcaagagccgcaaagcaagacagcaattcggaaataattgacggcgtgacgtccgtatcagactaacgcttatccataacccaaccattgtttcgccgtggcggacatttcccgtcaaggttttttgtaaacacacaaagtcaccgctgtgataatttgtgtgtcacttttacaaattcaggggcgtgcccctgcacccaatccgctttactttatgtaaggcggttttttattgccgctcatggatcattatttataaacccaactttgttatttcaccatggcagacgctgacataataaaaaagagtgcattaccacctcagataatgcactcttatattttaccctatttctcctccagcccgctgagcgaaaggaatcgtcgactgcacgatcaaacatcgatcgaagctttatcgctaaccggtatcaa

SEQ ID NO: 1592 - DNA, 966 bp, unidentified
  source 1..966: mol_type = unassigned DNA; note = Bacteriophage uvig_539751 from the Index of /pub/databases/metagenomics/genome_sets/gut_phage_database (ebi.ac.uk)
aagaaaaaacgcaaggtggagggagctgataagcgcaccgccgatggttccgagttcgaaagccccaagaagaagaggaaagtctagttctgcagagggtgatgccattcgacgaacttgtttattgcagcttataatggttacaaataaagcaatagcatcacaaatttcacaaataaagcatttttttcactgcattctagttgtggtttgtccaaactcatcaatgtatcttagtaccgcattcatttcagtgagagcttactcatcagagttcgtgttgtgttcgtattgcgctatattttttccaccatcaaggtatcacaattgatacaatgtaggaaatgcactcacaaaagtgggtgcatttttctatgctcaaaaccagctgatagcaaacggttactgagggtggatgcaaattttactgatttaacatcttaaaaatcaaacgattatagggtcggatgcacccatcgtttgctatcaaggaaattcccatgttttacacagaaaaataccctcgacagtttttacactgacgagggtacctactaactttaaacagtcagcaggacgacgtccgtatcagactaacgcttatccattcggaaaagagatttttttggctgtaaaagcaaatgatttatttgatgcggctttttatcaattagctaatatgttatacttaccagaggaacaaatagcaatatgtccgatatgccatagattttttatacggaaaaatgccaatcaaaaatattgtcataatactaaagttgttaatggaatagaaaggcgaacttgttatgctcaaaaaatgtataagagaaatcaaagcagaaaggaatcagaataatgaatgttgtaatatatgctcgtttcagttcaagtggacagagagaagaggaatcgtcgactgcacgatcaaacatcgatcgaagcttcgttgctgcgcgtagtcaa

SEQ ID NO: 1593 - DNA, 966 bp, unidentified
  source 1..966: mol_type = unassigned DNA; note = Bacteriophage uvig_408451 from the Index of /pub/databases/metagenomics/genome_sets/gut_phage_database (ebi.ac.uk)
aagaaaaaacgcaaggtggagggagctgataagcgcaccgccgatggttccgagttcgaaagccccaagaagaagaggaaagtctagttctgcagagggtgatgccattcgacgaacttgtttattgcagcttataatggttacaaataaagcaatagcatcacaaatttcacaaataaagcatttttttcactgcattctagttgtggtttgtccaaactcatcaatgtatcttagtaccgcattcatttcagtgagagcttactcatcagagttcgaggcggcgcatatgccgccgggcatcacttcggttataactccggctatgactatgcctataactgcggcttcaacgatggttacaaggacggccatacccacggcgagaaaactgggcacagctccggttactcccagggttacatggaggcaaaacgcgagtatggcccgcgtgaggagccacccaatgtgcgctatgtcggcggcgcccagggcaattaaatcgttttcgccataagaggtaggagtatgaaagacaagtatgcgcagtacctgcgtaaatcccaggctgaccagccgacgtccgtatcagactaacgcttatccatcgaaatccaagcccggagactttacacttgaaattatccttaaagacatctaaggttatcaatcttatgataaagactgcgttgagagtctaagattttatcccacacaggcggcacaggaggtgctaagcaccgcgcagatcatcaagggtgggtgcgcagagctgctgtacgtttacaccgatgtagaaccgatcacctttaaccgaggattttactccatagatatgcggtttttctaccgggtgacgctgcaggtaggtaccgggacacctcgatccaccgaggtggagggcctgtggaatcgtcgactgcacgatcaaacatcgatcgaagctactcgttctaggttagtcaa

SEQ ID NO: 1594 - DNA, 966 bp, unidentified
  source 1..966: mol_type = unassigned DNA; note = Bacteriophage uvig_154620 from the Index of /pub/databases/metagenomics/genome_sets/gut_phage_database (ebi.ac.uk)
aagaaaaaacgcaaggtggagggagctgataagcgcaccgccgatggttccgagttcgaaagccccaagaagaagaggaaagtctagttctgcagagggtgatgccattcgacgaacttgtttattgcagcttataatggttacaaataaagcaatagcatcacaaatttcacaaataaagcatttttttcactgcattctagttgtggtttgtccaaactcatcaatgtatcttagtaccgcattcatttcagtgagagcttactcatcagagttcgaaagaaaacaataacaatgaatgtgtcagcagtaagtatgagattgatgacagtacattttatgttaagtcaatcttttcctccgacaaaccaaaagaagttgcagagaagatagaaaagcttattaaagcggaaattgatactattgcaataaaaatttaacttttgtccgcagccaacaaaaaagagtttgtgctataatttacttgtacaattttcttttgtttgactgcataggaggaattttatcatgtatcagtcaaacaaccattcgacttacgcagcactgtacactcgcttgacgtccgtatcagactaacgcttatccataaatttatttcaatggaataggtgcattcgactacgatagctgcaattcataagcagtagcttcgtagagtgacttcaacgccagtggacttccctctgcgaagttagggtaccgagccgcaaacttacggttcggacaaaagctaaaacgacatacctgcgggggttccccgcctctggacacccaccaccctttaaaaagcgtggacgtaaattttgattctttgtgtaattgcagctttttgtgttattgtttattctttcaaagtgaattttcccgtgagctgtttcaatgtatttggaatcgtcgactgcacgatcaaacatcgatcgaagctaccgtcgtgtggttcgtcaa

SEQ ID NO: 1595 - DNA, 966 bp, unidentified
  source 1..966: mol_type = unassigned DNA; note = Bacteriophage uvig_349562 from the Index of /pub/databases/metagenomics/genome_sets/gut_phage_database (ebi.ac.uk)
aagaaaaaacgcaaggtggagggagctgataagcgcaccgccgatggttccgagttcgaaagccccaagaagaagaggaaagtctagttctgcagagggtgatgccattcgacgaacttgtttattgcagcttataatggttacaaataaagcaatagcatcacaaatttcacaaataaagcatttttttcactgcattctagttgtggtttgtccaaactcatcaatgtatcttagtaccgcattcatttcagtgagagcttactcatcagagttcgtgtagaggtgaatattatccaagaattgataagattgaaaaacttgcagattatttcggctgcacaaaagctgacttaatagaaaagcaatcagaaacatatgcagcatacaaggaagtaaaaaatttattagataataacggtgcaagtgcagaaaaacacgaattgatagagttgattatagcaatggatgataaagacgttacaatgcttcttacacttgcaaaacaactgaaaggaagaagttaatatgaaagcaagtaatatgaatcaaattgatattatgtatcttcgtaaaaggacgtccgtatcagactaacgcttatccattaaaagacgattcttttgacttagaaatattccctattctacctagaaaatagccttttctttaatataggtatcgtcttgttccatattcataggggctataacgatacctatatttcatttagttacctactttcttaaataatgcaactattttataacaggattagtctgctttcaagtgctttattttttcagataagttcttgttgtcgagccggccaatccgtcggcagtgattccacacgcttcttggaacgcaattatagctttaactgtagtcgaaccacatgccccgtcggaatcgtcgactgcacgatcaaacatcgatcgaagcttccgcgatgtattatgtcaa

SEQ ID NO: 1596 - DNA, 966 bp, unidentified
  source 1..966: mol_type = unassigned DNA; note = Bacteriophage uvig_596853 from the Index of /pub/databases/metagenomics/genome_sets/gut_phage_database (ebi.ac.uk)
aagaaaaaacgcaaggtggagggagctgataagcgcaccgccgatggttccgagttcgaaagccccaagaagaagaggaaagtctagttctgcagagggtgatgccattcgacgaacttgtttattgcagcttataatggttacaaataaagcaatagcatcacaaatttcacaaataaagcatttttttcactgcattctagttgtggtttgtccaaactcatcaatgtatcttagtaccgcattcatttcagtgagagcttactcatcagagttcgatttaccctgatctggagatctgcattgatgatctgctgaataattgaaaggacttgaacattttgttaacatcaacaaaatgatagaaaaagccccagtgctaccaacaccggggcaatcccagaaaactacgcagaccggatggccagtataatcttctcacgcaaaagaaattataccacaaacctccggcatctgcataggtgtattttttatacccttttttaatagaatgaactggaggttaccatgacaaaaacttcgaaaagaatccgctgcgctatttatgaccgggtaaggacgtccgtatcagactaacgcttatccattccatgtagacccggaaacccgcaagataagcggcttccagctgaatgcctgatgggtgtagtaacttatattactctaccgtatattataaattactacacctatagaattacgaaatatttttaacaggttttacctcccagacctgcgtaatcattcccgcagcctgtagctgtttctggaatgcctggcactccgccgctgtattgcaaaaaccggcaaccgcagcataaagtgtaccggatacctgcagcttcacagcgctgtcatattgcgtcaagttatacgtccttataataggaatcgtcgactgcacgatcaaacatcgatcgaagcttgtcaagtgcatgctgtcaa

SEQ ID NO: 1597 - DNA, 966 bp, unidentified
  source 1..966: mol_type = unassigned DNA; note = Bacteriophage uvig_4360 from the Index of /pub/databases/metagenomics/genome_sets/gut_phage_database (ebi.ac.uk)
aagaaaaaacgcaaggtggagggagctgataagcgcaccgccgatggttccgagttcgaaagccccaagaagaagaggaaagtctagttctgcagagggtgatgccattcgacgaacttgtttattgcagcttataatggttacaaataaagcaatagcatcacaaatttcacaaataaagcatttttttcactgcattctagttgtggtttgtccaaactcatcaatgtatcttagtaccgcattcatttcagtgagagcttactcatcagagttcggtgtgggatgcgaaccgaatggtggcagaattgcgactgttgagagcgtctgattttgaaagatacaaaaaagttcggaatcttctgcaaaaaccagaaaattccgaacattttggtggagctcaagagagtctgtacgaacgtccgaggcattactttcgttttctgctttgctcgtcaattcttccagcgaatatgagaatttgtgtttgccgggcgtatggtagtagtcgatctgaatgcggtcatcccaaagcgtcaccgattttacgaacgtgtcgatcagcttcttttggtgctgacgtccgtatcagactaacgcttatccatcgagccgaaaaagcaggaagaaatcttatctttcggcggtgtcgcaatctctgtaaagtatgcagagcaagatgacccgcatattacagaagcgctgaaacgttcggttttctcctatggattttataataacatctgcaaaacttgataaattatccgaaatatgctataattgcactataaaatgtaccttgaaaatcaaatagcgaacaaggacatacacacgttttctcagaatggagtgtatgttatggaacaaaagaaacgagtaaattgcttatatcgcgtatcaacaatcggggaatcgtcgactgcacgatcaaacatcgatcgaagctcgagttgtccatattgtcaa

SEQ ID NO: 1598 - DNA, 966 bp, unidentified
  source 1..966: mol_type = unassigned DNA; note = Bacteriophage uvig_167506 from the Index of /pub/databases/metagenomics/genome_sets/gut_phage_database (ebi.ac.uk)
aagaaaaaacgcaaggtggagggagctgataagcgcaccgccgatggttccgagttcgaaagccccaagaagaagaggaaagtctagttctgcagagggtgatgccattcgacgaacttgtttattgcagcttataatggttacaaataaagcaatagcatcacaaatttcacaaataaagcatttttttcactgcattctagttgtggtttgtccaaactcatcaatgtatcttagtaccgcattcatttcagtgagagcttactcatcagagttcgacgaccggcaacggtctacccctgccaaaagtcgcttatctcgtttgaggtaagcggctttttgtttttgagcagcggtctccaaaaccgcgtgccgagggttcgaatccttctacccctgccatccatatccgaaaaaaaatcattgtgttgcctatcggcttgatagttgcagactttattttttctcggtaaaacagaaagcccccaccgggcaaaccggtgggggcttttatttgttatgccacggcaatgccggtgcagttatcggggtcaacgtatacctcggtcgcggcaatcgacgtccgtatcagactaacgcttatccatgtgtttccatatctccaaaagagatttacagggcatcaagtttccgccgaatttgacagcgcaaacgaccttgttttcaaaattgggcgttttgatgttgctgccgtcaagctccgtgggaaaaactttttcctgcaagtgcagtttgttcaaccgcgccgttatgtcatcgaaagcgttgcagacgtgagcgaccacttgcaagaggtcgctcggtgtggcaatggaattttgaagagaatgtcagtgtatgaataatttcggatatagtgcgccccgcgcattcggctactgccgcaaggaatcgtcgactgcacgatcaaacatcgatcgaagctctacacatgactagactcaa

SEQ ID NO: 1599 - DNA, 966 bp, unidentified
  source 1..966: mol_type = unassigned DNA; note = Bacteriophage uvig_339756 from the Index of /pub/databases/metagenomics/genome_sets/gut_phage_database (ebi.ac.uk)
aagaaaaaacgcaaggtggagggagctgataagcgcaccgccgatggttccgagttcgaaagccccaagaagaagaggaaagtctagttctgcagagggtgatgccattcgacgaacttgtttattgcagcttataatggttacaaataaagcaatagcatcacaaatttcacaaataaagcatttttttcactgcattctagttgtggtttgtccaaactcatcaatgtatcttagtaccgcattcatttcagtgagagcttactcatcagagttcgtcggcgatgcaagacggaaggcggtgtgacatggatatcaatctttacgcaaaagtcaaagaatacaataccgccctcgccgtcatcagagaaatgcgctccaccgggattatcaccgatgaagatttcggcataatatgcacagttctggctgagaaatacggtctaagttcgtgcagtatatttgccggaatcgacttgataaccgcccggactgacggtaatatctgaccgataggaggtattatctatggatagaatcatagaaaaaatgcggtttgacgtgccgacgcagcccaagacgtccgtatcagactaacgcttatccataaatgcggcagaaagcgagagaccggacaaaagcgaggaatcagaaaaaatgacggaaaggattgtgaccgtaataccggcaacgaaagcaccgattcacatgattgccggttcgtctgcaaaaaaaaacgccgggttgccggatatgcaagggtatccacggaaaaagacgagcagtacacttcatacgaagcgcaggtggattactacacacagttcatccagagccatgccggatgggagtttgttaaggtctacacggacgagggaatcagtggccttggaacaagaaaacgtgacggaatcgtcgactgcacgatcaaacatcgatcgaagctctatctggtagcctgctcaa

SEQ ID NO: 1600 - DNA, 966 bp, unidentified
  source 1..966: mol_type = unassigned DNA; note = Bacteriophage uvig_182703 from the Index of /pub/databases/metagenomics/genome_sets/gut_phage_database (ebi.ac.uk)
aagaaaaaacgcaaggtggagggagctgataagcgcaccgccgatggttccgagttcgaaagccccaagaagaagaggaaagtctagttctgcagagggtgatgccattcgacgaacttgtttattgcagcttataatggttacaaataaagcaatagcatcacaaatttcacaaataaagcatttttttcactgcattctagttgtggtttgtccaaactcatcaatgtatcttagtaccgcattcatttcagtgagagcttactcatcagagttcgtttcataaaacgccttattgtagcgggattaaaaatgcgcaaaagatggactacgatgaggcaatatccaaagggtacatcccctgtaaacgttgcacaaaagacaaataaaaacaaaagccctcgccgaagcaagggcatgggctgcatgatacaacctcaaattgcaatgaaattgtatcatgccagccctgaaaaatcaagcttcagggtctttttgtacccaaaaatcaggaaagaaggaacagaaatggacaaatatgcaatgtatttgagaaaaagccgcgccgacatggaggcgacgtccgtatcagactaacgcttatccatattcagaattcattttagacgtctatatcaagagtgatggggcaatggtctgacccatatacatccgttaaaatatcagctgattttattacatccttggcaaattcggatgccagaaaataatcgatccgccatccagcgttattcttgcgagcgttaaaacgataactccaccacgagtattttatctcgtctgggtgtaaccatctataggtatcaataaaccctgactgcagcagttgttgaaatttttcgcgctcctgcggggtaaaacctgcgtttttcacgtttgttttcggaggaatcgtcgactgcacgatcaaacatcgatcgaagcttacggatatgcattgctcaa

SEQ ID NO: 1601 - DNA, 966 bp, unidentified
  source 1..966: mol_type = unassigned DNA; note = Bacteriophage ivig_3237 from the Index of /pub/databases/metagenomics/genome_sets/gut_phage_database (ebi.ac.uk)
aagaaaaaacgcaaggtggagggagctgataagcgcaccgccgatggttccgagttcgaaagccccaagaagaagaggaaagtctagttctgcagagggtgatgccattcgacgaacttgtttattgcagcttataatggttacaaataaagcaatagcatcacaaatttcacaaataaagcatttttttcactgcattctagttgtggtttgtccaaactcatcaatgtatcttagtaccgcattcatttcagtgagagcttactcatcagagttcgagagaatcgaagttaataaggatggagaggtagacgtccagacatacgtttaactgtgcgtgcttgaaaacacatcacgaacgtcatgcaaaagttgaatgtgaggaaaatccttcctgttgtcgaagtatgatgctgggaggtggtaatgtatggcgtcaaaaacgcttcaagttattcaacaaatattggaacaccttgataattcgatggatggcgacgtcgttgatatgactgcaatttcaccggaagcattagagattactgaagctagatggcacagggtcataggtatgatgggacgtccgtatcagactaacgcttatccatggaacgagaaatgagaaggggcaagttaaccaagccccttctcataccctaatagtgggtgatgcaaacatggggaaaagcaaaaaatccttcacgattaggtatcacaaggtgtgtgatcaggaaaaatcagatgaaatcattcgagcctttgccaaaagagcgatcatgaaagcactagaaaataacggggctgtagcgtacaatgtggatgatgttttgcataaatacatttcgggggaaatgcgtaatggtcatgaaagatgatagagcatatgtccgtgtatccacgttaaaagaggaatcgtcgactgcacgatcaaacatcgatcgaagctcgttcacataagcatctcaa

SEQ ID NO: 1602 - DNA, 966 bp, unidentified
  source 1..966: mol_type = unassigned DNA; note = Bacteriophage uvig_297200 from the Index of /pub/databases/metagenomics/genome_sets/gut_phage_database (ebi.ac.uk)
aagaaaaaacgcaaggtggagggagctgataagcgcaccgccgatggttccgagttcgaaagccccaagaagaagaggaaagtctagttctgcagagggtgatgccattcgacgaacttgtttattgcagcttataatggttacaaataaagcaatagcatcacaaatttcacaaataaagcatttttttcactgcattctagttgtggtttgtccaaactcatcaatgtatcttagtaccgcattcatttcagtgagagcttactcatcagagttcgggaaaagggtcctgcttttggttcacccatccaattaattaaagaaaaatctcttttaaattgctctgtcatccctcacttagttcagaatggcagagccaaacattatttttcagacaacagtccatttcatcggtttctcttcagaaaaatacggtctgtaatagtgcccggcaactcatcacaataaacaattgtaatactaaaatataattactatctttgcaacattagaactagaatatttattatgacaaaaaaagctgctatatatctacgtgtctctagtatcgaccagaagacgtccgtatcagactaacgcttatccatacattatggataaatatggttacatacaagatcatcctaaagtaaaaaaatagtcaaaagcatctcatactcatattctagaaagttagaacaaactatcttgatataaaatatattatacaaatacttctagtcatttttttagtttgtggcaggaactttaagccagttccctagaaacttgctacttttgttcatgagaaataatctcgactgataacatagttgagaatattatattcagatagttataaagtaaaaacttaatgggtagtggaaaaatttcgatgtccccatattggaatcgtcgactgcacgatcaaacatcgatcgaagctaggcggacaacatatctcaa

SEQ ID NO: 1603 - DNA, 966 bp, unidentified
  source 1..966: mol_type = unassigned DNA; note = Bacteriophage uvig_470108 from the Index of /pub/databases/metagenomics/genome_sets/gut_phage_database (ebi.ac.uk)
aagaaaaaacgcaaggtggagggagctgataagcgcaccgccgatggttccgagttcgaaagccccaagaagaagaggaaagtctagttctgcagagggtgatgccattcgacgaacttgtttattgcagcttataatggttacaaataaagcaatagcatcacaaatttcacaaataaagcatttttttcactgcattctagttgtggtttgtccaaactcatcaatgtatcttagtaccgcattcatttcagtgagagcttactcatcagagttcgcacgcacctctgcaaatggcgacaaagttagtcactggagatgttcggaacataaaggatgtaattccgcaagtcttcgtgatgatttgctgcgtactatggcagcacaggttctcagcattgatgcatttaatgaagaggagtttgaacggagaattgaccatatcgatgtggaagaagacagactgaagttctattttcgagatggtcattctgtaacggagcattggccaataccaaggaggaaaaaatgccaaaaataacgaaaatacctgcatcaatcagccgatacacatcagcgacgtccgtatcagactaacgcttatccattttatgagaacggagaaaaaacagttactttcagagatggaagtgtgatatagaggaatgataaaataaagggtctgctgcagtatctgcgtactgcaacagaccctttttgtttgactccttaagaggtagtggatatgcgttttggtctttcaaatatctgattgataaaaagaagaaatggatcaaatacccgattaaacagccacatataaattgagccaaatacatttgtaaaaatacgaagtaaaactgcataggcaagaccaaaagttggtacagccactgtaattgcgctgaggaatcgtcgactgcacgatcaaacatcgatcgaagcttaagcgtcacacgctctcaa

SEQ ID NO: 1604 - DNA, 966 bp, unidentified
  source 1..966: mol_type = unassigned DNA; note = Bacteriophage uvig_32054 from the Index of /pub/databases/metagenomics/genome_sets/gut_phage_database (ebi.ac.uk)
aagaaaaaacgcaaggtggagggagctgataagcgcaccgccgatggttccgagttcgaaagccccaagaagaagaggaaagtctagttctgcagagggtgatgccattcgacgaacttgtttattgcagcttataatggttacaaataaagcaatagcatcacaaatttcacaaataaagcatttttttcactgcattctagttgtggtttgtccaaactcatcaatgtatcttagtaccgcattcatttcagtgagagcttactcatcagagttcgaatgggatggtttagcaacaatctttgaacagcaagacttgatagcacagtaaacgggagcttttctttgtgttcagtgtcattcctctcttttcagcataaaggcgatacgtcatcgttcagattatgcgctcacagatatttacacccggtgcgggcatttcggtatgtgagcgcaacatcggtagagcatgcggctgttaaccgcagtgtcgttggttcgagtccaacagggggagccaaatgaagaagccttgaaacttagagtttcagggcttttttcattcgctatctgttgccgacgtccgtatcagactaacgcttatccatcgccctgaccgtttcatatgagcaacgtattcaaggccagctcagccagttgcttgcttctttagagccagagcagatcgctttatgattacaactgcacgattaaacgaaatacgggcagttatacatgaaatgcttttgcacgtttgcattgatagcatggttgccatacaatagctgtagcaccttgacagccgaatactctatcagcgtaatctcgtgcagaaaaaagcacgggaggtaatgacaaatgaaacgagtatacacactatacagagtgtccacaaaacagcaggtagaggaatcgtcgactgcacgatcaaacatcgatcgaagcttagaccggcgaactattcaa

SEQ ID NO: 1605 - DNA, 966 bp, unidentified
  source 1..966: mol_type = unassigned DNA; note = Bacteriophage uvig_399343 from the Index of /pub/databases/metagenomics/genome_sets/gut_phage_database (ebi.ac.uk)
aagaaaaaacgcaaggtggagggagctgataagcgcaccgccgatggttccgagttcgaaagccccaagaagaagaggaaagtctagttctgcagagggtgatgccattcgacgaacttgtttattgcagcttataatggttacaaataaagcaatagcatcacaaatttcacaaataaagcatttttttcactgcattctagttgtggtttgtccaaactcatcaatgtatcttagtaccgcattcatttcagtgagagcttactcatcagagttcgtcggcacacccaatggttaggggtacgtactgccggggggtacaaggcgatgacaggaggaggtcgacgcggggcgtctttttcttctgtcgcgattcattctaccccctaaggggtgtttggcgaatgttttttgttcacatgtcgaatgtcgggctgatgaagccggaccagacgtggtgatttgccgcgtcattgtagcgtagcggtttattactgattttcgaattgagtatttaggagggcacccatggacatgcagggcaaggcgaggacggccgtcgtctatgcgcgcttcaggacgtccgtatcagactaacgcttatccatagaatagcgaatggctccccgagcagggctcgaacctgcaacaactcggttaacagccgagtgctctaccattgagctatcggggaatgcggttgtcagcgtcttgcgtggtgctcgctgcaggacttagatatattgcacctccagagagtctttggcaacgatgattttcaaatatgagggaccaactcattttctacacaattccgctatcttcgtctggttacgtatccgcgtacaaatcatcgcgcgtacctgctaatctagcgactcacgtatcctatccaccttcgagggagaggaatcgtcgactgcacgatcaaacatcgatcgaagctccatcaggactgcggttcaa

SEQ ID NO: 1606 - DNA, 966 bp, unidentified
  source 1..966: mol_type = unassigned DNA; note = Bacteriophage uvig_290255 from the Index of /pub/databases/metagenomics/genome_sets/gut_phage_database (ebi.ac.uk)
aagaaaaaacgcaaggtggagggagctgataagcgcaccgccgatggttccgagttcgaaagccccaagaagaagaggaaagtctagttctgcagagggtgatgccattcgacgaacttgtttattgcagcttataatggttacaaataaagcaatagcatcacaaatttcacaaataaagcatttttttcactgcattctagttgtggtttgtccaaactcatcaatgtatcttagtaccgcattcatttcagtgagagcttactcatcagagttcgccagttgtacaagtgttaaatgttgctttgttcgtgcttgccatgtgtacacttccagcattgcgtgtcgtccccctatttagatgatttgcacgctttacccattttattcatactacacgaaaaaagaaagccgccgaagcgactttcaaaaaagttttatctgtaatcgaggtatcacagaataaacccaagcacgttttattctatcatattggtacttcttttactagaagaaagaaggtttattatgtcttattcacgttttaattcgcatcttgtcggtatgcgtgttgcaaagacgtccgtatcagactaacgcttatccatttgattatatttatatttacgaggacggcagcatggacattcattttttataatcttatagtttgactaactctggttaaccagttgcctcatctaaatacactttactctgcaaaatgcgattctgggccgcatagcgaagtgcctttatcaattcaagggcaattaaaataacaagtccacctatgtccacaaaaacaattgtctctaactgactgagagcggttgcctttctttgagaatatgcttctgctaaacctgtagcctcatcgcatatctgaaaaaaatgctcgctcttatggaatcgtcgactgcacgatcaaacatcgatcgaagctagatccactctcgaagataa

SEQ ID NO: 1607 - DNA, 966 bp, unidentified
  source 1..966: mol_type = unassigned DNA; note = Bacteriophage uvig_242919 from the Index of /pub/databases/metagenomics/genome_sets/gut_phage_database (ebi.ac.uk)
aagaaaaaacgcaaggtggagggagctgataagcgcaccgccgatggttccgagttcgaaagccccaagaagaagaggaaagtctagttctgcagagggtgatgccattcgacgaacttgtttattgcagcttataatggttacaaataaagcaatagcatcacaaatttcacaaataaagcatttttttcactgcattctagttgtggtttgtccaaactcatcaatgtatcttagtaccgcattcatttcagtgagagcttactcatcagagttcgaatcgtaagagcaaaggctttgtatggcttgattattttacggaacataaaaatatcgagaagcttacaagggaagtggttgtatctcttatccgtgaaataaaggtatttgataaaacccacattgaagtagtgtttgactttgatgactgctacaaagaatgtcttaatgttattgcaagtcaggggcattcggttgaggtggacagtacaggaaaactgaatatcagattaaaggaggctgtgtagtatggcaagaaagagcagaaaaaatatgccggttgcagttgcagagccgacgacgtccgtatcagactaacgcttatccattcaaggaactgcttgaggtggcagaagagagagaggtgggcagcaatggataagacggtagcactttatatgagattatcggatgaagatgacaatttggctgctcatgaggaaagtaacagtatttcccatcagcgaaagctgatgcttgaccatattcagaaactgccggaactaaaggactgcaacatcattgaatttgcagatgacggatattccggagcagactttaacagacctgattttgtgaaaatgatgggtcttgtaaaggcaggtaagattcaggtgattgtaacgaagggaatcgtcgactgcacgatcaaacatcgatcgaagctgcttaccgaagagcagataa

SEQ ID NO: 1608 - DNA, 966 bp, unidentified
  source 1..966: mol_type = unassigned DNA; note = Bacteriophage uvig_138748 from the Index of /pub/databases/metagenomics/genome_sets/gut_phage_database (ebi.ac.uk)
aagaaaaaacgcaaggtggagggagctgataagcgcaccgccgatggttccgagttcgaaagccccaagaagaagaggaaagtctagttctgcagagggtgatgccattcgacgaacttgtttattgcagcttataatggttacaaataaagcaatagcatcacaaatttcacaaataaagcatttttttcactgcattctagttgtggtttgtccaaactcatcaatgtatcttagtaccgcattcatttcagtgagagcttactcatcagagttcgtaagatttaaaatgtaatgtaaatagcaatgaaagaaagacaggttattttataacctgtcttttttatgccaaataaatattaatgtttatttggcatattattttataggaggtgatactatgcacattaaaatcagaccaccaaagagtaagcaaatatttgagtcggaattattgaagatactttcgaggaagccgataaaacgcagataatatacataaaccaagtggaagggaggtgcggtagaatgaaaatggcggcatattgtcgtgtcagtacagagaaagaagaacaattgacgtccgtatcagactaacgcttatccatttgaaaatatagttgtgtatcctgataagtcggtggaaatatttatgaagtaaaatataacgtgaatttgtgttatatttagtataagaggaaacgtgttttgaagcaaataaacaaccgtgactatgcatcaaaagcgaaggaagacggttacaagaatattatcaaatgcgaagtagcatttaaaggtaaaatgtgctatgccgttgcggagttacagtaaattataaaaaaacttgttgtgagtagaaacacaacaagtcgtcatattttatcggttttatatttttggcaatctgaggaatcgtcgactgcacgatcaaacatcgatcgaagctcacaattggccatcggataa

SEQ ID NO: 1609 - DNA, 966 bp, unidentified
  source 1..966: mol_type = unassigned DNA; note = Bacteriophage uvig_448583 from the Index of /pub/databases/metagenomics/genome_sets/gut_phage_database (ebi.ac.uk)
aagaaaaaacgcaaggtggagggagctgataagcgcaccgccgatggttccgagttcgaaagccccaagaagaagaggaaagtctagttctgcagagggtgatgccattcgacgaacttgtttattgcagcttataatggttacaaataaagcaatagcatcacaaatttcacaaataaagcatttttttcactgcattctagttgtggtttgtccaaactcatcaatgtatcttagtaccgcattcatttcagtgagagcttactcatcagagttcggacttgataagtccaaatccgaaatagtagcggtattgttttcaccgctgtaattgtaggttatgacaatcttatcatcatagacgaaaacggcgtgaacaaaggtatcaataagctgctggcggtatttttcgcttgttatgttgccgtccttaaaactggaaatccaataaataatttgttccctgctgatgatccgccgcgcaatgctttcttttgcgatctctatttcaacgttgcgcttttcgtcctctaattcggtcaagcgggtttttgtgctttcggttatgatccccttttgacgtccgtatcagactaacgcttatccatcggcataaaggtcggtaagccagttcgcacctttgtcaaatcgttctcttttttataatatgaaggaggtcaatcatgctagtctatacgatccgcaaaagtgatttgtatgcgcccggcattgaaccaacccgtgaagttctggacattgccagtgaaaatgagaatgtggactttgcccttgtccttgcaaagattctcagggaactgactgcccagaccgggaacataacttaaggagtgaaaacatatgacagtcgttgagcggttaagaagcaggggagtgaccccgagagcggtggaatcgtcgactgcacgatcaaacatcgatcgaagctcgaagccatgatcaacataa

SEQ ID NO: 1610 - DNA, 966 bp, unidentified
  source 1..966: mol_type = unassigned DNA; note = Bacteriophage uvig_596866 from the Index of /pub/databases/metagenomics/genome_sets/gut_phage_database (ebi.ac.uk)
aagaaaaaacgcaaggtggagggagctgataagcgcaccgccgatggttccgagttcgaaagccccaagaagaagaggaaagtctagttctgcagagggtgatgccattcgacgaacttgtttattgcagcttataatggttacaaataaagcaatagcatcacaaatttcacaaataaagcatttttttcactgcattctagttgtggtttgtccaaactcatcaatgtatcttagtaccgcattcatttcagtgagagcttactcatcagagttcgtcgtatgtatcgccggtctataccggttcacggtcagcaggccctcccgataaaaacgggagggcctgcccttattacttgcggtacaatccctgcataatgccgacatcggcagcagcgtccagattgcggcagtgcaggtgctcgacaacggcctggatcttgccatcgtcgtcacggccggcgttgcgctcctggtccaggagccggaaggccatggcctgcagtctggccatgtgatccatttcctcgcccgagagcttaaaatatagatccgccaactcccggttggtgcacttggacgtccgtatcagactaacgcttatccattgcccgctttggactgcgcagcatctacaccgctgtcaaccgcaccccgaaggaaatcgtcgccgcctccggcctctcccaggctgcctttgccgagcgttactgcatcccaaagcgcactgtcgaggactggtgccgcggtgtcgcaaaatgcccgctgtacacccggctgctgttgcagcgagccgaaggactgctgcaggtatgaccgattgtgtccaatttggacacgatcaggaaggagcaagtaatgccaaacgctgtgatctatgcccgctactcatctcacgcccagcgggaggaatcgtcgactgcacgatcaaacatcgatcgaagctgacttctacaagtcgcataa

SEQ ID NO: 1611 - DNA, 966 bp, unidentified
  source 1..966: mol_type = unassigned DNA; note = Bacteriophage uvig_42013 from the Index of /pub/databases/metagenomics/genome_sets/gut_phage_database (ebi.ac.uk)
aagaaaaaacgcaaggtggagggagctgataagcgcaccgccgatggttccgagttcgaaagccccaagaagaagaggaaagtctagttctgcagagggtgatgccattcgacgaacttgtttattgcagcttataatggttacaaataaagcaatagcatcacaaatttcacaaataaagcatttttttcactgcattctagttgtggtttgtccaaactcatcaatgtatcttagtaccgcattcatttcagtgagagcttactcatcagagttcggtgataaatttttcttaaaaatctcacgaatcgtagcatttttcactggatatcttctcaaaacaatggtattatgctgaattgcaaaaggaggcggaaagtactatggggcaagaagatttgcaactacttataaaaggaatcgtgttctctctgcgacaacaaaaattgctgacgaaggcagagtccgaatttgtattgaaaattattgaacgaaagtacccacggccaagaattacgagggaagacaatgagtaatgaaaaagactattcggtattgcctgaggtaaccataatccagacgtccgtatcagactaacgcttatccataacaatggagcggaatactgcaagagccgacctatcaaagaagaagcccttgagaaagcgtttgtaagggcattaaacgaacttataggagacaaggaacgaatactcgaaaaactgcaaagtgcgaccgtgagcgaaataacggactcctgtgcgacagcgataaatgaagtgaatgccgagatagaaaaattacaagagcagatgatggaactgctgatgaaaaggaacaacggagagattaccgataaagaatatgaacagcaaagtcagcaggtcggaatgcaaatagaccaactgggaatcgtcgactgcacgatcaaacatcgatcgaagctctataccggttagaccataa

SEQ ID NO: 1612 - DNA, 966 bp, unidentified
  source 1..966: mol_type = unassigned DNA; note = Bacteriophage uvig_452057 from the Index of /pub/databases/metagenomics/genome_sets/gut_phage_database (ebi.ac.uk)
aagaaaaaacgcaaggtggagggagctgataagcgcaccgccgatggttccgagttcgaaagccccaagaagaagaggaaagtctagttctgcagagggtgatgccattcgacgaacttgtttattgcagcttataatggttacaaataaagcaatagcatcacaaatttcacaaataaagcatttttttcactgcattctagttgtggtttgtccaaactcatcaatgtatcttagtaccgcattcatttcagtgagagcttactcatcagagttcgcagaacgacgtccttcgctgtggtcgatctgacggtgatgccgctgacgtatccgtgctcaacgagctcgcgcatgatttgcgtccagtaggactcgggaatctcaagcggctcgcattcaatcacagacttgtcgacgggcttgccggacttcatgcaatcgtagatgtacgcgagaatcttgaagataacgacgtgcatatcgtccttggccatgatcgctcctttcagatgatagggggattttagcatgggaagtaagaccgccgtcatatacgctcgattcagctgcagcaagcagacgtccgtatcagactaacgcttatccatcccgattcacgttcgagcgggttcgcacaaatttgcgttggtgcgccatatagggttcgaacctacggccttctgctccggaggcagacgctctaatccactgagctaatggcgcgcgacggattgcattatacccaagtgaggggacggactgatgctctttgccaatctttcaaaaacgaaaccccgggctcggtaccgccgttctgtagtatctactctaatacacgcgagccgcaaaccccgtcgggacggtggggtacactcgatggggtcagtcagtccggctatgccgggcgcggaatcgtcgactgcacgatcaaacatcgatcgaagctcttactgaacctgaccataa

SEQ ID NO: 1613 - DNA, 966 bp, unidentified
  source 1..966: mol_type = unassigned DNA; note = Bacteriophage ivig_4185 from the Index of /pub/databases/metagenomics/genome_sets/gut_phage_database (ebi.ac.uk)
aagaaaaaacgcaaggtggagggagctgataagcgcaccgccgatggttccgagttcgaaagccccaagaagaagaggaaagtctagttctgcagagggtgatgccattcgacgaacttgtttattgcagcttataatggttacaaataaagcaatagcatcacaaatttcacaaataaagcatttttttcactgcattctagttgtggtttgtccaaactcatcaatgtatcttagtaccgcattcatttcagtgagagcttactcatcagagttcgcggctcatcttaacaggggcggtggtgagattccaatgttgcttatcctaagcacccgttaatgtcataaaactttagataaaattatatgaggaggatttagaatgaataatgaactattaagatatagcctccaattatctatgctgtctatgttactttctaagcacttgctcagtgatattgaatataaaaagataaaactaaagctgatgaaaaagtataatatctctacagaattatatttataatgttttgcaagtgtggtataatagaactgcatagaaagatacaaaaagggacgtccgtatcagactaacgcttatccatctattgacaacacatgtggagatggtggtattattgtcaagaaaatagaataacaagctataaaactgtcgaaataggtggcttttaggattttaaaagaaatcagttctataataaattaaaaatcgtgttggtagaaaaatcgtctacttctaccaacacgattttacaaagagccagtacttacatctctttttctcctgtaaaaccattgtatattgatactttaaggagtttcaatcattcgatctgttaaccgttattttttggatctaaacttaataaaatagcattaatggcggaatcgtcgactgcacgatcaaacatcgatcgaagcttcgatgtgcctgcttcataa

SEQ ID NO: 1614 - DNA, 966 bp, unidentified
  source 1..966: mol_type = unassigned DNA; note = Bacteriophage uvig_58086 from the Index of /pub/databases/metagenomics/genome_sets/gut_phage_database (ebi.ac.uk)
aagaaaaaacgcaaggtggagggagctgataagcgcaccgccgatggttccgagttcgaaagccccaagaagaagaggaaagtctagttctgcagagggtgatgccattcgacgaacttgtttattgcagcttataatggttacaaataaagcaatagcatcacaaatttcacaaataaagcatttttttcactgcattctagttgtggtttgtccaaactcatcaatgtatcttagtaccgcattcatttcagtgagagcttactcatcagagttcgataacaaggttagaagcaaaggaggaaactccaatgaataaagacaatatttgcaagtattattcttccttattgctttataaaaaattactttttgatggtgaaatttcagagcaagaattcgataaaattgaaaatcgtttagcaaagaaatattgtatcaaaattgatagtattattaggtcaaatgagttgataaattcctcttttagagcaatatatgtaggtgcaaaaaaggaggtaaaaacgaatgatagtaaatgaaatagtccctcaagagttagcgaataaaaggttgaggacgtccgtatcagactaacgcttatccatggcaaaaaaagattgaacaatacaaaaaaagaggaggtggattaaatgggtaaagttagaataattccacaaacaatcaatccattaactcaagttaaaattggtactattaaaaagaagaaagttgctgcatatgctcgtgtttcaactgatcaagaagagcaagaatcatcttttgatgctcaagtacaacattttactgaatacattaaaagtcgagatgattgggaattcataaaggtttattctgatgaaggtatatctggtacttcactgaagaaaagagatggattcaaccaaggaatcgtcgactgcacgatcaaacatcgatcgaagctaccgctgagcgagaatataa

SEQ ID NO: 1615 - DNA, 966 bp, unidentified
  source 1..966: mol_type = unassigned DNA; note = Bacteriophage uvig_75655 from the Index of /pub/databases/metagenomics/genome_sets/gut_phage_database (ebi.ac.uk)
aagaaaaaacgcaaggtggagggagctgataagcgcaccgccgatggttccgagttcgaaagccccaagaagaagaggaaagtctagttctgcagagggtgatgccattcgacgaacttgtttattgcagcttataatggttacaaataaagcaatagcatcacaaatttcacaaataaagcatttttttcactgcattctagttgtggtttgtccaaactcatcaatgtatcttagtaccgcattcatttcagtgagagcttactcatcagagttcgtggatcgttccgtgccaatctttacggaggatgagttctggagcgttgtcgatgaactgcatccgtcagaatgagcgataccgtatagatagggtatggatacggtatggatactcgcgcgcgtacgcgcgcgacgcgcctatatctactctctatatctattcctacacctatacctgttctaaagtctaagtctatatattcagttttagtaagtctatcagtagaaggagaggtgacgccgttggtaatgagaagaggggccacactccaggagcaggaagacggcatcatctacgcgacgtccgtatcagactaacgcttatccatacatggtcggtggcgtgttcgtattggcttgcccgctcaaagcggaaaaatgaaaaaaggctaccgtttagggatttcccctattcggtagccttttttcatgttttgtaacctatttcgttatttcctaacaaaagcctgcgggattctaaaatgactgttagaatctaacgaaaaggagcatggctatgattaggattttactgtccacccggcttggcgagcggaggtggactcaggctgatctggcccgagcaactggaatcaggccgtccaccatcaacgacctgtaccatgagaggaatcgtcgactgcacgatcaaacatcgatcgaagctacacgtagccacacatataa

SEQ ID NO: 1616 - DNA, 966 bp, unidentified
  source 1..966: mol_type = unassigned DNA; note = Bacteriophage uvig_442715 from the Index of /pub/databases/metagenomics/genome_sets/gut_phage_database (ebi.ac.uk)
aagaaaaaacgcaaggtggagggagctgataagcgcaccgccgatggttccgagttcgaaagccccaagaagaagaggaaagtctagttctgcagagggtgatgccattcgacgaacttgtttattgcagcttataatggttacaaataaagcaatagcatcacaaatttcacaaataaagcatttttttcactgcattctagttgtggtttgtccaaactcatcaatgtatcttagtaccgcattcatttcagtgagagcttactcatcagagttcgttgaccgtgatactcccccctccctcacactttacctgaactgggaggattgatttttttggggaatgtaatatagtaaatcggacttatgaataagtacgattaactatattttcacttttccccaagtattccactgaactccaaccctctgcaccggtgccgatgagcgggcacaggcatccgctcccgcctatgggagaataagcgatgtcgtttcagtttctcttttccctgcgtatctaccaggccagaacacggcatggatatacgcaggcacagaccgccgaagccgtgggggacgtccgtatcagactaacgcttatccatctcgggacaggtttacatcaccgctaccggcagtaagtaccacagtaagcccaactgcggcaataccaagcatgcttcccccatcgaccgggacaaagccatctccatgggatacgaagcctgcaagaagtgctattaagcaactcccctttccggccccactcgggccggaatttttttcgggaggggtacagaaacgcccttcctgtggtatactgtctatcaagagaatcagaaaggagccgaaacaatgccctattgtatgtatctgcgcaaatcccgaaaggacagcgatcacccggaatcgtcgactgcacgatcaaacatcgatcgaagctagtgtcgttggactgtataa

SEQ ID NO: 1617 - DNA, 966 bp, unidentified
  source 1..966: mol_type = unassigned DNA; note = Bacteriophage ivig_244 from the Index of /pub/databases/metagenomics/genome_sets/gut_phage_database (ebi.ac.uk)
aagaaaaaacgcaaggtggagggagctgataagcgcaccgccgatggttccgagttcgaaagccccaagaagaagaggaaagtctagttctgcagagggtgatgccattcgacgaacttgtttattgcagcttataatggttacaaataaagcaatagcatcacaaatttcacaaataaagcatttttttcactgcattctagttgtggtttgtccaaactcatcaatgtatcttagtaccgcattcatttcagtgagagcttactcatcagagttcgtggatgacttcgagattaaaatttttcctaagcttccgcgtacccatcattgacaacatggtggtacgcaatcctcagtgccgatgtcattgagtacaccgatcccctctgtcacagggtccttcatatataagttcaaattaggtgtattgctagccaatcggcacacctcccgcaaaattatttaatggagtactatttattgcattgatcgtcattacatggtgtatttcgcggataaccaaatatcgaaactgatatctcacctctaaatgcgctggctttatttcctctattgcggacgtccgtatcagactaacgcttatccatttgatggcgatattgtgtatctgacaaaaaaaagatgggctgattataatggacaaattgtggctgccatcgtcggaggagaaactggctctttaaaaaggatgaaatggtcagaaggatctccttatattaaactcattcctgaaaatagtgactttgaaacaaaagaagtcctaccacacgaaattattgtttgtggcgtttattctggtcatttcagacctgattataatatataggagtgtcataaatgtttgataatattttagatgaatactgcatttatctcaggaagtctagggaatcgtcgactgcacgatcaaacatcgatcgaagctggcacatagcacgtctataa

SEQ ID NO: 1618 - DNA, 966 bp, unidentified
  source 1..966: mol_type = unassigned DNA; note = Bacteriophage uvig_271148 from the Index of /pub/databases/metagenomics/genome_sets/gut_phage_database (ebi.ac.uk)
aagaaaaaacgcaaggtggagggagctgataagcgcaccgccgatggttccgagttcgaaagccccaagaagaagaggaaagtctagttctgcagagggtgatgccattcgacgaacttgtttattgcagcttataatggttacaaataaagcaatagcatcacaaatttcacaaataaagcatttttttcactgcattctagttgtggtttgtccaaactcatcaatgtatcttagtaccgcattcatttcagtgagagcttactcatcagagttcggaagaagtcctaatagaaattacaaagaaggtattaggcgttaaagaaattaccgcagaaataattaagagcaaggtggaccacattgatgtcctcaaaggtaacagactggtttttcatttgaagaacggttcgaccatcgaagaaacatggaagagcctatcaagaaaagacaactggacaccagaaatgaaagaaaaggctcgtcaaagggcgatagcgcaatatcgaagaaaggaaggcaagcacaatggctaaggttaccatcatcccatcgaaaataaacccaataacgcttacgacgtccgtatcagactaacgcttatccatgggacaaaaccatcacatttaagttcgcaaacggcaaggaaatcgcagtttaaaaaggtggcttttttgaaccttctattatttaagcagtctagaatgcttatgggtagggggtatcgaatccctacagcattttgctgcgctaccgagcctggggtttcgtgcgtaaaaattcgagttcaaacggggtaatagccctgcttgaatttttttattttctggaggtgtaaagatggctaaagatggaacaatgcgtggcggcccaagagccaattcggggccaaagaagaaagccttagcggaatcgtcgactgcacgatcaaacatcgatcgaagctctcaaccggaagtcttataa

SEQ ID NO: 1619 - DNA, 966 bp, unidentified
  source 1..966: mol_type = unassigned DNA; note = Bacteriophage uvig_460604 from the Index of /pub/databases/metagenomics/genome_sets/gut_phage_database (ebi.ac.uk)
aagaaaaaacgcaaggtggagggagctgataagcgcaccgccgatggttccgagttcgaaagccccaagaagaagaggaaagtctagttctgcagagggtgatgccattcgacgaacttgtttattgcagcttataatggttacaaataaagcaatagcatcacaaatttcacaaataaagcatttttttcactgcattctagttgtggtttgtccaaactcatcaatgtatcttagtaccgcattcatttcagtgagagcttactcatcagagttcgaaaaagatctggttacaagacagaaagaaattgagaagagtagaaaaattacagaaaaattgtgtaaaaagaacttctcgtggcttgctgaattcagtaaaggaaagaatttggaattccttacaaaagatgttgtccgttcttatataaagaaaatctctttatatgaagacaaacgtatagagatcgaatttaaatttcaagatgaaatacaggcgttatcagaaattttagaggagggggtgatcagatgtcagatggtaagtgcatagtaaagtatttaagattgtcgctggaagagacgtccgtatcagactaacgcttatccatttgctgatgagctggtgaagtatgtggagcaggtgcagaaaatctgcagttgaagtgatgccggacaaattacaaaaattttgtgtcattagcttgacacaagggggacgtcacgcggataatactgtagattttcaggagtttatgatcatgccggtgggcgcgcgggatgatgatggcaattttatttttcgggatggattgcgctggtgtgtggaaatttatcataccttaaaatccattctggaaaaagatggttacacgacttctgtgggggatgaaggcggttttgcgccggatggaatcgtcgactgcacgatcaaacatcgatcgaagctagcaacgcacgacgtagtaa

SEQ ID NO: 1620 - DNA, 966 bp, unidentified
  source 1..966: mol_type = unassigned DNA; note = Bacteriophage uvig_171430 from the Index of /pub/databases/metagenomics/genome_sets/gut_phage_database (ebi.ac.uk)
aagaaaaaacgcaaggtggagggagctgataagcgcaccgccgatggttccgagttcgaaagccccaagaagaagaggaaagtctagttctgcagagggtgatgccattcgacgaacttgtttattgcagcttataatggttacaaataaagcaatagcatcacaaatttcacaaataaagcatttttttcactgcattctagttgtggtttgtccaaactcatcaatgtatcttagtaccgcattcatttcagtgagagcttactcatcagagttcgttgtgttccacctaaaatgcggattgaatctaacggaaaggttggtgaactaaatggcagcacataccccatatggatatcgcattgtagacggaaaggctgttgtcgatgaggtacaggcggaacaggtcagaagcttttttgaagagtacatttccggtaaggcactaaaggttgctgcagaaaatgtggggctaaagatttttcacggcagtgccggaaggatgcttcgaaatacccgttatcttggggatgattattcccccgccattattgatcaggaactgttcgacaaagccggacgtccgtatcagactaacgcttatccatagatgccgaatgccgtggcacatgagattacacaggaagaattgcagcgagattttgactattacagggcacagaaagtgttggaaaccatgtttatgttcggtatgatttctgtgaatgaattccacaaaatatcggctgtaaaccgcaaaactttctcaccgtttctggcggagattatgggctaaatgacttgctatttctgcgatagtacgggaatatgtcactgcccaaaaagtgaggtgagttgatgaaaaagataacaaaaatcgggacaaatgaacccctggctgagaagaaggaatcgtcgactgcacgatcaaacatcgatcgaagctacgctacgaactgcaggtaa

SEQ ID NO: 1621 - DNA, 966 bp, unidentified
  source 1..966: mol_type = unassigned DNA; note = Bacteriophage uvig_585929 from the Index of /pub/databases/metagenomics/genome_sets/gut_phage_database (ebi.ac.uk)
aagaaaaaacgcaaggtggagggagctgataagcgcaccgccgatggttccgagttcgaaagccccaagaagaagaggaaagtctagttctgcagagggtgatgccattcgacgaacttgtttattgcagcttataatggttacaaataaagcaatagcatcacaaatttcacaaataaagcatttttttcactgcattctagttgtggtttgtccaaactcatcaatgtatcttagtaccgcattcatttcagtgagagcttactcatcagagttcgaaattgaaatatggttcattggtggatatgagaaagcaatgccgctagaataaggaaccttgagtgaaacacattatgaactaccgttcgcagaaaattaagaatctggagtgaaacaaaacttgataaaaagaacgctttatggtaagatggagacaaagaacaagaagtgaaaaaggggaggtgtacaccaatgggattagctgatacggtcacaaaagcctatatgaaagaaaatactgtatttgcagatgcatttaactatctgatttacggtggtaaagcagttgtcaatcctgcgacgtccgtatcagactaacgcttatccatggagacagagcctaatgccgatgcgctaattgccaaaatcctacacagggcagaactggagtaccaattttgctcggcgggcgatgctgacccagcaagcctgcaaatgcaaaaagcgtgtgccgagtataagccgaccgatgattttccatataccttttataaaggaatcgttagcaacgtcagtctataccgcgatacccacatcgaattcaaactgcgaaatggacaaactgtgtgaggaaaagtcatgaataacatgagaattgttgagattcccgcttctatgagggaaaacgcggaatcgtcgactgcacgatcaaacatcgatcgaagctgtcacttcgtgttgcggtaa

SEQ ID NO: 1622 - DNA, 966 bp, unidentified
  source 1..966: mol_type = unassigned DNA; note = Bacteriophage uvig_120053 from the Index of /pub/databases/metagenomics/genome_sets/gut_phage_database (ebi.ac.uk)
aagaaaaaacgcaaggtggagggagctgataagcgcaccgccgatggttccgagttcgaaagccccaagaagaagaggaaagtctagttctgcagagggtgatgccattcgacgaacttgtttattgcagcttataatggttacaaataaagcaatagcatcacaaatttcacaaataaagcatttttttcactgcattctagttgtggtttgtccaaactcatcaatgtatcttagtaccgcattcatttcagtgagagcttactcatcagagttcgttttccatttgaaagaaggaggcgcataccgatggcaaagaccgtgcgggtaatccctgcaagccctaaaatctttcgttctgaggttacggcagaaccaagacggcgaaggacggcaggatatgccagagtttcgaccgatcatgaagaacaggcttccagttacgaaatgcagatggctcattacaagaactacatcgaaagccgtgcagactgggatttcgtcggcatgtattcggacgaggggatcagcggcaccaacacaaagaagcgtgacggcttcaaccagatgatcgaggagacgtccgtatcagactaacgcttatccatgtctgctgtttcatgaagggagatgttgaaatgagcaaggaagaagggcttcgggaaatgacgtatcagatggtgatgcgtgcttcatggaaaatgctgcagagcggacttttgtcagaggacgagtatcttgcgtttgaagcgaaaatgcgcgagaaatatcgtcccgtcatcggacttttattttcagatattgacttgctatcgtgcggatagtacgggaatatgggactggaaaggagggagcaccatgaagatacgaagagtccaaccaagccctatattgcagaaaaagctacgggaatcgtcgactgcacgatcaaacatcgatcgaagctactcgctacgtggcacgtaa

SEQ ID NO: 1623 - DNA, 966 bp, unidentified
  source 1..966: mol_type = unassigned DNA; note = Bacteriophage uvig_365399 from the Index of /pub/databases/metagenomics/genome_sets/gut_phage_database (ebi.ac.uk)
aagaaaaaacgcaaggtggagggagctgataagcgcaccgccgatggttccgagttcgaaagccccaagaagaagaggaaagtctagttctgcagagggtgatgccattcgacgaacttgtttattgcagcttataatggttacaaataaagcaatagcatcacaaatttcacaaataaagcatttttttcactgcattctagttgtggtttgtccaaactcatcaatgtatcttagtaccgcattcatttcagtgagagcttactcatcagagttcgctatggaaaggttagagatgtataaagatcgcgtagatgcattgaatttgccaaaagtctcaaataatttatttgaaagtttagcgccgaaagtatctgctaatgctcctcaagaaaaagttatggattcaagaagtttgttaatgaatttcctaaataattaaggtggtcgatttcgaccactttttctgtaccaacatattgtactgaggtatgatatattgtataatattattaaggaggtgttcaaatgaacattgattattcaagactttctagagatgaagataaagcaaattagacgtccgtatcagactaacgcttatccatctagtttagaaacactaagtaagatgagtacatggatacaaagatatatataaaaggctagggtattaacctagcctttattaattcagatagaattgatttcatatttttatctccgcttcttaaaaagactacagttctgtctggatattgatttttaagtttgtccatttcttccttagtggtttctttccctattggaatatatactattcccctatcaacgtaattcataatatcacctcttaataattaaagggacggcaaaaacgccgacccttattttttttacgttttaccggaatcgtcgactgcacgatcaaacatcgatcgaagctccagctgcgtgactacgtaa

SEQ ID NO: 1624 - DNA, 966 bp, unidentified
  source 1..966: mol_type = unassigned DNA; note = Bacteriophage uvig_432464 from the Index of /pub/databases/metagenomics/genome_sets/gut_phage_database (ebi.ac.uk)
aagaaaaaacgcaaggtggagggagctgataagcgcaccgccgatggttccgagttcgaaagccccaagaagaagaggaaagtctagttctgcagagggtgatgccattcgacgaacttgtttattgcagcttataatggttacaaataaagcaatagcatcacaaatttcacaaataaagcatttttttcactgcattctagttgtggtttgtccaaactcatcaatgtatcttagtaccgcattcatttcagtgagagcttactcatcagagttcgaagaaaaaattgcgtctgcccgatcagttggagctggtgatggaggatgggactgtgtatcgtgtacgcagcttctttgtcgcagagcagcagatgggggacatgctggatgccctctctctcgaaaaagtcaatcgggagaactgaatcccggcacattgcccagtggaatccatagccgtgctgtggtataatcattgcagatttctgattgtatcacgcactgcatttcgggaggttaaataagaaaatgcaggaaaattatatcgttggtatttacgcacggctgagccgggacgagacgtccgtatcagactaacgcttatccataagaacgcgacattcacatctactacaattttgtcggatatatcgaagcataagccgtcattctttattcgaggttgactaacgagtattatgcgaaagacatttccaagaagcgacggattgtgaacaagatgaaaggaaatgcaggcgttccgctttctccgccgccctacggttacatcaaaaacccagacgatccccgcttttgggtggtagagccggaggctgccgaggtggtgcgccggatctaccgcatggcgctggagggttacgggctggcggaaatcgccgcccgccttgggaatcgtcgactgcacgatcaaacatcgatcgaagctgcgagaagatatcagcgtaa

SEQ ID NO: 1625 - DNA, 966 bp, unidentified
  source 1..966: mol_type = unassigned DNA; note = Bacteriophage uvig_204911 from the Index of /pub/databases/metagenomics/genome_sets/gut_phage_database (ebi.ac.uk)
aagaaaaaacgcaaggtggagggagctgataagcgcaccgccgatggttccgagttcgaaagccccaagaagaagaggaaagtctagttctgcagagggtgatgccattcgacgaacttgtttattgcagcttataatggttacaaataaagcaatagcatcacaaatttcacaaataaagcatttttttcactgcattctagttgtggtttgtccaaactcatcaatgtatcttagtaccgcattcatttcagtgagagcttactcatcagagttcgggaaagcgtgggcagaaatagaagcggagaaagcaaaggtagtaggtcattaattatcgtgaatttgcgattgtgaaaatggcagacgaggaaattatcaagtgaataataaggaatggttttgctacgatatttaacgagcaaaatcagaataaaagggcattcaaaacggacagtggaacatgtttgtagtggatgtcttttttgtggtcttgtcggtgcaaccttcccttccccttccttctctttctcttcctagagaaaaaagcgaaaaagaaaagcagaaaagaaagaaccaaagacgtccgtatcagactaacgcttatccataggagatgaggctcctaagtatttctcagaggatccagataagggcggtagattgtaccacattactaaggctggctgtgatcttatggcagggcgtattatcggagctcagagtgaggcttttaagactaagtagtgttgttgtaaaatttagtgaacattttacagcaccgccgaaacattatacggatgtaatacactttgagagtaggcagtggaaatattcaaaatgcaaaggagcaggatagcaatgaaaatcaaggataagagatttaaaatcacagctttatacgagcgactggaatcgtcgactgcacgatcaaacatcgatcgaagctgagttgtgttgatagcgtaa

SEQ ID NO: 1626 - DNA, 966 bp, unidentified
  source 1..966: mol_type = unassigned DNA; note = Bacteriophage uvig_97244 from the Index of /pub/databases/metagenomics/genome_sets/gut_phage_database (ebi.ac.uk)
aagaaaaaacgcaaggtggagggagctgataagcgcaccgccgatggttccgagttcgaaagccccaagaagaagaggaaagtctagttctgcagagggtgatgccattcgacgaacttgtttattgcagcttataatggttacaaataaagcaatagcatcacaaatttcacaaataaagcatttttttcactgcattctagttgtggtttgtccaaactcatcaatgtatcttagtaccgcattcatttcagtgagagcttactcatcagagttcgttcgtctccgccgaaaggcaaagtaaacaaacaggaggataaaaaatgaacaacattgaggtcaaaacgatttacggcaggatagaagattttgaaaataattacttcttctctccgtctatcagcaaaagaaaaactgtgggcagtcaaacctattatgtccgcagatatttcaacggcggcaaagactttgaacagacgatgaagtccattgccgtgcaacgcacaatgaaaaagtgaggtaaacgatatgaaacagaaacactacatagcgggattgtattacagactttcccaagagacgtccgtatcagactaacgcttatccattcgtatacaaagtcgatatagcgtccgtcttacggcacaaactcaataaataacgataagcgtatgggttatctgaactcatacgcttattttcttccgttgatgtctttcttcaatgagtgtccataaaattgtgtcgcaacaagcacacgtcacggttgcatattagtttaaatgcgaccaattataaatgtttgaatagtagatagctattatgtacagaaaaattagtgtagacacattcgttcggcattttattcagacttgcatgtttgatacaaatacataacagtgtaagcaggaatcgtcgactgcacgatcaaacatcgatcgaagctagatcttcgcgctagcgtaa

SEQ ID NO: 1627 - DNA, 966 bp, unidentified
  source 1..966: mol_type = unassigned DNA; note = Bacteriophage uvig_81090 from the Index of /pub/databases/metagenomics/genome_sets/gut_phage_database (ebi.ac.uk)
aagaaaaaacgcaaggtggagggagctgataagcgcaccgccgatggttccgagttcgaaagccccaagaagaagaggaaagtctagttctgcagagggtgatgccattcgacgaacttgtttattgcagcttataatggttacaaataaagcaatagcatcacaaatttcacaaataaagcatttttttcactgcattctagttgtggtttgtccaaactcatcaatgtatcttagtaccgcattcatttcagtgagagcttactcatcagagttcgattcagccgctagaaaggctatgggtggacttgatggatgattatttacaaagcactattcagtacagaatagccatgtcgatggcaaaaagtatgctgaacaaggggatcataaccaaggaagaatacgcaaaaattgatacaattatgaccaaaaacgctgagttatctttgggtactatattctccgaaattccttgatattactgcctttcagagcgaatatgtcacacgataaggaggcgatatcatggaaagaacaatcaagcgagtcgaccgcaaactccccaagcaggaaaagacgtccgtatcagactaacgcttatccattgaaagaaaaggcaaggcaggcaacgacagaaaggtggagatcaaatggctaacgcaagaaaggtacaggtcatagaggcaacaatcaatcctaagacgcacctgtccactacatcgcctcgcaagcgccgtgtagcagcatacgcccgcgtctcgaccgattcggatgaacaggcaggcagctacgatgcacagattgattactataccaggtacatctgcaacagacctgattgggagttcgtaaaggtttaccccgacgacggcatctcaggtttgagcacgaaaaaaagagaacagggaatcgtcgactgcacgatcaaacatcgatcgaagctttattcatctcacggcgtaa

SEQ ID NO: 1628 - DNA, 966 bp, unidentified
  source 1..966: mol_type = unassigned DNA; note = Bacteriophage uvig_227260 from the Index of /pub/databases/metagenomics/genome_sets/gut_phage_database (ebi.ac.uk)
aagaaaaaacgcaaggtggagggagctgataagcgcaccgccgatggttccgagttcgaaagccccaagaagaagaggaaagtctagttctgcagagggtgatgccattcgacgaacttgtttattgcagcttataatggttacaaataaagcaatagcatcacaaatttcacaaataaagcatttttttcactgcattctagttgtggtttgtccaaactcatcaatgtatcttagtaccgcattcatttcagtgagagcttactcatcagagttcgcagagattcatgtacggtcagaatccgatggcgataagatgaaagcatttgtagatgctgtcaaaaatccgtatctattccgtgtcggtagtattggcgttcatgtgacttattcaggaaatacaggggatactttacagcgccgtatccataacttgctcatttcggagaattgattttgctgtttcgtatgatataattagtgcgtgtagtatagccatatcatacggccttatagtaggaggtttatatggcatacagaaaccgatatgatgaatatttgcggaaacgccagggagtgacgtccgtatcagactaacgcttatccatagcgactccttgatttgattgatgaacagggccttgccagtgctgctggctgatatttatgggtctattggaacatcatcccccgccgcctatgacacgctgtgcgcgctctttcgcgacacgaggacaaaacccgaagactatgacctcatcgtgacgggcgacctcggcaggctcgggcatcagatcgtctcggactttttcgcgcgcgatgggctccctctcggtgagcgctacaccgactgcgggcttctgctctacgacatcgaatcgcaggacatgcactgcggcggcagcggtggaatcgtcgactgcacgatcaaacatcgatcgaagctgccggagcagagacgtgtaa

SEQ ID NO: 1629 - DNA, 966 bp, unidentified
  source 1..966: mol_type = unassigned DNA; note = Bacteriophage uvig_581146 from the Index of /pub/databases/metagenomics/genome_sets/gut_phage_database (ebi.ac.uk)
aagaaaaaacgcaaggtggagggagctgataagcgcaccgccgatggttccgagttcgaaagccccaagaagaagaggaaagtctagttctgcagagggtgatgccattcgacgaacttgtttattgcagcttataatggttacaaataaagcaatagcatcacaaatttcacaaataaagcatttttttcactgcattctagttgtggtttgtccaaactcatcaatgtatcttagtaccgcattcatttcagtgagagcttactcatcagagttcgtaggcagatatgtggagaatgtcttcaccattgatgtatttttacggttatgatttccaacacacatgtgcgaatgaattggcacaccttgaaatggtggctgccattgtacaccagcttacaagaaacctcttgtaaaagcaaattgtatacataactaatcgcaaaacttttaaccacaaaaacttgcgtattctttgtagttcttgcagcgaaaaaattatataaatacatagatataattcctggatatatgtatactacataactagttagattttgcatcactaaactagtcttgacgtccgtatcagactaacgcttatccatagctgtttttattgtatacccctatgtgcgtgcaaatttagccgcacttaccggtatcgcttgcaataattcagtaaaccttccctgtctggatagcttataaaaaatctgccccagtacgccaataccggggcagattaaggaaccacatcgggaaaacccgatacagtcgccctacacaagcagattgtaccattttcccggtgaaaatacaagcaccgggcatttttatgtccaaaaaggaggaattatgttatatgaattgtctccaagtgacatatctcacattattatctatctggaatcgtcgactgcacgatcaaacatcgatcgaagctggcctgatatacaggactaa

SEQ ID NO: 1630 - DNA, 966 bp, unidentified
  source 1..966: mol_type = unassigned DNA; note = Bacteriophage uvig_64010 from the Index of /pub/databases/metagenomics/genome_sets/gut_phage_database (ebi.ac.uk)
aagaaaaaacgcaaggtggagggagctgataagcgcaccgccgatggttccgagttcgaaagccccaagaagaagaggaaagtctagttctgcagagggtgatgccattcgacgaacttgtttattgcagcttataatggttacaaataaagcaatagcatcacaaatttcacaaataaagcatttttttcactgcattctagttgtggtttgtccaaactcatcaatgtatcttagtaccgcattcatttcagtgagagcttactcatcagagttcgtggaaatacacttcaaatgtggagtgaatatcgaacagaaatatgtgaaatgaaagatgccctcggagccggacaacaccggtagccgagggcaatttttactttgcccgtttttgccagacaacaccccggaagaaccggagtgcatctggcccttgacgggcatcgattattattctgttattttatattgccgcaggatagactttaagttcctgaccattgcaatgagtatgtcgaattcttcaggagaacagtcaaaaaatgggctgtgaatggatttgctatcgtcactgacaggacgtccgtatcagactaacgcttatccataaaaactcaaagctgaaatagcagcgctcacggaaaggatctgcgagcagaccagcaaagaagtcaccgaggcagactacacggtgatcagcgaatatgatcccgaaaaagtaaagaaattcgtcacgaaggtcattgtgctaaaaggcacggtgaccttcgtgttctataacggcgtggagatcacgctggaatacagcaacggcgctccgggcaacaagcccggctggaacgtaaaggaggcataaccatggcaccggcattacgaagagtagtacgcaccatgccgcagatcgcggtggaatcgtcgactgcacgatcaaacatcgatcgaagcttcttggaacgccgaggctaa

SEQ ID NO: 1631 - DNA, 966 bp, unidentified
  source 1..966: mol_type = unassigned DNA; note = Bacteriophage uvig_87948 from the Index of /pub/databases/metagenomics/genome_sets/gut_phage_database (ebi.ac.uk)
aagaaaaaacgcaaggtggagggagctgataagcgcaccgccgatggttccgagttcgaaagccccaagaagaagaggaaagtctagttctgcagagggtgatgccattcgacgaacttgtttattgcagcttataatggttacaaataaagcaatagcatcacaaatttcacaaataaagcatttttttcactgcattctagttgtggtttgtccaaactcatcaatgtatcttagtaccgcattcatttcagtgagagcttactcatcagagttcgtcgtttttgaccgtaaaaccggcacttttactttcttttactacacattatgaggttttgcattacggccctccatactgactcatgataaacatggccatcttcgcatttggttctttaatatttacaggaaattccagtctcttttcatagatccacattaataaccgcctccttcccatggccacgggtcgtctgtccaggaccagtagactgtatctctggcattttcagcacgaaggggaccatactgggcttcgtaagcatttcttgcatctgcatatgcctgggacatctgttgacgtccgtatcagactaacgcttatccataacaccgcccgcagcgtatgtattctttcagcggcgtgacacttattgtaatgtaaattgttaaatagatagaaaagccgcccagtgctaccaacaccaaacggctttcacatagattttctcttaccagattactccggtttgattaatccagacttagaacatctgaattatatcattttcggaacatcctggcaagggtgttatttttatactcatttttcatacgtatagagaaggagatgatcatatgtcagataaacctacacccaaaaatcttgaaatcggtgctgcctatatggaatcgtcgactgcacgatcaaacatcgatcgaagctgacagaatcaaccggtctaa

SEQ ID NO: 1632 - DNA, 966 bp, unidentified
  source 1..966: mol_type = unassigned DNA; note = Bacteriophage uvig_392002 from the Index of /pub/databases/metagenomics/genome_sets/gut_phage_database (ebi.ac.uk)
aagaaaaaacgcaaggtggagggagctgataagcgcaccgccgatggttccgagttcgaaagccccaagaagaagaggaaagtctagttctgcagagggtgatgccattcgacgaacttgtttattgcagcttataatggttacaaataaagcaatagcatcacaaatttcacaaataaagcatttttttcactgcattctagttgtggtttgtccaaactcatcaatgtatcttagtaccgcattcatttcagtgagagcttactcatcagagttcgaggcaatgtcaagaaaaatcaaacgctatctctgcttcctgcggataatcgcttatgaggaactggacagaagtatcttgaaaactgaatatggagaacgcattttatctgattgctgcaattgagttacaaacagcgacgattgggcgacaatcaggcgacaatttgaggtttatcgttgccctgaaattctttctgtgatataatgaaagcagcaattttaagcctgtcggtataggaggaaatacttatgcagacaggaaaaatcactgctttatacgtcagattttcttatgatgagacgtccgtatcagactaacgcttatccatataatcagatttctgttttcttttggggtgtcggcatcatcgattttatatgagaaacggttccctaagttgggtacgactgcgtatgcagttcatcaaacacaactccgtggatgttgaagccgtgtttgctgtatgcttcagcggaaagtacctgataaaagctgtttgtaggaaggtatacgatgcgtttttgtgatgccaaaattttcactcgcttggagagtgccggacacattcgcaccatatctgccgctacatcaaatacaatggcagcctgttgacggtcggcagcacaacggaatcgtcgactgcacgatcaaacatcgatcgaagctcgcctatgtagagcttctaa

SEQ ID NO: 1633 - DNA, 966 bp, unidentified
  source 1..966: mol_type = unassigned DNA; note = Bacteriophage uvig_229002 from the Index of /pub/databases/metagenomics/genome_sets/gut_phage_database (ebi.ac.uk)
aagaaaaaacgcaaggtggagggagctgataagcgcaccgccgatggttccgagttcgaaagccccaagaagaagaggaaagtctagttctgcagagggtgatgccattcgacgaacttgtttattgcagcttataatggttacaaataaagcaatagcatcacaaatttcacaaataaagcatttttttcactgcattctagttgtggtttgtccaaactcatcaatgtatcttagtaccgcattcatttcagtgagagcttactcatcagagttcgttatattatagaacatatgtttgctttttgcaactgggggccataacttttttgcccccatcttttcccaaaagcaaaaaccgctcctggcgggaaccaggaacggtttttgtgatactattgccgagtgcacacacaaggcgatataatatcagcatgacatctgtattatatcatcctgaagtgcacccggtcaatgggtgtattttttgtacgtttttttaatacattttacgaggaggatggtataatggagcttagaaaagatggattatattttgcatatctgcgcaagtcccggacgtccgtatcagactaacgcttatccatgaaagtcaggcggaatggataaattcacgttgaaaatcttcccaaggctttagcgcgcccagtatgtatagagtttgtgtactgacgaactggcgcatctcgaaatcgtcgccaccatcgttcaccagctcacccgcaatctgacggccgagcagttggtggaacagggcttcggcccctattacattgaccacgggaccggcatctggccccaggccgccggaggaatccccttcaacgcctgcgaattccagtccaagggcgacgtgattacggatttacatgaggatatggccgcggggaatcgtcgactgcacgatcaaacatcgatcgaagctatcgacggcatcgcaattaa

SEQ ID NO: 1634 - DNA, 966 bp, unidentified
  source 1..966: mol_type = unassigned DNA; note = Bacteriophage uvig_548354 from the Index of /pub/databases/metagenomics/genome_sets/gut_phage_database (ebi.ac.uk)
aagaaaaaacgcaaggtggagggagctgataagcgcaccgccgatggttccgagttcgaaagccccaagaagaagaggaaagtctagttctgcagagggtgatgccattcgacgaacttgtttattgcagcttataatggttacaaataaagcaatagcatcacaaatttcacaaataaagcatttttttcactgcattctagttgtggtttgtccaaactcatcaatgtatcttagtaccgcattcatttcagtgagagcttactcatcagagttcgtcggcagatatgtggagaatgtatttgaactgaacatgcttctcaatatttaagtaattgttctttaagcatcatctacaacatcaatgtactgattcctccgtgcctatatcagtaagcacacctgccacgcgtctgtccttcatggagtagcgctgtgagaggtatctgaatgatgctcccgcttcgccgtccggaccgccatactggcttatgatgagctgcgcaagcttcgggttggtctccttgatgtgtacaggatactctaattttttttcataaatccacattatttatacggacgtccgtatcagactaacgcttatccatcattatattatttttacaaggaggtatgtaaatgtccaattacacagaaataatagaccaactaatacagctccgcaaagctaaaggtctcacccaaaaagaccttgccgctgctgccaacctcgctcagcctgccattgcacggcttgaaagtaagtcagcagttccacagcttgacacattcgtcaaggtagccggagcacttggctacaccatagagcttgtgcaggaataataaagaggtgattgaatgatactgcttgaaaatctgataatgtatctcaggaagtcccgctccgaggaatcgtcgactgcacgatcaaacatcgatcgaagctgcactaagactcgatgttaa

SEQ ID NO: 1635 - DNA, 966 bp, unidentified
  source 1..966: mol_type = unassigned DNA; note = Bacteriophage uvig_100661 from the Index of /pub/databases/metagenomics/genome_sets/gut_phage_database (ebi.ac.uk)
aagaaaaaacgcaaggtggagggagctgataagcgcaccgccgatggttccgagttcgaaagccccaagaagaagaggaaagtctagttctgcagagggtgatgccattcgacgaacttgtttattgcagcttataatggttacaaataaagcaatagcatcacaaatttcacaaataaagcatttttttcactgcattctagttgtggtttgtccaaactcatcaatgtatcttagtaccgcattcatttcagtgagagcttactcatcagagttcgttttccctcatacttttgtctatgtttcttatgaaaagataccgtccgcctgatttattatatcataccgtgatgagaataggaatttatatttccttctgaaatgaaaaaagcggagaaaagcaatactcccctccgcttataattcagattaagaaacgtatgtctttccgccgcttactgcagcgatccatccggagggaatccgcatccagatatccgctcctacctgcttgatttcctggcaggttaccctggtccccttctggaggctcccgtttttgtccgggtccgccgcctgacgtccgtatcagactaacgcttatccatcagagaggaaaatctctgcaacatcgccttaagggcatcaataaaagatattgagtttattatgtgaaggtctcgtagcaatacgggaccttttacgttatataaaaaaccgccccggtgcgccaacaccaggacggcaaccgcactccgaaaagctacggccgtacaagtcatagtataccacacggagcgcgggaaaatcaatgaaaccgcgctatttttgcgcccattttcagattggaggtacactatgaatgctgtaatttacgccagatactctcccggcccccggcagaccgaggaatcgtcgactgcacgatcaaacatcgatcgaagcttgactcaacagcaagcttaa

SEQ ID NO: 1636 - DNA, 966 bp, unidentified
  source 1..966: mol_type = unassigned DNA; note = Bacteriophage uvig_107826 from the Index of /pub/databases/metagenomics/genome_sets/gut_phage_database (ebi.ac.uk)
aagaaaaaacgcaaggtggagggagctgataagcgcaccgccgatggttccgagttcgaaagccccaagaagaagaggaaagtctagttctgcagagggtgatgccattcgacgaacttgtttattgcagcttataatggttacaaataaagcaatagcatcacaaatttcacaaataaagcatttttttcactgcattctagttgtggtttgtccaaactcatcaatgtatcttagtaccgcattcatttcagtgagagcttactcatcagagttcgagacgtaaaaagagccaaatttcaaatcaagctagatatgatttgtcaggtaaacttatttgtagtaaatgtggcagtaaactaaagcacagaatatggaatagtggtaagccatctcaaaagatagtatggcaatgtagcaaatatattaaagaaggaaaagatgcctgtgaaggaacagttatagaggatgctcttattacagcacttaatataaaggaagaaacaattgtaaaggagtgtttagttgatggcaagaagtattacacatataccagcaaggcagactgtagtaacaacgacgtccgtatcagactaacgcttatccattcatagtaaagtttttggatggaacagaattagaatgtttgatggagagctgatcagggaattaccttggtttgctctttttatatttgctacaatttgtggtatactaaggtcactataaattgtacataagaggatgaacggttatggaaagactaagaggtgtagtagaacgaattacctatgctaatgaagaaactggatatagtgttattaagataaaatgtaagggatacatggaccttgtaactgttgtaggaagcatggcaactgttaatgtgggttcagttattactataaggaatcgtcgactgcacgatcaaacatcgatcgaagctggtgttgctaatgaggaaga

SEQ ID NO: 1637 - DNA, 966 bp, unidentified
  source 1..966: mol_type = unassigned DNA; note = Bacteriophage uvig_254024 from the Index of /pub/databases/metagenomics/genome_sets/gut_phage_database (ebi.ac.uk)
aagaaaaaacgcaaggtggagggagctgataagcgcaccgccgatggttccgagttcgaaagccccaagaagaagaggaaagtctagttctgcagagggtgatgccattcgacgaacttgtttattgcagcttataatggttacaaataaagcaatagcatcacaaatttcacaaataaagcatttttttcactgcattctagttgtggtttgtccaaactcatcaatgtatcttagtaccgcattcatttcagtgagagcttactcatcagagttcggggcaaatctcgtttcgttcgttaaaagtggcggcgctgatttggtggttgcctatagtccgtcgcggatcggcgcatgccatgaagagttcgaagagcgcaagaattttctcgaaagcgcaggcgttacgcttcatttgatatgtcccgaatagaagaaagtcccccggccaattcttggcagaaaccgggggacgcgccatccgaccagaaaggttttgtaagtcagaaaggcaggtcttattctatcatgtcatcaatgctgagggcggccatatacgcccgtttttcaagcgataagacgtccgtatcagactaacgcttatccatataggcttgaacatgggttcggtctacttctaacgatcaaaaaagcggcttgagcagcaaatagttctgttgactatttcttataggcaaatggctttccttggtagtacaaggcgacccatccgctgggaatttttccccaccaatcggagccgaccttcttaacttccgtaacggttacaacggttccgctgtttagctctcccgcattgtttgaattctttttgccgtcggcggttagctggtttttcgccttaatggcgtagctcttgcctgggccggttctgacgcggagattatggaatcgtcgactgcacgatcaaacatcgatcgaagctattggtcaggtcaccgaaga

SEQ ID NO: 1638 - DNA, 966 bp, unidentified
  source 1..966: mol_type = unassigned DNA; note = Bacteriophage uvig_182389 from the Index of /pub/databases/metagenomics/genome_sets/gut_phage_database (ebi.ac.uk)
aagaaaaaacgcaaggtggagggagctgataagcgcaccgccgatggttccgagttcgaaagccccaagaagaagaggaaagtctagttctgcagagggtgatgccattcgacgaacttgtttattgcagcttataatggttacaaataaagcaatagcatcacaaatttcacaaataaagcatttttttcactgcattctagttgtggtttgtccaaactcatcaatgtatcttagtaccgcattcatttcagtgagagcttactcatcagagttcggggataccagcaagccaaccttggagattcacttgaaagattttcaaaactgaccataacagacaacatcatgccgcagattcctctgtgccgatatcgctcagcagcgcctgaagacgagcatccggcatggtgtatcgctgtgacagatagcgcagcgccgcagccatctctccatccggaccgcccagctgtgagatgatcaccgctgctgccttcgcgtccggacatgtgatgttcaccggaaactgcagcttcttctcatagatccacatcagcattcctcctttgtccatgggagacgtccgtatcagactaacgcttatccataattcaaatgaaaatagatggcgatacatggtctgttacttatttcgagtttgacggtgaagtagttcaaggaacttatcaataattaaaaccgccccacggcaatggagcggttctgaagagcagcacggcaatgctgcgtaggttagaaaaagatttatccaccacgataatgctttttctatacccaattctatcaaattcacaaacttttctcaagtatgcataaatttgaatggagggtattactatgaaagctgaagaagtactcatctacttaagaaaatccagatcagacagggaatcgtcgactgcacgatcaaacatcgatcgaagctgcgctgtctagtattgaaga

SEQ ID NO: 1639 - DNA, 966 bp, unidentified
  source 1..966: mol_type = unassigned DNA; note = Bacteriophage uvig_102394 from the Index of /pub/databases/metagenomics/genome_sets/gut_phage_database (ebi.ac.uk)
aagaaaaaacgcaaggtggagggagctgataagcgcaccgccgatggttccgagttcgaaagccccaagaagaagaggaaagtctagttctgcagagggtgatgccattcgacgaacttgtttattgcagcttataatggttacaaataaagcaatagcatcacaaatttcacaaataaagcatttttttcactgcattctagttgtggtttgtccaaactcatcaatgtatcttagtaccgcattcatttcagtgagagcttactcatcagagttcgcacagaggataccccgtggctaaaggagaatcttatgaatccaaacattgattttttaggcatctgccagctcctgaaggcgctccgaacggtcgggttttctgagattgaaatcaaaaagatcgcgcggcggatcgctgtcgagcttggtgcaaatttcacactttacgcttgatttttctccgttttgttcatagctattctgaaaatattgtagtagtgtgtgttgctgcagagggaggtgaacggcatggcaaagaagcagaccaacggaaatcttgcgctggaacagcagcgcgtgacgtccgtatcagactaacgcttatccatggctgaaaaacggcttggagctgctagagcaaatcgaaaggacaagacgctgatgggaaatcggaagctgccgttcggctatcagatgcgcatgggcgaaatcatccggaatgagccggaagcaaaagctgtgcaggacatcttcctacaatatacgctcggcgcgtcgctcaaagagattgcagagcagatgggaaaaaacggccccacctatgacgagggcaagagctggaacaagaacatgatcgcacgaatcttggaaaacaccaagtacactggggcagacagctatccgagattggaatcgtcgactgcacgatcaaacatcgatcgaagctgtccagctatgagagcaaga

SEQ ID NO: 1640 - DNA, 966 bp, unidentified
  source 1..966: mol_type = unassigned DNA; note = Bacteriophage uvig_585001 from the Index of /pub/databases/metagenomics/genome_sets/gut_phage_database (ebi.ac.uk)
aagaaaaaacgcaaggtggagggagctgataagcgcaccgccgatggttccgagttcgaaagccccaagaagaagaggaaagtctagttctgcagagggtgatgccattcgacgaacttgtttattgcagcttataatggttacaaataaagcaatagcatcacaaatttcacaaataaagcatttttttcactgcattctagttgtggtttgtccaaactcatcaatgtatcttagtaccgcattcatttcagtgagagcttactcatcagagttcgtcaaatctattgtcgtctacgaagatggcagtatggacattaattttttatgattttttatttatactaactatacctaaccatttggttatcaatagttagtataaatgttgttttgtgcattttgcctttttctttgctgtgatctgtgtctgatcgtagccgtctcgttgtcaatttgcacaaaaggcaacgactttcccggtcgctgccttcttttaaattattccatttcttttatgattgttttttctctttctgataattcatatcttctcaccgttttcttctctgctgctggacgtccgtatcagactaacgcttatccatccgtaccaggtaactgtcgccgaagctgaacggcttggatatggtagatgcaagaagtgttatagataatagtttattgtagcaaaagaaaaacgcccggtttcccgaacgtttctcctttacctgctatgcagcacacgccgcatagaatagtccatcgcaacttctattctatcacaaaaagcgtgctgctgcatagctttattttttatactcttttttaacattttgatagaaagaaggttctattatgaatagttcatatttccgttcacagccggaactgtacggcttgcgtgtggaatcgtcgactgcacgatcaaacatcgatcgaagctgacatacagcttaggcaaga

SEQ ID NO: 1641 - DNA, 966 bp, unidentified
  source 1..966: mol_type = unassigned DNA; note = Bacteriophage uvig_255241 from the Index of /pub/databases/metagenomics/genome_sets/gut_phage_database (ebi.ac.uk)
aagaaaaaacgcaaggtggagggagctgataagcgcaccgccgatggttccgagttcgaaagccccaagaagaagaggaaagtctagttctgcagagggtgatgccattcgacgaacttgtttattgcagcttataatggttacaaataaagcaatagcatcacaaatttcacaaataaagcatttttttcactgcattctagttgtggtttgtccaaactcatcaatgtatcttagtaccgcattcatttcagtgagagcttactcatcagagttcgtcaaacaagttcgtacatccccccttctcccgcaccacaaaaagcgacgctgattcgttgaaaatcagcgtcgcttttattcttgtaacccactcgccttgcaaatgcaaacacccctgaaaatcatatatctttcgggagtatttgcatcccaactttttcccagactataagcagatattgctagagataacacttcttctgtccggatgcgtcaagcatccggacttttttcgttatcgcccggcacgaattccaacaaatcggcaggctgacaatccaggacagaacaaagcttatgacgtccgtatcagactaacgcttatccatgcggctgctacctgtgcaataatgattcacacattccagcccgaacgctgcgcaacattatggcgattcttgaagctcgaagccgtgagatcatcgccaaatggaccgcttattttggccaggcgcatttctactgctaaacaaaaaacgcccgccgggcgcatcggtgggcatgggaagatagcgtattcagccgatattcagtattatggcacaatactacctttccgtaaatacaagggaggctcttatggcaaaaaagaaaaagtcccttgggggcaacgccatcgtctatgcccgggaatcgtcgactgcacgatcaaacatcgatcgaagctcgaccaggaagataataaga

SEQ ID NO: 1642 - DNA, 966 bp, unidentified
  source 1..966: mol_type = unassigned DNA; note = Bacteriophage uvig_376366 from the Index of /pub/databases/metagenomics/genome_sets/gut_phage_database (ebi.ac.uk)
aagaaaaaacgcaaggtggagggagctgataagcgcaccgccgatggttccgagttcgaaagccccaagaagaagaggaaagtctagttctgcagagggtgatgccattcgacgaacttgtttattgcagcttataatggttacaaataaagcaatagcatcacaaatttcacaaataaagcatttttttcactgcattctagttgtggtttgtccaaactcatcaatgtatcttagtaccgcattcatttcagtgagagcttactcatcagagttcggtttaagtgaaagtaagccaacgcttgctagattaatctcccttgtagcatgatttcagcatagatgacatgaaagaaacatgagtttttgtggtgattgtggtctttgctttagctaacatgaattattgtgatttctaaaacacccacctcatctgctccatagaacgctaaaagccgagaaacatcggcttttttttcgctttctgaaagttggccaacatcttgaccaacaaatttcaggagcagatgagggaacccgattgcgccatggcaggctttcagctacatgcataaccggacgtccgtatcagactaacgcttatccattccaaggaaattgtagagtatcttttcatggaaccaagtgaaccagtattgtcggaaatacaaaaacttccaccattgaaaggtgaagtttcattccgacaggctctgtttacacgtaaacgattaaaagaaacaaaaggacaatccttagtgatttctaagttccattggatgttggatgggatgacagttacagatgagtgtttaaaacaatttgttcattttttaatacgactaaggagtgagagttatgaaaaagagtaatgaattacctaaatcaattatatatagtagatattcggaatcgtcgactgcacgatcaaacatcgatcgaagctaggatccgagctagataaga

SEQ ID NO: 1643 - DNA, 966 bp, unidentified
  source 1..966: mol_type = unassigned DNA; note = Bacteriophage uvig_6107 from the Index of /pub/databases/metagenomics/genome_sets/gut_phage_database (ebi.ac.uk)
aagaaaaaacgcaaggtggagggagctgataagcgcaccgccgatggttccgagttcgaaagccccaagaagaagaggaaagtctagttctgcagagggtgatgccattcgacgaacttgtttattgcagcttataatggttacaaataaagcaatagcatcacaaatttcacaaataaagcatttttttcactgcattctagttgtggtttgtccaaactcatcaatgtatcttagtaccgcattcatttcagtgagagcttactcatcagagttcgcatgcttaaatattatcatttgtcctctggtctgtctgccggtaatatattccattttctcgccacttgaccgtttccgttttttcttctataatgcaaataaaaaaaatgcccctggcgaaccaggggcttatatgtagcatttttacgaaagatgatactacatatcggctttattagtgtatcatcaatcgggtgctgtgtcaattattactgcgctcttttttgcgctcttttggaggtacagactatgaaaaaagaacttattaacggtgttatttatgctagatattctcctgggacgtccgtatcagactaacgcttatccatccttaaatagcgtgattgagggtgttcgactgcattcacgcacagtggactagacgggagtcgaacccgtgtccaaaaaccaatcccctgtccttctacgagcgtagttcataatttgacattccctctgcaattccggtatgaacaccgtaactgtttcagtagcttcatcatacgcccacgggttcaaagctttgcccgtgtcgtttctcacatagtcgaagcctgggtcctaaagtgtgagtgctctaggtcagactgctgccattaggcagcgtaagctaatttattatcgttagcggaatcgtcgactgcacgatcaaacatcgatcgaagcttaggcagtcctgtcttaaga

SEQ ID NO: 1644 - DNA, 966 bp, unidentified
  source 1..966: mol_type = unassigned DNA; note = Bacteriophage uvig_368726 from the Index of /pub/databases/metagenomics/genome_sets/gut_phage_database (ebi.ac.uk)
aagaaaaaacgcaaggtggagggagctgataagcgcaccgccgatggttccgagttcgaaagccccaagaagaagaggaaagtctagttctgcagagggtgatgccattcgacgaacttgtttattgcagcttataatggttacaaataaagcaatagcatcacaaatttcacaaataaagcatttttttcactgcattctagttgtggtttgtccaaactcatcaatgtatcttagtaccgcattcatttcagtgagagcttactcatcagagttcgatatgttataaaaataacttacaccgaaaacggcggcagcttgaacgagagattggaaagctatttaagggcgtttgtataaagaataaaatgagaagcttaacaaataagacagaaaaataaaaaaagtctggacgcggaataagctgttgtgctataatgggtacggactgaattaagcataataaaaacataaccttctgattgttaggactctctgacaggattctgcaattaggaggtttttattatgcaaacatattacgcagatgaatatttaaggctgtccgtagcggacgggacgtccgtatcagactaacgcttatccatctaaaaaaatgaacggtcccgatggcaaagctttgttggaggaggcgatttaaaatggcaggacgggtttcacgcagacaacagattttcaacagaaacaataatgtggcagaagaaaagaaagctataaagattatattccacgcaggattgtataggcggctttcgcttttggacggcggatacggaaaggaaagtgaaagcttagaaaatcaggaaatgcttatccgtgattatcttttaaagcattccgaaatcgaacttgcggatatttataccgataacggcgaaacaggaacgggaatcgtcgactgcacgatcaaacatcgatcgaagctcaggagtggctccgaagaga

SEQ ID NO: 1645 - DNA, 966 bp, unidentified
  source 1..966: mol_type = unassigned DNA; note = Bacteriophage uvig_206729 from the Index of /pub/databases/metagenomics/genome_sets/gut_phage_database (ebi.ac.uk)
aagaaaaaacgcaaggtggagggagctgataagcgcaccgccgatggttccgagttcgaaagccccaagaagaagaggaaagtctagttctgcagagggtgatgccattcgacgaacttgtttattgcagcttataatggttacaaataaagcaatagcatcacaaatttcacaaataaagcatttttttcactgcattctagttgtggtttgtccaaactcatcaatgtatcttagtaccgcattcatttcagtgagagcttactcatcagagttcgtcgcagacgaggtaaaagatgtgtgttcctatgttagtgacaatacacgttgagacagtggcgttaatttgccgtaaataagcgggtttccgggattgaaactgtaaagttcagtggatttgccacccatttgccacccacaaaattaaaataacgaattaataaggaaaacggttgaactctctgaaccaactagagttgctcaaccgttttttgtatttattgaactgcctgttcaaaaatatcaacagcggtctgttgcataacttcggtattaaatgtatatgtacgaagtgttgtgacgtccgtatcagactaacgcttatccataaagtagatgagaaagagtagagagggaaaatgaatagtgcaaaattgttgagatacagtatgcagctgtcaatgttgaaacaattacgctcgttaaaacttataagtgaagcagagtatcagctggtagagaaaaaattaaaaaaagattatggtgttatttctaatattaccgcttgactattatagtgttgcgttgtaaaattatatcaacactacggtaggaacacaaaaagaaaggagcggtcaaatggaagttgaaatcattaaggcgaagggtgctggtgaggatacttctacggaatcgtcgactgcacgatcaaacatcgatcgaagcttatcctcgaaggctaagaga

SEQ ID NO: 1646 - DNA, 966 bp, unidentified
  source 1..966: mol_type = unassigned DNA; note = Bacteriophage uvig_539964 from the Index of /pub/databases/metagenomics/genome_sets/gut_phage_database (ebi.ac.uk)
aagaaaaaacgcaaggtggagggagctgataagcgcaccgccgatggttccgagttcgaaagccccaagaagaagaggaaagtctagttctgcagagggtgatgccattcgacgaacttgtttattgcagcttataatggttacaaataaagcaatagcatcacaaatttcacaaataaagcatttttttcactgcattctagttgtggtttgtccaaactcatcaatgtatcttagtaccgcattcatttcagtgagagcttactcatcagagttcgtcatttatgacaaagaaaaaaactctttagccttccatctataccgttcctaaattggtgactgtctgaaaacccagtatttatgcgggtttcagcgtgttgtagggtaccgtgataagggggccccgacggcgaaattggtgcttcgatgcgctatctatcacagcgtttcgccatgccaaaccgtactgcaatggcagttttaaacgatgtcggcacagaagagctagctcatttagagatggtgtccactatggtccatcagctcacaagagatctcagcatggaagaaatcgagaagacgtccgtatcagactaacgcttatccatcagcgcaataaaagatattgttttgttgaatacgttaatatcttgaatcgtggcaccgaattataactcaaaaatactaaaaccgccccagtgcgccaacaccggagcggccacatatccgaggatatgcaagtactttgatcggtaatattgtatcatcttcggagcagcttcgcaatcctgaacgattgttcggctgttattttcgtacttatttttacataagttcaataaataaggagatgatcttatgccttttgaagactatattgacggggccgcatatacccgtgtaagctcggaatcgtcgactgcacgatcaaacatcgatcgaagcttaggagattcaactgagaga

SEQ ID NO: 1647 - DNA, 966 bp, unidentified
  source 1..966: mol_type = unassigned DNA; note = Bacteriophage uvig_70532 from the Index of /pub/databases/metagenomics/genome_sets/gut_phage_database (ebi.ac.uk)
aagaaaaaacgcaaggtggagggagctgataagcgcaccgccgatggttccgagttcgaaagccccaagaagaagaggaaagtctagttctgcagagggtgatgccattcgacgaacttgtttattgcagcttataatggttacaaataaagcaatagcatcacaaatttcacaaataaagcatttttttcactgcattctagttgtggtttgtccaaactcatcaatgtatcttagtaccgcattcatttcagtgagagcttactcatcagagttcgaccttgacgattatttacctgaatcccgaatgactaataacgatatggtatagaaacaaagggtatgattttacgatcacttcatctacagcattcgatcataagtggataccggaaagaaatgtatatgaaagcatttccgtgatcgtagatgaattgtttgcaaattatctttcaagaccgaacgtgcggcagccgatattgacacagtattgtgacgggaaaatggtgagctgtccgaattggttgacctttttgttataacctacaaaactgcgaaaacccttgattttactgggagacgtccgtatcagactaacgcttatccattatagtaaaaatgtacttaatacggagcaagatatgtcagacaactattgtagattggaaatagaaaaagaaggagtacagataatattggaatatcctcaacctactgacaaagactatatggttaaacaagagatacaaaagaatttagaaagtatgctcaaggagcaaattaaacaaatatcttaatatatcggagagaactttatctctccgatgtaatttctttacgaaaggaatactaaaaattatgaaagcgaaaatagttagaatgttattaagagtaagttcagaccaacaggaatcgtcgactgcacgatcaaacatcgatcgaagctttgtccgcagccagcagaga

SEQ ID NO: 1648 - DNA, 966 bp, unidentified
  source 1..966: mol_type = unassigned DNA; note = Bacteriophage uvig_418756 from the Index of /pub/databases/metagenomics/genome_sets/gut_phage_database (ebi.ac.uk)
aagaaaaaacgcaaggtggagggagctgataagcgcaccgccgatggttccgagttcgaaagccccaagaagaagaggaaagtctagttctgcagagggtgatgccattcgacgaacttgtttattgcagcttataatggttacaaataaagcaatagcatcacaaatttcacaaataaagcatttttttcactgcattctagttgtggtttgtccaaactcatcaatgtatcttagtaccgcattcatttcagtgagagcttactcatcagagttcggtcgcttccggctctattatcctcgagcggagcaaacccacctttccgcttagtataggatcttgctataggatcttgccatgtttgacggtaaaatgacgaaaggtcaacttttgcatatgctaaagaagctatgcgaacttgccggaaggcgcgaggaagggataggggaaaatggaaaagttctgttccgcttggtggcgtatttcgccaaagagggcaatggccgagccgaacggagaagagaataagcagcttgttcctgaatcctacgaatccttcgataaggccggaaatggcgacgtccgtatcagactaacgcttatccataccgacgcttcgcaaagctacgttcgtgatggcgaagagtgcatggggtaccgcgttgccgtttcggccacagcaaccgaagaacagctcttgagcgtgttcgaggaagtagtcgcgggcgacggatacccgatgcacaccgtttggttctacagcaacgtcgataaggctcaaggtggcgaccaatacgacgttgccatggtcgaggaggaaagcgccggcggcgatcccgtcgtgacgatggcgtagcatggcgaagcgggcgaaacgttctgctccaaagaagggcgctcgtgccgcggaatcgtcgactgcacgatcaaacatcgatcgaagcttgttgccacatggtaggaga

SEQ ID NO: 1649 - DNA, 966 bp, unidentified
  source 1..966: mol_type = unassigned DNA; note = Bacteriophage uvig_187460 from the Index of /pub/databases/metagenomics/genome_sets/gut_phage_database (ebi.ac.uk)
aagaaaaaacgcaaggtggagggagctgataagcgcaccgccgatggttccgagttcgaaagccccaagaagaagaggaaagtctagttctgcagagggtgatgccattcgacgaacttgtttattgcagcttataatggttacaaataaagcaatagcatcacaaatttcacaaataaagcatttttttcactgcattctagttgtggtttgtccaaactcatcaatgtatcttagtaccgcattcatttcagtgagagcttactcatcagagttcgaagagatccagaataacatggaaattttattaaagcatcaggttggatatgaaaaaaattttcacacagaggaagaatgggaaacattgatcaataaataccgcaatacgagaacgctgacaaaggaaatggtcaatgcttttgtagaaaaaatcgaaatacatgaaagcggttctattacggtacgtttggtgtatgatgatatgttggaagaattaagaaaatatgcaaaagaacgggaggctgagttatgccagtaacagaatgtatcgctgtttatatcagactttcgtcggaggagacgtccgtatcagactaacgcttatccattggagataagctggaagatggatgacattttctacaaagaagaaaaagcataaacggaataagattgttcgcaggagcatcactggatgaaaacagtggtgctttttgcgaattaaaagcaaattttttttagacttatattgacaaaagcagaactgattggattgacttgggaagatgtagatgtcagaacaaaagtggtaagtattgaccatcagttgatttataaagatttaggagatggctataaattccatatttccacgccaaagacggattctggaatccgaactatccctaggaatcgtcgactgcacgatcaaacatcgatcgaagcttcgtctctgtgcaatggaga

SEQ ID NO: 1650 - DNA, 966 bp, unidentified
  source 1..966: mol_type = unassigned DNA; note = Bacteriophage uvig_441829 from the Index of /pub/databases/metagenomics/genome_sets/gut_phage_database (ebi.ac.uk)
aagaaaaaacgcaaggtggagggagctgataagcgcaccgccgatggttccgagttcgaaagccccaagaagaagaggaaagtctagttctgcagagggtgatgccattcgacgaacttgtttattgcagcttataatggttacaaataaagcaatagcatcacaaatttcacaaataaagcatttttttcactgcattctagttgtggtttgtccaaactcatcaatgtatcttagtaccgcattcatttcagtgagagcttactcatcagagttcgacgaatcgggtagtgatatcgagcctgaactatgctttaaactcttaatttaatccgtctgcaagcatcgcgtatctgatttatcggacactcaatgcttacagacaataataatggcggatagtcgaatggctacccgccttttattatggtcagcttacccgcttccacatgaaaacagccaagtacggaggcatattattgtggggcttcccgccgcccgcgaacatggtctgcacgttcccgccgtaacctttcttatcttgcgcggaaaccgtcatataaggcgttgcattgcccgacgtccgtatcagactaacgcttatccatggcggctgactgcggaataagcccaagcgcggtgaattcatggtttaaccgcagtgcagaaaacatcagtctgaaaactttaaaaaagctatctgagtacttcggcgtgagcatggaagagctggtgcatggcaaaacaccgaagcacgatcttgtgttctcaagcgacacatatacggaggaagaactcgcgcagattaagcaattcgcgcactttttaatagggcaacgacgaaaggacagatgatgaatgacatacgcaatttatttacgaaaatcacgaaaagatgacgaaacgggggaatcgtcgactgcacgatcaaacatcgatcgaagctcggagagttacctactgaga

SEQ ID NO: 1651 - DNA, 966 bp, unidentified
  source 1..966: mol_type = unassigned DNA; note = Bacteriophage uvig_517008 from the Index of /pub/databases/metagenomics/genome_sets/gut_phage_database (ebi.ac.uk)
aagaaaaaacgcaaggtggagggagctgataagcgcaccgccgatggttccgagttcgaaagccccaagaagaagaggaaagtctagttctgcagagggtgatgccattcgacgaacttgtttattgcagcttataatggttacaaataaagcaatagcatcacaaatttcacaaataaagcatttttttcactgcattctagttgtggtttgtccaaactcatcaatgtatcttagtaccgcattcatttcagtgagagcttactcatcagagttcgagaatattcgggaaatggaagaaagggaaggtagatttaaatgcggtgcgtaagttatacaaggactacatcgtgcaaaaatacaaagaatattccatcagatattatccaacagcagaatgagcatattcagaactatatacaatcacatggttggaagctggtagcaaaatacagtgatcggaaaaaagatgcaaacgaaaatacagcttttgaagaaatgacagcggatggaattaaccgtaaatttgatatggtggtagtagatagtgttgaccgttgtggaaaatatatttcctggacgtccgtatcagactaacgcttatccatggagtagtggtaaaaataagttttaatggaaaatgtacactggaagaaagcctgagcaggtgtatttcgttatgaaaatgaagaaaaacaggatggaaagaaatttaaaaaagaatgaaaaaaggtatagcagtgagccagaagttatgttaatatggtgttgggtcaaaatttaaaagcattcaagaagccatgaatttcttggtttacactgccggacggcatagtaaattaggaggttgatggctttatgtatttcaatcaaaagtctatattagcagcggactatctaagactctcggaatcgtcgactgcacgatcaaacatcgatcgaagctacgagttcaggactaacaga

SEQ ID NO: 1652 - DNA, 966 bp, unidentified
  source 1..966: mol_type = unassigned DNA; note = Bacteriophage uvig_368153 from the Index of /pub/databases/metagenomics/genome_sets/gut_phage_database (ebi.ac.uk)
aagaaaaaacgcaaggtggagggagctgataagcgcaccgccgatggttccgagttcgaaagccccaagaagaagaggaaagtctagttctgcagagggtgatgccattcgacgaacttgtttattgcagcttataatggttacaaataaagcaatagcatcacaaatttcacaaataaagcatttttttcactgcattctagttgtggtttgtccaaactcatcaatgtatcttagtaccgcattcatttcagtgagagcttactcatcagagttcgatatccgcaaacgataaagtaattgcaaattatcttaaattgttacggcagcgcaaaaattttatcatcgcacttttgattataattttactgctgattttgggcggcgcgggactgttcatctatgacagacttaatccgcatgtcgggtggtttagatatgccgccgcgtcgtttttaacaactcttgatatattgtgaggtttatatggcatttgcaaaaccaaaaacggtaccggaggaaaatttgatgaatgcggtcatctacgcccgctactcatcaaccaaccaaacggagaagacgtccgtatcagactaacgcttatccatttatttatcacaagcattgttttggagcgatcataaaaataagacgggagtaatcccgccttatttttttactcgtgatttgctatacatgcgtaatatttagccgttttgtttttttgcgcatctgcgtcgcttaaaaaatcgtgtgcgagagaagcgtaaaaatccggtgtgttaacgccaaaatcacgcccggtattgtaatagtcgctatacatcatgtttatcaccgcataaaaatctgtcggatcgcacttgtatcctcgcgacttgcgcacttgctctgtatccgcaaaactcggaatcgtcgactgcacgatcaaacatcgatcgaagctaatcgatgtgcgagcacaga

SEQ ID NO: 1653 - DNA, 966 bp, unidentified
  source 1..966: mol_type = unassigned DNA; note = Bacteriophage uvig_310206 from the Index of /pub/databases/metagenomics/genome_sets/gut_phage_database (ebi.ac.uk)
aagaaaaaacgcaaggtggagggagctgataagcgcaccgccgatggttccgagttcgaaagccccaagaagaagaggaaagtctagttctgcagagggtgatgccattcgacgaacttgtttattgcagcttataatggttacaaataaagcaatagcatcacaaatttcacaaataaagcatttttttcactgcattctagttgtggtttgtccaaactcatcaatgtatcttagtaccgcattcatttcagtgagagcttactcatcagagttcggactctatggcgggctggaactgagggagcgattggaggtggcggtaagatgacaaaacgcaagattttatatggataccagatctgtggcggcgcattggagatcgttccggaagagcagcgggtcgttcagatgctgttcgccctctacagtgccagagcatcttaccaggacatctccgatgcgttgaatcggcagggcgttccatacagctccgaaataccgctttggaacaagcataagataaagcgcatgttggaaaatgcccgttacaccggaaaagatggttatcctgtgatgacgtccgtatcagactaacgcttatccatacagtgtggaataccagtattatttgagacaaatttactgcaaagacggttctgtttggatcgacatccttgaggcggcgcaggcggaaaagctggggtatcaggacggtgacaagtacacgcagaatgacggcgttgtttacatcaacgggtttgacagcccgtctgccctgaacacctttatcgaagacctgcatggctgcgtgaaccgcagcgaagcgatggctgcccaccagcgggaggaacgctgatggctacggtaaaagagattgcgccacacgcactccaaccggaacacctggaatcgtcgactgcacgatcaaacatcgatcgaagctcacacatcagacttagcaga

SEQ ID NO: 1654 - DNA, 966 bp, unidentified
  source 1..966: mol_type = unassigned DNA; note = Bacteriophage uvig_541528 from the Index of /pub/databases/metagenomics/genome_sets/gut_phage_database (ebi.ac.uk)
aagaaaaaacgcaaggtggagggagctgataagcgcaccgccgatggttccgagttcgaaagccccaagaagaagaggaaagtctagttctgcagagggtgatgccattcgacgaacttgtttattgcagcttataatggttacaaataaagcaatagcatcacaaatttcacaaataaagcatttttttcactgcattctagttgtggtttgtccaaactcatcaatgtatcttagtaccgcattcatttcagtgagagcttactcatcagagttcgatggacgatttcatgcttagataatccagatttcacaagcattgaaattatttatgacgaaacgcagcaatatataagatccgacaatagcagagatagatatgattatgaaaatctaaaactcacgattgagcagaatgtagattcagaagaagcttaaacgaaaagatccccacgttaacaagcaccaccaagaacgtgaggatcaggagaaaaaccttccgcaaacgaaaggcagtgttattctatcatgacgcactctaacgatgggttatttgccctatatcttcgtagatcacggacgtccgtatcagactaacgcttatccataaagaaacgaccattcaccaggtaaaataaagcttacgataatacttaaatagtatagtatgccatcatcgcactacttacaccttaccgttaattacttctttagttggatcgatgagcgcataacttccattaggtatttttctgttcatgctttccccgtttactttaagaagaaaagcgtttggatacctttcatgcatgatgctaggaataacaaaagtttcatcgttttctatcatttcgataggtgttcccgctgcaatcgatccatagaggggaacttctacgaaagctgtgggaatcgtcgactgcacgatcaaacatcgatcgaagctagcaggaggaactccgcaga

SEQ ID NO: 1655 - DNA, 966 bp, unidentified
  source 1..966: mol_type = unassigned DNA; note = Bacteriophage uvig_539021 from the Index of /pub/databases/metagenomics/genome_sets/gut_phage_database (ebi.ac.uk)
aagaaaaaacgcaaggtggagggagctgataagcgcaccgccgatggttccgagttcgaaagccccaagaagaagaggaaagtctagttctgcagagggtgatgccattcgacgaacttgtttattgcagcttataatggttacaaataaagcaatagcatcacaaatttcacaaataaagcatttttttcactgcattctagttgtggtttgtccaaactcatcaatgtatcttagtaccgcattcatttcagtgagagcttactcatcagagttcggtcagaacggcggtatggaccagtttacgcttaaattgtttccacgtctttaattttttccctttacgtatagagattgtgtacgcattcctccgtaccaatgtcggtcagggttcccttgcactctttatatggcatggcgtagcgctgggaaagataacgcatggaggcgcccatttcgccatccggcccgccggatgtcaataacatatgattagattaagcccctggaatcatggttccggaggcttttctggttttattatagcatggcattaaggcaatgtcagtatgttttttgacgtccgtatcagactaacgcttatccatgttcacacaggaagaggcagcttatgctatcgagaaccttgattaaacagccttaacggcaacatgtaagcaacaacaaaagccgtgcagtgcctcagcacagaacggctttcacgtagattctctcttgccggacgctccggaagatataatctgtctcgcaaactaattatatcatttctggtacgtccttggcaaggggcgtatttttgtaccttttatttcataccatatttaaggagatgatattatgttggacccgaatgggatttattttgcttatcttagaaagtcgcgtgaggaatcgtcgactgcacgatcaaacatcgatcgaagcttctacgctaacacggccaga

SEQ ID NO: 1656 - DNA, 966 bp, unidentified
  source 1..966: mol_type = unassigned DNA; note = Bacteriophage uvig_467692 from the Index of /pub/databases/metagenomics/genome_sets/gut_phage_database (ebi.ac.uk)
aagaaaaaacgcaaggtggagggagctgataagcgcaccgccgatggttccgagttcgaaagccccaagaagaagaggaaagtctagttctgcagagggtgatgccattcgacgaacttgtttattgcagcttataatggttacaaataaagcaatagcatcacaaatttcacaaataaagcatttttttcactgcattctagttgtggtttgtccaaactcatcaatgtatcttagtaccgcattcatttcagtgagagcttactcatcagagttcgcaatagaaaaaatatcggattgttcgtataagcgctgttatggttcaccataagcatagctcgcatttggcttaacaaagccttttgtgggcttttctttttgcccaaaaaccgccgttgggtcttattggggtattatttttttcaagcccctcttttcttgaaatccagcacctccgcaacagcattgcaagccttgacttggttctctcggaacatatgcccgtatatgttcagcgaggtgctcacctgcgaatgtccgaggattcccgaaacggttgtcgggtcaatgcctgcaccgacgtccgtatcagactaacgcttatccatggacaattcattgtttcttgatagagaaggctatatttctatcgaggaggtaaaaagactatgttttgacattgattttggaacaaaagtgctaaaaaagaaaggtgcaaattatcatatagctattagcagcattctcagcgcatatcaaagaataagaaagctatgcggatatacagatcccataagaataaattggagtttttctttatcgctcgatcaagtccttccagattatgaggggtaatatatggcgcgtaaaacagataaaccattgtcaaatattgcagttatatacgcggaatcgtcgactgcacgatcaaacatcgatcgaagctgttggatggctatcgccaga

SEQ ID NO: 1657 - DNA, 966 bp, unidentified
  source 1..966: mol_type = unassigned DNA; note = Bacteriophage uvig_188069 from the Index of /pub/databases/metagenomics/genome_sets/gut_phage_database (ebi.ac.uk)
aagaaaaaacgcaaggtggagggagctgataagcgcaccgccgatggttccgagttcgaaagccccaagaagaagaggaaagtctagttctgcagagggtgatgccattcgacgaacttgtttattgcagcttataatggttacaaataaagcaatagcatcacaaatttcacaaataaagcatttttttcactgcattctagttgtggtttgtccaaactcatcaatgtatcttagtaccgcattcatttcagtgagagcttactcatcagagttcgaatatttacattataaagatggcgacaggtggtatgccggagatggtatttgagtatatcctccgccagaatggcattgaccctgccaaagatttagagatcatacaatatattctttttcatcctcccctcattgcgaagggaggatatttttataccaatctaagctcaatcgcttcgattttcttgttcatgccgaccgttccgatcatgccggacgtccaacgagtccaaccaatatcttgaatatgcactctagtctgcagcttcttaccatttaatccatcggcaatcaactcagacgtccgtatcagactaacgcttatccattattcaacaatagttaaaaataaaactagaagtatttaaaactatttttgatagatttagatttaagatttcgaaaaggagaaaaaagaacatgacaattcttgctgtgaatggttttggtgtagaaatagcaagtaatccttacttttttgtttgaaaaatcatgtgacattttatttacgaaaagaattattcgatatataattatattacattattctataaataatatttcagaaaggatgaggacatgaatgctggatatgtgcgtctttcaagagatgacgataagcgaaattaggaatcgtcgactgcacgatcaaacatcgatcgaagcttgtctctcagtgcgatcaga

SEQ ID NO: 1658 - DNA, 966 bp, unidentified
  source 1..966: mol_type = unassigned DNA; note = Bacteriophage uvig_138780 from the Index of /pub/databases/metagenomics/genome_sets/gut_phage_database (ebi.ac.uk)
aagaaaaaacgcaaggtggagggagctgataagcgcaccgccgatggttccgagttcgaaagccccaagaagaagaggaaagtctagttctgcagagggtgatgccattcgacgaacttgtttattgcagcttataatggttacaaataaagcaatagcatcacaaatttcacaaataaagcatttttttcactgcattctagttgtggtttgtccaaactcatcaatgtatcttagtaccgcattcatttcagtgagagcttactcatcagagttcgcccttgccaaaagttataactttttcaatactaattcaattttatcattcaaaacaaatgcagtcaaaattgactttttgcgttatattaaaaccaaaaatttctccaagcctcttgaaacatatgttcgattatgtaataatatcctcatacatgataatacattagattatagaaaaatcttccttatagcatatgcctcattttccggctctcaccatctcacgctgtaagaaggaggagcattatcatggaactgatctaccttagaaagtcgcaggcagataacccgaatgaatcgacgtccgtatcagactaacgcttatccatacaactccaaagccaagcctgtgatccatctggaagtcactttacatctgtaattttaaaaatccctcacacctatatcatcaatgagcgtatgaactggctcatctcgaaattgttgcaacaatcatccgccagctcaccagaaacctgacaccggaagaaattaagtcatcgggctttgataaatactatgttgatcatacccttgcaatctggcctcaagcggcaggcggtattccattcaatgcctgtgagtttcagtcaaagggagatccggtcacggatcttcatgaagatctgggaatcgtcgactgcacgatcaaacatcgatcgaagctagatgtctcaaccgatcaga

SEQ ID NO: 1659 - DNA, 966 bp, unidentified
  source 1..966: mol_type = unassigned DNA; note = Bacteriophage uvig_588864 from the Index of /pub/databases/metagenomics/genome_sets/gut_phage_database (ebi.ac.uk)
aagaaaaaacgcaaggtggagggagctgataagcgcaccgccgatggttccgagttcgaaagccccaagaagaagaggaaagtctagttctgcagagggtgatgccattcgacgaacttgtttattgcagcttataatggttacaaataaagcaatagcatcacaaatttcacaaataaagcatttttttcactgcattctagttgtggtttgtccaaactcatcaatgtatcttagtaccgcattcatttcagtgagagcttactcatcagagttcggggacaaggcgcagaacctcctgaccatccactaccggctcatgctggaataaattttgcccataatcgtagtctgttaccatccggtggccctgacgtcaacagactacgaagcaagagcgtatatcactccaatctcgcttcatagcatttgacaaatcccgatgcctcgtctattctaatgccataaaggaggtatcgctatggattttgtcgatgtcgaatataccgaggtgcaggacgagcccatcacggacacatggtatacctgcccggcctgcggttgtctaaaccattccggacgtccgtatcagactaacgcttatccatcgtacctattcgcttatcaccgtctgttcgcttttgttctttgctgtagcctggtatctaatttgggactatcgcctcccaaatgcgggtctcattatcggtggcaacatatcgctcgccgcgtggcttattctgctgctggtcatcgcggccgcctgcgtcatgggccactgtctgcttcgtatgtcctcccggtataccaggcagtcccacaccggtttcatcggtcacgagccgggaggtgacgagcatgactgatttgaaaatcgccgcggcctatatccgcgtttccaccgatgaggaatcgtcgactgcacgatcaaacatcgatcgaagctccgtcatatccgaggtcaga

SEQ ID NO: 1660 - DNA, 966 bp, unidentified
  source 1..966: mol_type = unassigned DNA; note = Bacteriophage uvig_150649 from the Index of /pub/databases/metagenomics/genome_sets/gut_phage_database (ebi.ac.uk)
aagaaaaaacgcaaggtggagggagctgataagcgcaccgccgatggttccgagttcgaaagccccaagaagaagaggaaagtctagttctgcagagggtgatgccattcgacgaacttgtttattgcagcttataatggttacaaataaagcaatagcatcacaaatttcacaaataaagcatttttttcactgcattctagttgtggtttgtccaaactcatcaatgtatcttagtaccgcattcatttcagtgagagcttactcatcagagttcgtctgaaaataaaatagtgcagagcaaaaaatatcggatcggtcgcatgaactatattgtcaattcctgctttgaaattaagccacaaaacacggttgacaacggtatccgataccttctcggaatggaaatgcaggacggtaaggtttcttaaaaaatcgtctggacttttcaaccgattgagagtatattgaggttgcgggaactttccgcagctctcaatcggtttggctgaaaacaaggaggtaaacatgatacagtcgagccaaaaaataaccgctctgtactgccgactgtcccagacgtccgtatcagactaacgcttatccataacagcaaattgatatttatttccgttatatcggcaatacagccggattataacgaaaaaagccaacggacaggcaacgcataagcatcacctgtccgctggctccccgattaacaaaggtgtctttatgggaaccttgttaaatcaaggttttcaccattccagagcacaaatgtaccccaccacagagcgattctgcggcggggttttctgcgttttacagtttttacggcattttgagacgaagtaatcgttaaacttatgggtaaatcgttgaattttaagggtattcgttgaacgggaatcgtcgactgcacgatcaaacatcgatcgaagctatcctgacaacgaggataga

SEQ ID NO: 1661 - DNA, 966 bp, unidentified
  source 1..966: mol_type = unassigned DNA; note = Bacteriophage uvig_473313 from the Index of /pub/databases/metagenomics/genome_sets/gut_phage_database (ebi.ac.uk)
aagaaaaaacgcaaggtggagggagctgataagcgcaccgccgatggttccgagttcgaaagccccaagaagaagaggaaagtctagttctgcagagggtgatgccattcgacgaacttgtttattgcagcttataatggttacaaataaagcaatagcatcacaaatttcacaaataaagcatttttttcactgcattctagttgtggtttgtccaaactcatcaatgtatcttagtaccgcattcatttcagtgagagcttactcatcagagttcgagcagaagcactgccaacagtttgctccagagaatacagttgaaaattccggtcgtgtcgttgaagtttaccagaatccggtctatcacctcaaggttcaggtgccatgcggtgatactcggatagcagtacacatagacgtgtaccaccaaaagaaaaatactcacggcccttccgaattccatgcaaaaacacataaagatggtagtaattattcttacctttgcatcaaacaaataaaagtaagaatatgaaagcagcaatttacagtagagtatctacagaagggcaagattacaggacgtccgtatcagactaacgcttatccatttatagattttgtaaattatctagatattgaggaaaacagaagatactactaacaaagaaagtcctgttggcataataaactggcaggactttttttgtcttgtaaactttacctacctttgcaccaacttctaaagttcaaggagttgagcctcttagaagggacatagttaataagagcgtttgaaatattatccttaatctggaatctggacaattctaaaacacagggataatagacagtaatcgctcacgctgtgctatatatctacctagtgtagcttatataactgtatggcgggaatcgtcgactgcacgatcaaacatcgatcgaagctaatgcagcctacaacataga

SEQ ID NO: 1662 - DNA, 966 bp, unidentified
  source 1..966: mol_type = unassigned DNA; note = Bacteriophage uvig_192865 from the Index of /pub/databases/metagenomics/genome_sets/gut_phage_database (ebi.ac.uk)
aagaaaaaacgcaaggtggagggagctgataagcgcaccgccgatggttccgagttcgaaagccccaagaagaagaggaaagtctagttctgcagagggtgatgccattcgacgaacttgtttattgcagcttataatggttacaaataaagcaatagcatcacaaatttcacaaataaagcatttttttcactgcattctagttgtggtttgtccaaactcatcaatgtatcttagtaccgcattcatttcagtgagagcttactcatcagagttcgaatctgccggagaaaaaacacgggaaaggaataaacgccatgccgaaagctaaaaatgtcaccgtcatccccgccacgctgaatatccataccaaaacacctaccacggaacgggtacgccgccgggtagcggcttatgcccgtgtttccacggacagcgaagagcagctcacttcctatgaagcccaagtagactattacaccaagttcatccgggaaaatccggattgggacttcgtggaggtctataccgacgagggtatcagtgccgtcaacaccaaacaccgtgacggctttaacgacgtccgtatcagactaacgcttatccatcccgcctctgttacgccgacgcaagaagaactcattcggtatcggatcctctgcgcaatgctggatcacctcggccgagcgggggaactggacgcccaaacccgtgaacgggcaaatgccgttctcgccatgaagaccggcctgaaacgggacagcattttcctttaaattcgtcatgatatggacttgctatatcctccgaaacgagcaatatatgtagctgacgatacttgatacaaaggagaagaccatgccgagaaccgtagaacaaatccaatttactccccacatgccgaaagcggaatcgtcgactgcacgatcaaacatcgatcgaagctgtgatcgaatatcacgtaga

SEQ ID NO: 1663 - DNA, 966 bp, unidentified
  source 1..966: mol_type = unassigned DNA; note = Bacteriophage uvig_444213 from the Index of /pub/databases/metagenomics/genome_sets/gut_phage_database (ebi.ac.uk)
aagaaaaaacgcaaggtggagggagctgataagcgcaccgccgatggttccgagttcgaaagccccaagaagaagaggaaagtctagttctgcagagggtgatgccattcgacgaacttgtttattgcagcttataatggttacaaataaagcaatagcatcacaaatttcacaaataaagcatttttttcactgcattctagttgtggtttgtccaaactcatcaatgtatcttagtaccgcattcatttcagtgagagcttactcatcagagttcgtcggagtattcgaccactcaaaggtcactttgtggaaaggaaaagcggtatagtacgcaacatactataccgcaaaacctaaatcttaaaaacatccttaccaaaccctcacatttactgggcttgcgggtattttacctgtataggaaaaagtagattttaagagaatcgttcttgcgatcgtagataattttatcaatgatctgcttcagagcttcgttcttttgaatgtatgtataattgttggagatgagaatatcatacacactccggaccttctgcagcatggcatccgctggagacgtccgtatcagactaacgcttatccatcttatggaaaacacaaagaatcctgtccctgaaatgatacgggaataccagataggaaacacctgttatgtggtaaaatcccgctcaaaagaacaggcacaggaagacgcagtaacgaaagtaaaaaggcttatccgtaatgacttgaaacaataattttgctataaaacagggcagacagaaaacagaaaatgcggtacaataaagttgcaaaagcattgtctgtttgactgtcggataggaggtatttatgttacagcagtcaaacaacactatcacttccatttatccgattggaaaggaatcgtcgactgcacgatcaaacatcgatcgaagctagacctaccgacgttgtaga

SEQ ID NO: 1664 - DNA, 966 bp, unidentified
  source 1..966: mol_type = unassigned DNA; note = Bacteriophage uvig_223147 from the Index of /pub/databases/metagenomics/genome_sets/gut_phage_database (ebi.ac.uk)
aagaaaaaacgcaaggtggagggagctgataagcgcaccgccgatggttccgagttcgaaagccccaagaagaagaggaaagtctagttctgcagagggtgatgccattcgacgaacttgtttattgcagcttataatggttacaaataaagcaatagcatcacaaatttcacaaataaagcatttttttcactgcattctagttgtggtttgtccaaactcatcaatgtatcttagtaccgcattcatttcagtgagagcttactcatcagagttcggttattctgcttgcagtaaatgttggtaaaccatgttgccaacctcggcaatatggtcacaaaataaaaaaatcctcctgtattagcagtacagaaggattaaggaatagcggttatgtgaaaccactacaaagaacatatttagtatatcacatgaccgctttaatttctactcttttttgaaattaggtggtcttttttttatgcaataattttgccaataatggcagcatggtcaggaggaggaaaaatgtacaatcaaaatgaactaataatgtatttaagaaaatcaagagcagagacgtccgtatcagactaacgcttatccatagtcaaaatttgaaaacccaccatttaatgttgatattaagcttagactttaacttatatatacaacatcgatgtaccaattcataagcacattgatgttgtatattaaaacagcccccgaaggagctgttttttatttacacactatatattcataatatagtgatgttttatttttaactgcatctttatcatatatccaagcttctgtcatgtccgcccatgcgttcggtgtatcacctacaccgtatttttctaatgctgccgaataatcagaatacagcatattcattaccgcatggaatcgtcgactgcacgatcaaacatcgatcgaagctgaatcaacgatagcgctaga

SEQ ID NO: 1665 - DNA, 966 bp, unidentified
  source 1..966: mol_type = unassigned DNA; note = Bacteriophage uvig_80069 from the Index of /pub/databases/metagenomics/genome_sets/gut_phage_database (ebi.ac.uk)
aagaaaaaacgcaaggtggagggagctgataagcgcaccgccgatggttccgagttcgaaagccccaagaagaagaggaaagtctagttctgcagagggtgatgccattcgacgaacttgtttattgcagcttataatggttacaaataaagcaatagcatcacaaatttcacaaataaagcatttttttcactgcattctagttgtggtttgtccaaactcatcaatgtatcttagtaccgcattcatttcagtgagagcttactcatcagagttcgccctaaaaaacgggttggaactcagggagaaaatcgaaaggacgataaggtgatggcaaagaatcgaaaacgaccatttggatatgacatgcatggcggacaaaacgtcatcaatgagggcgaggcaaatctggtaaaagagatatttgctgcatataaaaacggcagctcgtatgccaaaatcgttgagatgctgaataaccagcccatcccgtatttcaaccaggatgcgccgtgggtcaagactatggtcgcacgaatcctgaacaatcttgtatatgtggggaacgatcaatatccgacgtccgtatcagactaacgcttatccattaatctgttggagctgctgaagacccaggggtttgccgaaaaagagctcagaaagatctcggcaaggatcgctgctcaaatcggcgccaacatcattatggcagacatcaggagtacagcttaagaacatgtaaattgagggtaatatgcccttgttccgccaaaaactttgttagatattctttagcttttaagatagctattaaggaaagggtgtggtattgtttgttgcgataggaggtgaacaagcatgggaaaaactatgaccgagggcagttctgctctgaaagaaaagcgggtggaatcgtcgactgcacgatcaaacatcgatcgaagctaacgcctcttacgcgctaga

SEQ ID NO: 1666 - DNA, 966 bp, unidentified
  source 1..966: mol_type = unassigned DNA; note = Bacteriophage uvig_594811 from the Index of /pub/databases/metagenomics/genome_sets/gut_phage_database (ebi.ac.uk)
aagaaaaaacgcaaggtggagggagctgataagcgcaccgccgatggttccgagttcgaaagccccaagaagaagaggaaagtctagttctgcagagggtgatgccattcgacgaacttgtttattgcagcttataatggttacaaataaagcaatagcatcacaaatttcacaaataaagcatttttttcactgcattctagttgtggtttgtccaaactcatcaatgtatcttagtaccgcattcatttcagtgagagcttactcatcagagttcgtggtggaccgtcggggactcgaaccccggaccttgggattaagagtcccctgcgtgctagtgcccactttaccgggcgtgcgggttcaaatcccgcctccgacaccagctatcaatttaaacgccttttgggcgtttttttatttcatttagtcacttcatttagcgaaatcttctaaacgcctcccctatgcggcttaaccgtgctgtatttaattgccaatgctctggtcgaacaacattaaagagcggcagcgatcatgcgagtgaatgcaactacattccgcggtaaacccgtaaggacgtccgtatcagactaacgcttatccatgctcgaatgcaccccgaatgacatcatgggatggaatgaggaagcaggaagcttcagctcagataaagagttggcaagcgacgagcgcgagttgataagcaattaccgcgaaggctcgcccgaatggcaaaaaaatatcgccatgacggcaaagcttgccgctggcgattcgaagcagtaataaaagaagccccgtaagcaccgaccaaagcacaacggggcgacaccaaaaaggcaaggtgataataccatggcaaagggcaaccgtgcagcaatatacgcacgtttcagctcgcacaaggaatcgtcgactgcacgatcaaacatcgatcgaagctcaagtactgccttcgttaga

SEQ ID NO: 1667 - DNA, 966 bp, unidentified
  source 1..966: mol_type = unassigned DNA; note = Bacteriophage uvig_239214 from the Index of /pub/databases/metagenomics/genome_sets/gut_phage_database (ebi.ac.uk)
aagaaaaaacgcaaggtggagggagctgataagcgcaccgccgatggttccgagttcgaaagccccaagaagaagaggaaagtctagttctgcagagggtgatgccattcgacgaacttgtttattgcagcttataatggttacaaataaagcaatagcatcacaaatttcacaaataaagcatttttttcactgcattctagttgtggtttgtccaaactcatcaatgtatcttagtaccgcattcatttcagtgagagcttactcatcagagttcgactacaaaaaagataagaatggaaatatttttatagatgttcatttatgctaaatagggtagcctcaaccctctgattcatgagccagcgtaacgacatctcaaacaattataaaatatataaaaatgacgagaactaatctcgtcattttcttatacattcgtatagttaaaactatttaaatctactggcttatcctttatataatccttaatttctatgccctctaatttggttggacgaatcactatctcatttttaacaacatcttctttaactagttttaattgtttcatcaatgacgtccgtatcagactaacgcttatccatcgttaggcattactcaatctgctttatctaaatatgaaaaaggtgagcgtttaataaaattacaatttataaaacgattatcagaatattttggggtaactgaggatgaaattattggtaaaaaagaaaaagcgtatagtttacctacacactttttgaatcaactcaataatctaaatcttacggatgatgagtttaatgaaattttgaactatgcaaaatatttaaaatttaaacgaggtgaaaaataatgagtgaatacattatgtatttaagaaaatctagacaagatgaacctaaggaatcgtcgactgcacgatcaaacatcgatcgaagctctccggcgattcttcttaga

SEQ ID NO: 1668 - DNA, 966 bp, unidentified
  source 1..966: mol_type = unassigned DNA; note = Bacteriophage uvig_65204 from the Index of /pub/databases/metagenomics/genome_sets/gut_phage_database (ebi.ac.uk)
aagaaaaaacgcaaggtggagggagctgataagcgcaccgccgatggttccgagttcgaaagccccaagaagaagaggaaagtctagttctgcagagggtgatgccattcgacgaacttgtttattgcagcttataatggttacaaataaagcaatagcatcacaaatttcacaaataaagcatttttttcactgcattctagttgtggtttgtccaaactcatcaatgtatcttagtaccgcattcatttcagtgagagcttactcatcagagttcggcaggatggtttacagttttctgaatggaagcgacatcaccgtgatgctgtaaagtccggcctttattttaccatcggctgtttaacgattggcggtcgtttaacgattactgaccactacagatggtagccgagagcataaaacacctccgaaaacacctcccaaacggcacatatgggaacagccgggcaggaaatgcacaacgctgtttcaaaaagccttgatatacgggcatttcggggcataaaaaaacgataccatagacggatacactgtatcaatctatggtatctaatttggacgtccgtatcagactaacgcttatccatataacggctgtcagagccgaaaacggcaacagactggtaattactacagcagacggttctgaaatcgttaaacggtggcaagaccgctcacgggcagaatcgtggacgccggagatgaaggaagccgctcgacagaaggctcttgcacggagcagggcttgacggctctctcattataccgccgttttcccaaatcggatcattacattttcagcaaaacctattatgattttgcacaggaggtgcatacatggcaacagcaaaaaatgtgacagtaattcctgccacattcaatccccaggaatcgtcgactgcacgatcaaacatcgatcgaagcttatctgtgccgaccgaagga

SEQ ID NO: 1669 - DNA, 966 bp, unidentified
  source 1..966: mol_type = unassigned DNA; note = Bacteriophage uvig_597817 from the Index of /pub/databases/metagenomics/genome_sets/gut_phage_database (ebi.ac.uk)
aagaaaaaacgcaaggtggagggagctgataagcgcaccgccgatggttccgagttcgaaagccccaagaagaagaggaaagtctagttctgcagagggtgatgccattcgacgaacttgtttattgcagcttataatggttacaaataaagcaatagcatcacaaatttcacaaataaagcatttttttcactgcattctagttgtggtttgtccaaactcatcaatgtatcttagtaccgcattcatttcagtgagagcttactcatcagagttcggactgcgaatcgtctggaattgtattggtgaattcacaccgccacagctttaaatggacagaaaaacggcatagccgcaaaatacgcctatgccgaatttttcaggaattacaaaatccctaagttgtaccgcctttcggagtggattttttatattcagttgtattttattcgactgttatatttggagaaactctcaaaacgctactacagttattacacttgaattcatgcgataacgaaatactttttgcgtttgtgacgtaatagccttttttgcaaacctcacattttatttttgacgtccgtatcagactaacgcttatccatttgtgggaataggaggagaaaatggaacagcatccagtgagaatcacagccggagagcgcaacgacaccgtctacattgtagagtatgccaccggcagcagtgccagggagtccgtatacgagaaggtcaagcggctcattctggaggacacaaaaagttatcttgtaaaatccgcataaacgcttgatatatccgcagttcagagccataatacagtaccgcttgaagactgtcgggaaggaggagcatatgaacaacaacagacagtcttacaacgccgaggagaaaataaccgctctggaatcgtcgactgcacgatcaaacatcgatcgaagctaatgttcatcttgcagagga

SEQ ID NO: 1670 - DNA, 966 bp, unidentified
  source 1..966: mol_type = unassigned DNA; note = Bacteriophage uvig_35124 from the Index of /pub/databases/metagenomics/genome_sets/gut_phage_database (ebi.ac.uk)
aagaaaaaacgcaaggtggagggagctgataagcgcaccgccgatggttccgagttcgaaagccccaagaagaagaggaaagtctagttctgcagagggtgatgccattcgacgaacttgtttattgcagcttataatggttacaaataaagcaatagcatcacaaatttcacaaataaagcatttttttcactgcattctagttgtggtttgtccaaactcatcaatgtatcttagtaccgcattcatttcagtgagagcttactcatcagagttcggagatgcaaagtatccaaagaaaattacacgaagagagaacgtatcttgttcaagggagcgacttccacccgataaagaagttcgatgaggataagttatataagtttataaaaagggtagtcgtgaaagattggacggttacgttcgaattctttaacggagtatgcatcactcgctcctataccaatggacagccaggaaacatcaaagattggaagttaaaacaaaaacaacggagggaggaacagaatggacagtaatcagagaatcgtgcggacaatccccgcatcgtttacgaggacgtccgtatcagactaacgcttatccatatttccacctcaaagtaggcatagtcgagagcataacaatcaccaggaaataagagttgccgaccatagggaaaaaccttgcggtcggcgatttttcttgctataatatagaggtaaagggcaacgagacctttcatggttacaccctttgaaaaggggctattttgagacctttcgtagtcatctgccaagtcaaaataatccgaaccttttggtaacaaccgattggttcggatttgtcgtttatctgaaacaataaaaaacgaggggcttgtttgctcgaaaagaccgatgagctggggaatcgtcgactgcacgatcaaacatcgatcgaagctgagatatagagccacgagga

SEQ ID NO: 1671 - DNA, 966 bp, unidentified
  source 1..966: mol_type = unassigned DNA; note = Bacteriophage uvig_550968 from the Index of /pub/databases/metagenomics/genome_sets/gut_phage_database (ebi.ac.uk)
aagaaaaaacgcaaggtggagggagctgataagcgcaccgccgatggttccgagttcgaaagccccaagaagaagaggaaagtctagttctgcagagggtgatgccattcgacgaacttgtttattgcagcttataatggttacaaataaagcaatagcatcacaaatttcacaaataaagcatttttttcactgcattctagttgtggtttgtccaaactcatcaatgtatcttagtaccgcattcatttcagtgagagcttactcatcagagttcgctgtccaaaggtgcttattataacaagttatgccgaattttacgcaaattacgcacacttttagagcaatattctgagttttgaaaattcttttgatttttttacttatttagggtgacaaaccgcaaattttgcggaatatatttaagaggataaaatcctcacgaagtcttgacttgatttttttagatgttattatggaggtaatcaattgttgcctgcgtaaaaagtgccgtaaggagatccacatatgcaggaaaacaagcaaaacatacgatttactgccctgtactgtcgcttgacgtccgtatcagactaacgcttatccatgtcaacaagtacatatttattatttagggattggcaaaattgaccttgagtaaaatttgtacccaaacagtaacgcccttatgctcgttatttcaaacagcgctttgctccctctatccgccaccggcggcggtcgcaaggctaccaatcgaaccgattgtaaaatcggttcgacttaacacaaactatttgttaattaacatatctatatagcatagcaaaaactgtgtatatgttcgttttggttttgcaaccaaaacgattggcgttcagtgaacgccgctacattaggatacacaaggaatcgtcgactgcacgatcaaacatcgatcgaagctaacgactgcaatggtgagga

SEQ ID NO: 1672 - DNA, 966 bp, unidentified
  source 1..966: mol_type = unassigned DNA; note = Bacteriophage uvig_296393 from the Index of /pub/databases/metagenomics/genome_sets/gut_phage_database (ebi.ac.uk)
aagaaaaaacgcaaggtggagggagctgataagcgcaccgccgatggttccgagttcgaaagccccaagaagaagaggaaagtctagttctgcagagggtgatgccattcgacgaacttgtttattgcagcttataatggttacaaataaagcaatagcatcacaaatttcacaaataaagcatttttttcactgcattctagttgtggtttgtccaaactcatcaatgtatcttagtaccgcattcatttcagtgagagcttactcatcagagttcgaagatgaactgaaaaaattcgcagaactgaatatggaaagagaggcaggataatggctgagaaaagaaaattagccttttatatccgtctctcggatgcggatgaggaggtaaaagaaggaacaaaagacgaaagtaacagtattacaggacagagaaaactcttgtatgcgtatatcaagaaaacagaggaatttgcaggttttgaggtactggaatactttgatgacggatattcgggaacaatgttcaataacagggcagaattccaaaggctcatacaggacgcagagcttggaaggacgtccgtatcagactaacgcttatccatgttacagaaagaagcagaaaacattgctgccggaattgaaagagataccgagtggctggaagaacacaggaaatggaaaacaatgccttctcttacccgtaatgtggtagtgagccttatacagtccgtaaaggtatatgagggcggtgatatagaaatcgtactggattgtgacgatgaatacaggaaaatcgttgcaagagccggggagctggaaaaacagcaggatacggaaaggctggtggtctaaatggcaaggaagtcaagaacacagccgaaacaatcaccggatacactgaaggaatcgtcgactgcacgatcaaacatcgatcgaagctatggattccgactgacagga

SEQ ID NO: 1673 - DNA, 966 bp, unidentified
  source 1..966: mol_type = unassigned DNA; note = Bacteriophage uvig_311349 from the Index of /pub/databases/metagenomics/genome_sets/gut_phage_database (ebi.ac.uk)
aagaaaaaacgcaaggtggagggagctgataagcgcaccgccgatggttccgagttcgaaagccccaagaagaagaggaaagtctagttctgcagagggtgatgccattcgacgaacttgtttattgcagcttataatggttacaaataaagcaatagcatcacaaatttcacaaataaagcatttttttcactgcattctagttgtggtttgtccaaactcatcaatgtatcttagtaccgcattcatttcagtgagagcttactcatcagagttcgttgtatataacagagcagatagcactctccaattctactattatctatcttaattaattccacccctacaaaaaacattataggtttcagcaattaggccctacttacccaatttatatttttacaatgcctattactcttctcaataccaacctcggtattcgctatgaaaatgtatgcatcacgaaagaattaaataatgctactttgacttcaatgtccagtaaaaggcttgggcctggtttatatattataaattcatccattcgtatagaagcaaaattgtcatgtactcttctggacgtccgtatcagactaacgcttatccattgtttaaggatagtgagttttcacgagcatggaaacctactgagtagacataatgaacctgtcatttttattataaaacaaaaaccgttcctggctgcaaccaagaacggctttacatagtttctcttaccggatgtactccagaagatacactacatatcagaattctagtatatcatttctggagtgtcctgacaaggggcgtattttttgcacccaaaaaccgtacaatgcactaggagatgatattatgacactattatctacattggaaattggagccgcatatattcgggtaagggaatcgtcgactgcacgatcaaacatcgatcgaagcttagagatcggagatccagga

SEQ ID NO: 1674 - DNA, 966 bp, unidentified
  source 1..966: mol_type = unassigned DNA; note = Bacteriophage uvig_245605 from the Index of /pub/databases/metagenomics/genome_sets/gut_phage_database (ebi.ac.uk)
aagaaaaaacgcaaggtggagggagctgataagcgcaccgccgatggttccgagttcgaaagccccaagaagaagaggaaagtctagttctgcagagggtgatgccattcgacgaacttgtttattgcagcttataatggttacaaataaagcaatagcatcacaaatttcacaaataaagcatttttttcactgcattctagttgtggtttgtccaaactcatcaatgtatcttagtaccgcattcatttcagtgagagcttactcatcagagttcgtccgtatccaatttagagactccgatatcgtgctcgagcagggattacaatgaaaagggaaggcgaaaaaagatggcaatttttatgaccggtgacacccacggtgatttcagcaggctccgccctgtggcattccgcgagcaagggggcctgaccaaagacgattacctcatcatctgtggcgactttggcggcgtctgggatggcagtgagattgaacaacaatggctcgactggctggaggacaggtcattcaccaccctgttcgtcagtgggaatcacgaaaactatgatctgctcgacgtccgtatcagactaacgcttatccatacaacgccatcaaccgagggctcgaacagcctgactcacccgaagcagtcatggctctcattttacagggggcagccgcacgatatgactgctgcccccagcctatttctgaatgtgaaccctcagactgcccagtggaagtggattggctccgctttcgccgggtggtctcttatatcaccgtcgcgtctgacgctacggtgagcctcacatttacggatgataacttcactggaaaggacaaataaccatggaagcagcaacaaccactttagaacggcgtgtgcgggagatcccaccggaatcgtcgactgcacgatcaaacatcgatcgaagcttaacttagctcggcgtagga

SEQ ID NO: 1675 - DNA, 966 bp, unidentified
  source 1..966: mol_type = unassigned DNA; note = Bacteriophage uvig_163750 from the Index of /pub/databases/metagenomics/genome_sets/gut_phage_database (ebi.ac.uk)
aagaaaaaacgcaaggtggagggagctgataagcgcaccgccgatggttccgagttcgaaagccccaagaagaagaggaaagtctagttctgcagagggtgatgccattcgacgaacttgtttattgcagcttataatggttacaaataaagcaatagcatcacaaatttcacaaataaagcatttttttcactgcattctagttgtggtttgtccaaactcatcaatgtatcttagtaccgcattcatttcagtgagagcttactcatcagagttcgtcgagtggaaaatcaaggacttttgtgccgaaaatacggcagtgataagctgatgaaatttttagttttagcttgacatacgggtgccgataatcgtgaattcgtatttttttaagtcctgcggctttggcgatgttttcattagccttgctgaccgagctgtcgcgaatcggtttttgaccgccgcatattctgaaatcgtctgagaattgcgaatattcaccgtaacgttttttatgttcgtttaaaatatcaattaacggcttaggtatttgcaatatgcgtatagatgatttattcgacgtccgtatcagactaacgcttatccatacaagctacggtgataaaatctccgatacgcttcgcaaaataaacgaggttgaaagccgacaggcagaacttgaaaagcagtatagtcaatattgcgacctatctgacgctgtttcggttattaccgaaaacaacacacttacaaaagagcttataaacaagttgatttcaagaatagagatttataaaggaaaaaaagttgaaataacatacagctttgataatgaatttgaaggtgaggtgtctgcaaatgtatagatatatcgtagcaatatatttgcgattatccgttgatgataaggaatcgtcgactgcacgatcaaacatcgatcgaagctgtctgtaccgagtcgtagga

SEQ ID NO: 1676 - DNA, 966 bp, unidentified
  source 1..966: mol_type = unassigned DNA; note = Bacteriophage uvig_75905 from the Index of /pub/databases/metagenomics/genome_sets/gut_phage_database (ebi.ac.uk)
aagaaaaaacgcaaggtggagggagctgataagcgcaccgccgatggttccgagttcgaaagccccaagaagaagaggaaagtctagttctgcagagggtgatgccattcgacgaacttgtttattgcagcttataatggttacaaataaagcaatagcatcacaaatttcacaaataaagcatttttttcactgcattctagttgtggtttgtccaaactcatcaatgtatcttagtaccgcattcatttcagtgagagcttactcatcagagttcgatccttacggcttcaagcttcattacatggcaggtcaactggctcaagaagctgttgacgaggatacatggtatcttaaggctacttgcaccgtgacaaacgaatataatgcaacaagggaaatggagtgcgaggctaaagtaaccggcacggacagcaatcccgaagtcatcgagtttgatgttcattgattaaatgcttaaggcggcggtcgtttggctgccgcctgtatttttaaggaggaataacaatgcccggaacaaacagcataccgggaacagctgcggcatacattcgagtgacgtccgtatcagactaacgcttatccataaatcgtatatcataagctggcgcaatcccttgagctttatttctatgcgtaaggagtttcccgcttcacatccgcgcacttacaaattatatctaaatgcagtacagtccgccgtattgagaaattataaggcttgcggcctgaggatcgcagtgctttatatttatgggatattgcaattttttaacataattaaacatagcttttctcctttcattattcaattcattttatgcaaagaagaaaatattgccacggcgaaaaaaagcaaccgccgatgtgcaattcataaagaatagggaatcgtcgactgcacgatcaaacatcgatcgaagcttattaccgtggtctgacgga

SEQ ID NO: 1677 - DNA, 966 bp, unidentified
  source 1..966: mol_type = unassigned DNA; note = Bacteriophage uvig_151078 from the Index of /pub/databases/metagenomics/genome_sets/gut_phage_database (ebi.ac.uk)
aagaaaaaacgcaaggtggagggagctgataagcgcaccgccgatggttccgagttcgaaagccccaagaagaagaggaaagtctagttctgcagagggtgatgccattcgacgaacttgtttattgcagcttataatggttacaaataaagcaatagcatcacaaatttcacaaataaagcatttttttcactgcattctagttgtggtttgtccaaactcatcaatgtatcttagtaccgcattcatttcagtgagagcttactcatcagagttcgttagttaatgggacaattacgcaaagggaatttgagatgattgacgagaaaaacaaagagagttttgccgtcaattagtcgtggaaatggcacatgggtaaaacgcctgtgtgccattttttttgactttaatctgtatagtaaccaaatgaaagaaacgcaaaataaagtctgttaattgggcattttgacttgactttcctgcgcctttgagtgattaatgtcatgataaaaatcaaggaggttttttatgcaaacaccacgcttaaaaaagagagcagcgagttatgttcgcgtgaggacgtccgtatcagactaacgcttatccattcgataattataaggtcagggatgagataaggagggtttatgttagcgagtaatgtaaaagtaattcaaccaagaaaattattcaatatagaagagagcgcaaggcagcttttaagggttgcgggatatgctcgtgtgtccacggggagacctgaacagaaaaccagttttgagtcgcagcaaaagcattataaagagttggtggcgaagcactcggattggatagatgtcggtttgtatgccgatgagggcataacggcaacgagtatgcgaaaaagaaagcaattcctaaaaatgataggaatcgtcgactgcacgatcaaacatcgatcgaagctaattcggccattgcagcgga

SEQ ID NO: 1678 - DNA, 966 bp, unidentified
  source 1..966: mol_type = unassigned DNA; note = Bacteriophage uvig_195859 from the Index of /pub/databases/metagenomics/genome_sets/gut_phage_database (ebi.ac.uk)
aagaaaaaacgcaaggtggagggagctgataagcgcaccgccgatggttccgagttcgaaagccccaagaagaagaggaaagtctagttctgcagagggtgatgccattcgacgaacttgtttattgcagcttataatggttacaaataaagcaatagcatcacaaatttcacaaataaagcatttttttcactgcattctagttgtggtttgtccaaactcatcaatgtatcttagtaccgcattcatttcagtgagagcttactcatcagagttcgtatatcaattttagatataaaagggaggtaatttctgatggattatagaaactatatctcctatctaaattcattaaatttctttaaaaagatgctattttgcaaggtaattgacgagaaagagtatgaaaaagcagaggatttgcttgctaaaaaatactgtatcaataaagggaatttatatcgtcaaaatgagttgataaataagtcctttagagcgatatatggtgatgaaaaataggaggtaattatggacaaaaagataactgtaattgatgcccttcctaagttagaaaagaagacgtccgtatcagactaacgcttatccatctagaaagcgttctttgaagcaatgggaaaatataaaaagggagggtaagtaaatggcaaaagtaacagttattccttccactaaagttagtacattctctaatgcctttaatcctgtggttaaaagaaaggttgctgcatacgctcgagtttcaacagatagtgacgagcaatttacatcttttgaggcgcaatgcaattactatgaaaactacattaattctaaacctgactgggaattagtcaaggtttatgctgatgaaggtatatctggcacaaatacaaaaaatagaactcaatggaatcgtcgactgcacgatcaaacatcgatcgaagctgttaacttaaggcctgcgga

SEQ ID NO: 1679 - DNA, 966 bp, unidentified
  source 1..966: mol_type = unassigned DNA; note = Bacteriophage uvig_150139 from the Index of /pub/databases/metagenomics/genome_sets/gut_phage_database (ebi.ac.uk)
aagaaaaaacgcaaggtggagggagctgataagcgcaccgccgatggttccgagttcgaaagccccaagaagaagaggaaagtctagttctgcagagggtgatgccattcgacgaacttgtttattgcagcttataatggttacaaataaagcaatagcatcacaaatttcacaaataaagcatttttttcactgcattctagttgtggtttgtccaaactcatcaatgtatcttagtaccgcattcatttcagtgagagcttactcatcagagttcgcgaggcaatttcggggttcgtattattcttttctaacgattatttcggcataagaatagaattatgaatacttacgacaacagccgggcgaaaacaatcgctcggctgtttctatgctctaaaacaggtacatgctatgaaagatcgtataagtctataaaattttcagattaacatccgaaaaaagcttgtttatactcttgcgaggcgacttctatttttgccataagatcggcgcttttactctctatcgcttcggcgattctgcttgccgtaccttttcttatagtttttatttcggacgtccgtatcagactaacgcttatccattttacggggactctcgaaagtatgcaacgcaaggacgcggcgcaactcgtcgcaaacctcggcggcattttgggcgacggcgtaacaaagaaaacaaacttcctcgttttaggtaatttcgactattgctccacgataaaagagggcaagtcaaacaagcataaaaaggcggagcaacttatcctcaaaggacaagaccttcaaattatccccgagagcgtatttttgagtatggttgcggaggattgatatgcaaaacgcggtaatatacgcccgttattcctcccacgggcaaaacgaggaatcgtcgactgcacgatcaaacatcgatcgaagcttgcgctaacatacaatcgga

SEQ ID NO: 1680 - DNA, 966 bp, unidentified
  source 1..966: mol_type = unassigned DNA; note = Bacteriophage uvig_224697 from the Index of /pub/databases/metagenomics/genome_sets/gut_phage_database (ebi.ac.uk)
aagaaaaaacgcaaggtggagggagctgataagcgcaccgccgatggttccgagttcgaaagccccaagaagaagaggaaagtctagttctgcagagggtgatgccattcgacgaacttgtttattgcagcttataatggttacaaataaagcaatagcatcacaaatttcacaaataaagcatttttttcactgcattctagttgtggtttgtccaaactcatcaatgtatcttagtaccgcattcatttcagtgagagcttactcatcagagttcgtcctctatgtcgctgcgacccgaggaaaggaggcggagagatatgccggataaggtgctggcgttttatattcgtttgtcgagtgaagaccgagatctcaaaacaaatgcattgaagaatgagagtaacagtgttttcaaccaaaggcggttactccaggattactatgatacacatgaatcgctccatggttataaagtgatcgtgttctgcgacgacggtgtcacgggaacacattttgacaggccgaagttcgatgagctaattgagatggctcgcaatcaggaaattcattgcattgacgtccgtatcagactaacgcttatccatagatcgaccgagaactcagtatctatctctcaggcgaacagtccccgaacaactggatgaagacatttaccgaacatcgaggattgaaatcactcacgcgggcagttgttctggagtgcattgaaaaagttgttattcacaaagacgaaaagttggaaatcatctttgagcattccgaggactatgcccgtttggtgagcagcctgcaggaatatgctgagcgtggaatacttgaggaggcgatgtaagcatggcaagaaagagcagaaaaaatgtccaagccacacccgcagttgttgtggaatcgtcgactgcacgatcaaacatcgatcgaagctttatcgtactaccagtcgga

SEQ ID NO: 1681 - DNA, 966 bp, unidentified
  source 1..966: mol_type = unassigned DNA; note = Bacteriophage uvig_395040 from the Index of /pub/databases/metagenomics/genome_sets/gut_phage_database (ebi.ac.uk)
aagaaaaaacgcaaggtggagggagctgataagcgcaccgccgatggttccgagttcgaaagccccaagaagaagaggaaagtctagttctgcagagggtgatgccattcgacgaacttgtttattgcagcttataatggttacaaataaagcaatagcatcacaaatttcacaaataaagcatttttttcactgcattctagttgtggtttgtccaaactcatcaatgtatcttagtaccgcattcatttcagtgagagcttactcatcagagttcgcccgataaaggcccgcaggcccaggtgctttttgtcgatggtcataaggtcacggtcagatacagcggggataaaaatcccccggcgctccaggccatcaaggacgtgcttatcaatagcgtttccactcaaaaagactgattttttgcatattttggtgaaatatgagataataatggtgtagatggcaccttgaaaaataaatagaactggccgccatatagcaccgccagaacaggaggtaatctatatggcggaacaaatcatccaacttgcgaaaaatgtcttaaaacgagtggtgacgtccgtatcagactaacgcttatccatgtggagcgtcaacgctcctggccctgggcgaaaatgtagggcaggcggtttgaccgcttgccccggtttaatcggatggtagtcaacggcgctataagtgacaggaacatttttcgacattccgttttcgtgcaagttaaatgcctgcaagcaactaacaccaaaaaatatcttttgctaaaaccgcaccgcttgccataggataaaacgaaaggagaatattatgcaaaaagttaaaaccttgaaaagagtcgggcgtcaattatatcgctcatctccgacaattttaacggtagtagcggaatcgtcgactgcacgatcaaacatcgatcgaagctacgtctcagaggcactcgga

SEQ ID NO: 1682 - DNA, 966 bp, unidentified
  source 1..966: mol_type = unassigned DNA; note = Bacteriophage uvig_581138 from the Index of /pub/databases/metagenomics/genome_sets/gut_phage_database (ebi.ac.uk)
aagaaaaaacgcaaggtggagggagctgataagcgcaccgccgatggttccgagttcgaaagccccaagaagaagaggaaagtctagttctgcagagggtgatgccattcgacgaacttgtttattgcagcttataatggttacaaataaagcaatagcatcacaaatttcacaaataaagcatttttttcactgcattctagttgtggtttgtccaaactcatcaatgtatcttagtaccgcattcatttcagtgagagcttactcatcagagttcgggttctccggactgagcgtttcccacgcagcggcgatctcctgttttacggcactgagttccggctgcaaacggttttcgcgggagctttccatagcaggtcctcctttccgggcggccgctttcacagcccgccagcgtgtggtttgcttttcatgctcattatatcgcagtccgttccgttttgcctagacccaacgtttcgacaaatttcgacaatcggctgcgccgacagaaagggggcgatccgcatggcacggaaaaagaagtaccatctgcgcgaggtgcacagcgtctgtatgacgtccgtatcagactaacgcttatccatcggtccggcggctgctggacgacaacgctgcagcccccatgcagccaacataacaagaaacagcttgcagctggccgccaaaaaggcggcagcatcgccaggaagaacccttctcatgccatgcgccggtgcagcagcaccgcaagcaaggagtgacagaacattgtacagacaaaaaagcgccgcagcggtttgcgctgcggcaaaaaaagaagctcccctttcggagagcttcccggatcataccgaatgttcggataatcctgttttggtgcaccttggccgagcatatccgaacccggaatcgtcgactgcacgatcaaacatcgatcgaagctggttctgaacgtaattcgga

SEQ ID NO: 1683 - DNA, 966 bp, unidentified
  source 1..966: mol_type = unassigned DNA; note = Bacteriophage uvig_225196 from the Index of /pub/databases/metagenomics/genome_sets/gut_phage_database (ebi.ac.uk)
aagaaaaaacgcaaggtggagggagctgataagcgcaccgccgatggttccgagttcgaaagccccaagaagaagaggaaagtctagttctgcagagggtgatgccattcgacgaacttgtttattgcagcttataatggttacaaataaagcaatagcatcacaaatttcacaaataaagcatttttttcactgcattctagttgtggtttgtccaaactcatcaatgtatcttagtaccgcattcatttcagtgagagcttactcatcagagttcgaagaactgcacatctatcgtggcaccgttcaaggtccgcctatttttttataattaagtcgcagtaactatcatggatagaactcactggtatagtaactactactaaacttaatcccattctgaaataagaacaacccccggcgtaggaaagcacacctagccgggggtatctgttcatccgtttaacaggtcatacaactgcatcgcctgatactggctgtatccggcatctacgagggcggcaattttatttttcttcgcgctgccgcttatagtcctgtccgtaccggggactttagacgtccgtatcagactaacgcttatccatggaggataatccgtcccgacaatcggattatatcacctccggggtaggcttgtcaaagtatactctatggaggtttttttatgtcttctttcttttcaacatgtacacgaaccacaactccttctcgatttcccacaattctggccaataccgtaaatatcttttccgcctgttctatttccatggtatcaccccgtttactcaagcgtatgcttaaagcaggtggcacagaacgaaaggaggccattgtatgcaggtgattcgtggagcaggatatatccgtgtatccaccacggaacaggaatcgtcgactgcacgatcaaacatcgatcgaagctggccaggtagaccgaatgga

SEQ ID NO: 1684 - DNA, 966 bp, unidentified
  source 1..966: mol_type = unassigned DNA; note = Bacteriophage uvig_230928 from the Index of /pub/databases/metagenomics/genome_sets/gut_phage_database (ebi.ac.uk)
aagaaaaaacgcaaggtggagggagctgataagcgcaccgccgatggttccgagttcgaaagccccaagaagaagaggaaagtctagttctgcagagggtgatgccattcgacgaacttgtttattgcagcttataatggttacaaataaagcaatagcatcacaaatttcacaaataaagcatttttttcactgcattctagttgtggtttgtccaaactcatcaatgtatcttagtaccgcattcatttcagtgagagcttactcatcagagttcgatacatattgagtttgaatcttatagagattatgaactttcattagaaaaaatccctagcactgaattctgtagcagaaatacatattttatccctaaaaaataaaccactgactatttacttatttaagcatttgcaaaactattataatctgctattaaattgttatatttgaacaattagcacaccacaatatacctttattttcacaattacacaaaatcaaaacaatcagacaggagcgaacacaatgccagataatgcaaactgctgctgggcactatatatacggctcagccagacgtccgtatcagactaacgcttatccattttataaaaataatcgtttaaaaatcatatataactttgataatgacagttaaaaactttcaattaataaagctgatatgactttgatgacaacagttaaaaatgctgtttaaaaagtgtgtataattttaatagcaacaataaaaaacactgttacaaggctaagtttctgcctgcatccacacatatccagtaaacttagctgttttcatttccaagaattatactgataagtgttttatcaagcattattgtacggttccatggatttaatataattcctgatatttcaccgacttcggaatcgtcgactgcacgatcaaacatcgatcgaagctttaagtggaacggcaatgga

SEQ ID NO: 1685 - DNA, 966 bp, unidentified
  source 1..966: mol_type = unassigned DNA; note = Bacteriophage uvig_197914 from the Index of /pub/databases/metagenomics/genome_sets/gut_phage_database (ebi.ac.uk)
aagaaaaaacgcaaggtggagggagctgataagcgcaccgccgatggttccgagttcgaaagccccaagaagaagaggaaagtctagttctgcagagggtgatgccattcgacgaacttgtttattgcagcttataatggttacaaataaagcaatagcatcacaaatttcacaaataaagcatttttttcactgcattctagttgtggtttgtccaaactcatcaatgtatcttagtaccgcattcatttcagtgagagcttactcatcagagttcgaataatatggggattttttattgaataaaaggggggtaaaatgaatttaaataataataaaacaaataaaaacaacataactttaagtaggtgttgttatgaatgaaaataatataacttttaaagatcttattttaaaatatcttatcgaagagatagaaaaagaaaataatgcgctgtaattttttttataatgcggtattattaaattgtcttaatactcagtcaagtaagaagattggaggtttggatgtataatacttacttaactgaaatagatttcaatgttggaatctatatgacgtccgtatcagactaacgcttatccatatgaaaataggtatttaattagaaacccttatggaaaaaatggtaaaaaataaagttttaatgatataatatatagtcaaggagatgatattatgaaatcgttgtttgactatataaacagtaatagttttttagctactttaataggtattgttgttggttggatattaaattttatttctacgatgtattttaataaaaaggaagaaaaacaaagaaaaaaagaaattgaaaggcaagaaagacaaaagcaatttgaaaataagccagaattgtttattgaaaatactacgtgtaaatggaatcgtcgactgcacgatcaaacatcgatcgaagctagtgtgcagtcgaagatgga

SEQ ID NO: 1686 - DNA, 966 bp, unidentified
  source 1..966: mol_type = unassigned DNA; note = Bacteriophage uvig_148886 from the Index of /pub/databases/metagenomics/genome_sets/gut_phage_database (ebi.ac.uk)
aagaaaaaacgcaaggtggagggagctgataagcgcaccgccgatggttccgagttcgaaagccccaagaagaagaggaaagtctagttctgcagagggtgatgccattcgacgaacttgtttattgcagcttataatggttacaaataaagcaatagcatcacaaatttcacaaataaagcatttttttcactgcattctagttgtggtttgtccaaactcatcaatgtatcttagtaccgcattcatttcagtgagagcttactcatcagagttcgtaaaaagaagtgttaatggaggtggttatgatgaatcctgaagaacaaaatctactccattatataaacacaatactagtgcttaaaaattggaaaaagagcggtttaattagtgatgaagattatatcaaaatggaagcaaagacagccagaaaatttggtattaaaaatgtcagtctatatcgttcaattgacttgctatataagccttttagagtgatatatatgtgtgacaaaaaggaggaataaaatggctgagaacatcactaaaatagctgctagacctagcttaattagcaagacgtccgtatcagactaacgcttatccataggcaaggcaaagggctaaagcgcattacaagaaagaaggagctgatgaataatggcaaaagtaacaataataccttcaaagattaatccaattacacatcagcatcttgatgttaaagtaaagagaagggttgcagcatatgcacgtgtttcaaccgatgacgagatgcaattaacttcatatgaagcgcaagttgattattatacaaagctaataaaggccaatgatgaatgggaatttgtcaaagtatatgcagatgaaggaattactggtacaagtttgaaaaatagaaaagaattggaatcgtcgactgcacgatcaaacatcgatcgaagcttctactacattggagatgga

SEQ ID NO: 1687 - DNA, 966 bp, unidentified
  source 1..966: mol_type = unassigned DNA; note = Bacteriophage uvig_106050 from the Index of /pub/databases/metagenomics/genome_sets/gut_phage_database (ebi.ac.uk)
aagaaaaaacgcaaggtggagggagctgataagcgcaccgccgatggttccgagttcgaaagccccaagaagaagaggaaagtctagttctgcagagggtgatgccattcgacgaacttgtttattgcagcttataatggttacaaataaagcaatagcatcacaaatttcacaaataaagcatttttttcactgcattctagttgtggtttgtccaaactcatcaatgtatcttagtaccgcattcatttcagtgagagcttactcatcagagttcgcctacaaatactcattcgaactaatgatattatcgagtgagattaacctctgattttcagaggtttttttgtatttatacataaaaaagaagccaggcattgcacctggctttactctattctttaggttttgtatatgtcaatgcttgttcactgtctgcaactccacttgtagttggatccgtcactgcattgaatacactgactacaactaatccaagaacataaggattactcaatgcacccattagtaaatcaccaagtgcctgccatgtagtcaggtctttaaccgtcaaacctgacgtccgtatcagactaacgcttatccatggctctaccctagctgaggagacgtacttaacatacgcttaaccatattagtcatctatcagctatcgacctgtcataggctaacctatcggtaaatgatatatatcatacaaagattaatatttcaaatttaaaaagcaagaaagcactgccaaacacagcgctctcttgaaatccattgttaccacatgtagtggattgccgtagttacgaaagaagtataacacaaacaacgaaaggagatgatcatatgtctgaaaaagcagtaatttatgcacgctattcctcttcaaatcagcgggaatcgtcgactgcacgatcaaacatcgatcgaagctgtcatggtgcggttgatgga

SEQ ID NO: 1688 - DNA, 966 bp, unidentified
  source 1..966: mol_type = unassigned DNA; note = Bacteriophage uvig_203979 from the Index of /pub/databases/metagenomics/genome_sets/gut_phage_database (ebi.ac.uk)
aagaaaaaacgcaaggtggagggagctgataagcgcaccgccgatggttccgagttcgaaagccccaagaagaagaggaaagtctagttctgcagagggtgatgccattcgacgaacttgtttattgcagcttataatggttacaaataaagcaatagcatcacaaatttcacaaataaagcatttttttcactgcattctagttgtggtttgtccaaactcatcaatgtatcttagtaccgcattcatttcagtgagagcttactcatcagagttcgtatttgtattctatgtatggaagcagggcttccgtatgcttacgtttatgtaagtgtacggaagcctttttttattgtctaaacgaaaggaaagaacgaaatggaaaaagatatgaaaagctaccccaacaaccttctcagacagatattccccggagaacaatttgacgatcttgccgatgacagcggaattgcacttgactatataatttccgaaactatgagcgagagtgatgctcttttgctcaaaatgaggtacaaagagaatatgacatatgcggatattgcaaaagccgttgggacgtccgtatcagactaacgcttatccatgattagtgatttttctatcttaaaatcagaaggcttaattatagaaacatcaaaatatttaaacggtaaatttgcagtcaagccaacagataggggtatagcaatgatagcatcaatgaattaaaataaaaaattccccgctcgatgttgcagcaccgaacggggagagggatatgtataaaatacacacaccacagtaactgtattttatcatatcctgacgaaaaaatcaataggagtgataaaaaatatgcaaaccgccgtgatatacgcccggtattcgtccgacaagcagacggaggaatcgtcgactgcacgatcaaacatcgatcgaagctcgccgtagagtgaacatgga

SEQ ID NO: 1689 - DNA, 966 bp, unidentified
  source 1..966: mol_type = unassigned DNA; note = Bacteriophage uvig_75234 from the Index of /pub/databases/metagenomics/genome_sets/gut_phage_database (ebi.ac.uk)
aagaaaaaacgcaaggtggagggagctgataagcgcaccgccgatggttccgagttcgaaagccccaagaagaagaggaaagtctagttctgcagagggtgatgccattcgacgaacttgtttattgcagcttataatggttacaaataaagcaatagcatcacaaatttcacaaataaagcatttttttcactgcattctagttgtggtttgtccaaactcatcaatgtatcttagtaccgcattcatttcagtgagagcttactcatcagagttcgcgcttacgataaaataaataagcagactgagtacactattattataacataatgtgctcagctctgctactacatactcaattttagcaaattacattcaagttaactttatagtaagtttcgcatttttactagtaaatcgcctatgccttgctaatcacctcttaaaaataggccttttagcgaaagttacaagcaagttaaaactttagagtattttcaagcaacaagtaaaggagctgtattttttatgtccgaaattaagagggctgtaatttacgcacgcttttcctctgatatgacgtccgtatcagactaacgcttatccatctatcgacgggcgcccaagttgctatcccaaagtgtttcccaaaaagctctagggagagggctttaaggtatcctgtctattgactgttcttcctcaccggcaggagaagctcagagaacagttagcagttaggctgctaaagcgtattcttgttcagcgtttatatttaaacggcccaccgattatcgtgcagatggaaccacggctcgcttatcataccgcacctacccccgtcgaaaccagtacatccccgatttaaatcttttcctactcaaaaccatccgtacacatcctatacaggaatcgtcgactgcacgatcaaacatcgatcgaagcttagcgagacttctatatgga

SEQ ID NO: 1690 - DNA, 966 bp, unidentified
  source 1..966: mol_type = unassigned DNA; note = Bacteriophage uvig_180737 from the Index of /pub/databases/metagenomics/genome_sets/gut_phage_database (ebi.ac.uk)
aagaaaaaacgcaaggtggagggagctgataagcgcaccgccgatggttccgagttcgaaagccccaagaagaagaggaaagtctagttctgcagagggtgatgccattcgacgaacttgtttattgcagcttataatggttacaaataaagcaatagcatcacaaatttcacaaataaagcatttttttcactgcattctagttgtggtttgtccaaactcatcaatgtatcttagtaccgcattcatttcagtgagagcttactcatcagagttcggtataaagtaggcatcacgcttttggtcattgctggcgttgctttagtcgccggcatcgtattgtttttcgtcaatctgatttcatctctgctctgcatcggtatcgcggcttgtcttggctggtcagggtattccacccttgcggcctatgttcgtgacgtaaatattcgcctgcaggcagaacggtcggcgcgtgaggcgatggaaaccgaagaagacaattctgacgaaatcgaggaggactgatttatggacgttgtaggctattgtcgcttttcttccgaagcgcaaagggatgggacgtccgtatcagactaacgcttatccatctatcagaagccccgcgtcgcgcgcaagggtcgacggagagcaggaaacgtaaataatacgctcgggcaaagacgacaaaattgcggcgatgaccgagctatctataacatacccgataggtaaaggtcaaactccgaagggtggcatttcgctactttttggagtttttgctgacctgtttctttgcgtaggcttcgattcggtcgaatgccgcttgcacaattccctttaccacgtcccttttgattatgggtttcaggatagcgggtatcaatgcgtatacttggtcggtcgctgcaggaatcgtcgactgcacgatcaaacatcgatcgaagctggagacaggcgagtagtgga

SEQ ID NO: 1691 - DNA, 966 bp, unidentified
  source 1..966: mol_type = unassigned DNA; note = Bacteriophage uvig_354682 from the Index of /pub/databases/metagenomics/genome_sets/gut_phage_database (ebi.ac.uk)
aagaaaaaacgcaaggtggagggagctgataagcgcaccgccgatggttccgagttcgaaagccccaagaagaagaggaaagtctagttctgcagagggtgatgccattcgacgaacttgtttattgcagcttataatggttacaaataaagcaatagcatcacaaatttcacaaataaagcatttttttcactgcattctagttgtggtttgtccaaactcatcaatgtatcttagtaccgcattcatttcagtgagagcttactcatcagagttcgttgatcgcatagttataaaatcatacgacgaaatcgatatttttcttttgtgagtaactactgactattatcccttacactgcagaaatcggttatcagcattttggtctgattataacaatttttcataacaaggcattcgttgtgccgatgagcgggaatcatacggcttatctgcaggcctacagcaaggagaatccgaaagggaagcgtcatttgatgcgcctggggaaaatcaagggaatgaataaggaatcggttttgttcatcaatgatgcaaaatggatcaatactgccagagacgtccgtatcagactaacgcttatccatatttggattaataaagcctttgacaatagagaataaggaatttgcaataaaagatacagataagctagtgacaaaaggttcgtactttttaacaattagctataacaaataaaaaaacaccccctgcgccagcagagagtgcgtggtatcagcgccaactgacaccgggtatagaaaaaatgaccaccacgtcataactttttctatacctctattttagcactttttaaaatgaatggaggttttatttatggaaatgaaaaacgcccgtttgtacgctcgtgtatctactgatgagcaggaatcgtcgactgcacgatcaaacatcgatcgaagctaatctgacgcaatccgtgga

SEQ ID NO: 1692 - DNA, 966 bp, unidentified
  source 1..966: mol_type = unassigned DNA; note = Bacteriophage uvig_292057 from the Index of /pub/databases/metagenomics/genome_sets/gut_phage_database (ebi.ac.uk)
aagaaaaaacgcaaggtggagggagctgataagcgcaccgccgatggttccgagttcgaaagccccaagaagaagaggaaagtctagttctgcagagggtgatgccattcgacgaacttgtttattgcagcttataatggttacaaataaagcaatagcatcacaaatttcacaaataaagcatttttttcactgcattctagttgtggtttgtccaaactcatcaatgtatcttagtaccgcattcatttcagtgagagcttactcatcagagttcgatgtatgatttttctcaacatatagactacgatatttcctatactgttgaaacaaagcgtattggaaatgaaataatgttctacagtaatgcaataaatatgtaaaaaaacaccccgtgctaccaacacggagtgatcgggcggtactaccaataccacccagcatagaaaaatgacctcaccagtcatatctttttctatgcctctattttaccacatcacaacataaaatgtaaatggaggtatcaacatgcaatatttaatttatctaaggaagtcccgcgctgaccaggaagcggagacgtccgtatcagactaacgcttatccatgcaccgcagataatttcacgctctacctatacccgaaaatctcccataaataaaggcttttttgacggataacttttatgtacgcattcttccgttccgatatctaccaatctgtttaatttgtgttactactatatccatttaatcacctcctacatagcttttaatctattcttcaacgtagcgtaatcagctggtgttatttttccatctccattaaaatcatagtggtagaccatatcatcatcagcatccacagtacccataattatcaaacggataatatacaggtcagcccatggaatcgtcgactgcacgatcaaacatcgatcgaagctagtgctcttgaacatgtgga

SEQ ID NO: 1693 - DNA, 966 bp, unidentified
  source 1..966: mol_type = unassigned DNA; note = Bacteriophage uvig_181325 from the Index of /pub/databases/metagenomics/genome_sets/gut_phage_database (ebi.ac.uk)
aagaaaaaacgcaaggtggagggagctgataagcgcaccgccgatggttccgagttcgaaagccccaagaagaagaggaaagtctagttctgcagagggtgatgccattcgacgaacttgtttattgcagcttataatggttacaaataaagcaatagcatcacaaatttcacaaataaagcatttttttcactgcattctagttgtggtttgtccaaactcatcaatgtatcttagtaccgcattcatttcagtgagagcttactcatcagagttcgtaggaggaaaaatgatgaacgagatttcgtttgaacagttcaaactgaacgtcgaaggcgtcatgcgagatgctgccaacggagatagctttacaacggttcagatggacaacggcaaggttgttatcataagcgaagatgaatggaacatcttgcgcgaagggtttgcccatttggtaggcgggaaaattctgaaataacgtatttaagctactgtgtctgaaacgcgcagattggaaggagtgacgggatgcccaagaaggagactgccgtatcacagggcttggttgcggcgatatagacgtccgtatcagactaacgcttatccatgcgaggataccagtgttcttatagattccctcggggtgtacggaagagtttgaaacgaaagtttcagactctatttttgtgcgcgtttggtatgaaaagcggtaagaagttgagcaaaacacttcacaagtcaatcaaggaggtcacacaaaatgatgatgaacgagttcatcgaacgcaccggcatcgagccgacggcagaggagtacaacgagattgaggaagcctactacaagttcgacggcgataaggatgccttctgcagggacttcgtaaagaagaaccggatgctggaggttcggaatcgtcgactgcacgatcaaacatcgatcgaagcttattgagtcactagactgga

SEQ ID NO: 1694 - DNA, 966 bp, unidentified
  source 1..966: mol_type = unassigned DNA; note = Bacteriophage uvig_568903 from the Index of /pub/databases/metagenomics/genome_sets/gut_phage_database (ebi.ac.uk)
aagaaaaaacgcaaggtggagggagctgataagcgcaccgccgatggttccgagttcgaaagccccaagaagaagaggaaagtctagttctgcagagggtgatgccattcgacgaacttgtttattgcagcttataatggttacaaataaagcaatagcatcacaaatttcacaaataaagcatttttttcactgcattctagttgtggtttgtccaaactcatcaatgtatcttagtaccgcattcatttcagtgagagcttactcatcagagttcgtctctattgataaaaatagagattttcatataaaactaaaattcaatttttaaattcctgtcattaagttactgcgtcatcatttcctgagcagagcattagtccatataataaatctttaactgttattttatcaccagtttttaaacctagtctagatccacctgttcctgcagatttttttgatatttctactgtatctgttagattgcaattttctataacaattaaacttgtcatgatttttgtagttgatgccatttttcttttttgattttcattttttcctaccaaagtaaggacgtccgtatcagactaacgcttatccatgaaagaaagcaagtagaagaaaatattgaatccttaaaacaaaaaatagaaataataacatctaatgaaaaaaaagaagctaccaatcaagaagtaaaagaaaaaacaaaaaactttttaaaagcagattacattaataaggaaattctttttgatattgtagataggattgaaattgatgaaaataagaaaatatatattcatttcaattttcaacaattaaatatttataacgatgaggagatagaaaatgttagcgtatcataaggttaataatattaatgcaaaggttggtatttaggaatcgtcgactgcacgatcaaacatcgatcgaagctctaagcacggactcactgga

SEQ ID NO: 1695 - DNA, 966 bp, unidentified
  source 1..966: mol_type = unassigned DNA; note = Bacteriophage uvig_254684 from the Index of /pub/databases/metagenomics/genome_sets/gut_phage_database (ebi.ac.uk)
aagaaaaaacgcaaggtggagggagctgataagcgcaccgccgatggttccgagttcgaaagccccaagaagaagaggaaagtctagttctgcagagggtgatgccattcgacgaacttgtttattgcagcttataatggttacaaataaagcaatagcatcacaaatttcacaaataaagcatttttttcactgcattctagttgtggtttgtccaaactcatcaatgtatcttagtaccgcattcatttcagtgagagcttactcatcagagttcgttaatgtggatccgaaaacccgtagaataagcgggattaaattattgatttaagggcagtattcaatcttataccattgtgtaatgttttttactgccctcaattattctactgaagaagccccggccaccgcaacgccccatcctgatccggcgtaagcgttaccggctccacaaccatccggccctgatcgtccatgatgtaccacttgccgtcaatggtcttctggcctgttaccatcgctccgtcagtgcccagatagtaccagtggtccttgtacttgtaccatgtgtcatgtacgacgtccgtatcagactaacgcttatccatcaaaaaatgctcaaagtatacaggttgaatttgaaaccagtttttggacacaagataaaatatattttatcatcaaataacgaaaaaccgtcccggcggcaaccggaacggcttttacatagattttctgtacaggctgtaagggccaatacgatatagcttagacacctacattgtatcacacctcactgcacctgtacaggtgtatttatacccatttttaataatctgtactaaaggagttgatataatgaataaaagtgacctatcgtcggatgcatctttaagagctgccatctaggaatcgtcgactgcacgatcaaacatcgatcgaagcttggtccgcgaattggctgga

SEQ ID NO: 1696 - DNA, 966 bp, unidentified
  source 1..966: mol_type = unassigned DNA; note = Bacteriophage uvig_368674 from the Index of /pub/databases/metagenomics/genome_sets/gut_phage_database (ebi.ac.uk)
aagaaaaaacgcaaggtggagggagctgataagcgcaccgccgatggttccgagttcgaaagccccaagaagaagaggaaagtctagttctgcagagggtgatgccattcgacgaacttgtttattgcagcttataatggttacaaataaagcaatagcatcacaaatttcacaaataaagcatttttttcactgcattctagttgtggtttgtccaaactcatcaatgtatcttagtaccgcattcatttcagtgagagcttactcatcagagttcgtaacatatagttttgataacgaatttgaaagcgaggcgatagcaaatggatagatacattatagccatatatctgcgtttgtctgttgaagataagcgtgttgagagtatgagcattgaatcacaaaggcttttgctccgtaaatatgcggaagctctcggcgataatgttgaaattatcgaatatgttgacaacggctattccgggactaatcttgaacgccccgccgttcagcagcttttgaatgatgttaaagcttataaggtgaattgcattttggtaaaggacttctcccgtttcgacgtccgtatcagactaacgcttatccatttggaggacgcattaaaacagcttgaaaccaagcttgacgagtgcagaaacaacacctcgaaaaagctgcaatggatagaacgcttcaaagcctttgaaaatattgataaaatcgaccgcaatattgttatccgccttatagagtgcatccatatttatgataagaaacatatacagatagcatttaatttcaaggacgaatacgaacaggcattatccgcattaagcgaatatcgggaggtggtttgatatggcaagaaaaagcagaaaaaatatcactgttgcacagacaaagccggaggaatcgtcgactgcacgatcaaacatcgatcgaagctggacttctaggagcgttgga

SEQ ID NO: 1697 - DNA, 966 bp, unidentified
  source 1..966: mol_type = unassigned DNA; note = Bacteriophage uvig_538311 from the Index of /pub/databases/metagenomics/genome_sets/gut_phage_database (ebi.ac.uk)
aagaaaaaacgcaaggtggagggagctgataagcgcaccgccgatggttccgagttcgaaagccccaagaagaagaggaaagtctagttctgcagagggtgatgccattcgacgaacttgtttattgcagcttataatggttacaaataaagcaatagcatcacaaatttcacaaataaagcatttttttcactgcattctagttgtggtttgtccaaactcatcaatgtatcttagtaccgcattcatttcagtgagagcttactcatcagagttcgttgacaagcccctgaatgataaaaaaacgctgtatagcgatgaaaatgcttgattatatgattgtacgttttagtgttactatttgaatggctgagagtataggataacaccctgcatagcctgtttgaatgcggtggcatcggtgtaggcggtgtcgtttacatagacatatccgtcaatagtcgcattggttgctatgcccacaggtgctgcgtcactccatacctcattttgcgattttgctaaatattttgaacataatatattcgatgcaatagcagaattatacgacaatttctgacgtccgtatcagactaacgcttatccatctacaaggactgccccgtgagaacttcggagtacaccattgacggaaagaaatatatcgtcaagagccactttgtaggtgctaaggaactgaatgatgtgctgtatcgcattgcctttgaacaggcgatggacgaggtattgaaaacggcataaaattacggaaagttacgaaaaaaggcttgccaaattcggcgttatgcgctataatagtaatgtcgaatttggctgctttgtttgaaaggagttactatggcaaagcagaccatttacaacgcaggaatttacgttcgtctctcgcaggaatcgtcgactgcacgatcaaacatcgatcgaagctattatgttcgcctagaacga

SEQ ID NO: 1698 - DNA, 966 bp, unidentified
  source 1..966: mol_type = unassigned DNA; note = Bacteriophage uvig_131471 from the Index of /pub/databases/metagenomics/genome_sets/gut_phage_database (ebi.ac.uk)
aagaaaaaacgcaaggtggagggagctgataagcgcaccgccgatggttccgagttcgaaagccccaagaagaagaggaaagtctagttctgcagagggtgatgccattcgacgaacttgtttattgcagcttataatggttacaaataaagcaatagcatcacaaatttcacaaataaagcatttttttcactgcattctagttgtggtttgtccaaactcatcaatgtatcttagtaccgcattcatttcagtgagagcttactcatcagagttcgaggaaaaactcacggaggttttggaaaaccggagtgagcgcaaccgctggatttcacagtttacgcagttctccacgctggaaaccttagaccgcagggcgctcattcacatggtacagagcatccgcgtccgtgggaagaaggagctggatattacctttacccatgaggacgaatacaaaaaggcgttgcagcttctggcgctggcagcgcagcagaaagattacgaacagagaaaggtgggctgagcatggcaaggaaaagcagaaaagaaacggctgcggtggccgtgcaggaggcgacgtccgtatcagactaacgcttatccataaagcgagtttgaaacctatgcggaggtgctggaacaatgcagaaatatgtaatcgccctctacatccgcctttccatcgaggattacaagtacgacagtctgagcattgaaaatcagagccttgttctccatgaatacgcggcgtccatgcccgaagccctgaacgcagagatcatggagttcatcgacaatgggtacagcggcacaaattttgagcgtccgcaggtacagaagctcattgagctggtgcgggccaatcaaatcgactgcatcatcgtcaaggatttttcccgcttcggggaatcgtcgactgcacgatcaaacatcgatcgaagctatacatgacgtcgtcaacga

SEQ ID NO: 1699 - DNA, 966 bp, unidentified
  source 1..966: mol_type = unassigned DNA; note = Bacteriophage uvig_435486 from the Index of /pub/databases/metagenomics/genome_sets/gut_phage_database (ebi.ac.uk)
aagaaaaaacgcaaggtggagggagctgataagcgcaccgccgatggttccgagttcgaaagccccaagaagaagaggaaagtctagttctgcagagggtgatgccattcgacgaacttgtttattgcagcttataatggttacaaataaagcaatagcatcacaaatttcacaaataaagcatttttttcactgcattctagttgtggtttgtccaaactcatcaatgtatcttagtaccgcattcatttcagtgagagcttactcatcagagttcgttgatcatattgttgtccataaagatgactcactcgatatttttttacgctagtaggcagtaaactacatgtacccatttggatacatttagtttactgctatttatgataaatattactttttgtcatgattttgtaagatttgatcgctacactattaatcaggaggtgataatatggaaatcgaaatcaagcctgaagatctatctttatttttagataagattgggcctaataatattaataggatagaagtctatggaataaatgaagatggatcgagagaaaagattgatccatgacgtccgtatcagactaacgcttatccatttatatttgaaaaaaagacctcggtccacacgggataccgaagcctaataaaattataacataaaaaaatcctccagcactgcaatgctgaaggagtgttgaagaggtgtactgcaatacacccaatacataaaaagaatggctaccaaccatatatctttttatgtactcattttaccacaagcaattaattgcttcaattatgcaattaatttgcaatatatttaataaaaaagaaaggatgagtacaatgcaaaatgtacgaatatacgcacgtgtttctacagccgagcaaaagaaggaatcgtcgactgcacgatcaaacatcgatcgaagcttgttgttggagaagtaacga

SEQ ID NO: 1700 - DNA, 966 bp, unidentified
  source 1..966: mol_type = unassigned DNA; note = Bacteriophage uvig_136059 from the Index of /pub/databases/metagenomics/genome_sets/gut_phage_database (ebi.ac.uk)
aagaaaaaacgcaaggtggagggagctgataagcgcaccgccgatggttccgagttcgaaagccccaagaagaagaggaaagtctagttctgcagagggtgatgccattcgacgaacttgtttattgcagcttataatggttacaaataaagcaatagcatcacaaatttcacaaataaagcatttttttcactgcattctagttgtggtttgtccaaactcatcaatgtatcttagtaccgcattcatttcagtgagagcttactcatcagagttcgtgagggattctattgctttcaaacactgttctaaaggatttaccggctacaattaaagcatatactgttctttgtcctgatggaacatataccatcgttctaaattcaagactttcgcacgaacagcagcttgaagcgtataagcatgagttaaaacatattatggataatgattttgatattgaaaacggtgatgctgatgcgattgaacaatatgctcataatgaataggaaaattaggtgattacatatgttatacgatataaaaagtgttgacttagaaaacataattatatatttgacgtccgtatcagactaacgcttatccattaggtcggcatgtagagaacaaattcaacattgaagtaacattgcgtctttaatctccaacgttaatgagcaagttcttctgtaccgatatcggtcaacagtctatgccgcttcggggcataaaaataaggcgtacatttttcatgccgcctttagatacgcacccgcagcccattcaaatccgaagtcctcacacccacaagataccagttgtccccgtactccatgcgggtcggcttccatttgccgcgtacaaatacttcaaagcaatccccacaatgcaatcctccgtagtagtcgggaatcgtcgactgcacgatcaaacatcgatcgaagctttgccttaggaccaagacga

SEQ ID NO: 1701 - DNA, 966 bp, unidentified
  source 1..966: mol_type = unassigned DNA; note = Bacteriophage uvig_279733 from the Index of /pub/databases/metagenomics/genome_sets/gut_phage_database (ebi.ac.uk)
aagaaaaaacgcaaggtggagggagctgataagcgcaccgccgatggttccgagttcgaaagccccaagaagaagaggaaagtctagttctgcagagggtgatgccattcgacgaacttgtttattgcagcttataatggttacaaataaagcaatagcatcacaaatttcacaaataaagcatttttttcactgcattctagttgtggtttgtccaaactcatcaatgtatcttagtaccgcattcatttcagtgagagcttactcatcagagttcgatgaagataaaatgagctctgccaaagcagaacttgcagaatgtgaaaaagtagccatagagataaaaaaacaatttgaacagtataagacgcttgaaaaagacgaaaaagaactgaaagctggatgtacattaactgcagagcttgtatcacgtttaattgagcgtattgaagtggatcacgataaacatgtctctatcagattccgcttccgtacagagtttcaggaatacagcaaggcggtggcacaatgaaaaaatatgtgattgctctatatatccgtctgtctttggaagatttgacgtccgtatcagactaacgcttatccataccctaacaagagggttgagatcgtgctaaaaataaaaaatgacctggcataacagctcagggtatattgataaagccagttaggaattgcggttcttaactggcttttagaagttgaaaaaaatcttcatatttttttgtcgtggacttgacataagggtgccgtaaatcatggaaacggaaatgttcaagaccaagagccttaacggcccatctgaagcggtgggagatatgtgtgggcgttgcttggatgacatttcccttagagcttacttttttcaattcggcgataagaccgtcggaatcgtcgactgcacgatcaaacatcgatcgaagcttgtcatatctcgtgagacga

SEQ ID NO: 1702 - DNA, 966 bp, unidentified
  source 1..966: mol_type = unassigned DNA; note = Bacteriophage uvig_58086 from the Index of /pub/databases/metagenomics/genome_sets/gut_phage_database (ebi.ac.uk)
aagaaaaaacgcaaggtggagggagctgataagcgcaccgccgatggttccgagttcgaaagccccaagaagaagaggaaagtctagttctgcagagggtgatgccattcgacgaacttgtttattgcagcttataatggttacaaataaagcaatagcatcacaaatttcacaaataaagcatttttttcactgcattctagttgtggtttgtccaaactcatcaatgtatcttagtaccgcattcatttcagtgagagcttactcatcagagttcggagagtaaactttatgaggcaattaataaatactttggttgggattgttttaaagaaaatgatttcaaaacaaaagtagaataccttattgctaaaccaaataatgagatagaaatgcacttcaaagatgggaatgttgcaataatcaaatgggaagatagaagtcgtagtgaatcttggacttctgagatgaaagaaaaagcaaggcaaaaaaagattgaacaatacaaaaaaagaggaggtggattaaatgggtaaagttagaataattccacaaacaatcaatccattaactcaagtgacgtccgtatcagactaacgcttatccatgggataagaaactaacatttaagtttagaaacggcaaggaaatagaagtataagaaattagataagtattgaccttcatcagaaatggtgggggttttttgcaaatgcaaagaaatgcaacttgcattaattgacaaatgcaataagtttttttataattatgttatcttgataatcgaggtaaataattatggagtatgaaaaaataatattagaacttatggaaagagtcgcaaaactcgaagaaagggtagatgtcttagaaaatcctcaaaaattgaaaccatctagaggaacataggaatcgtcgactgcacgatcaaacatcgatcgaagctccaagagaattagaccacga

SEQ ID NO: 1703 - DNA, 966 bp, unidentified
  source 1..966: mol_type = unassigned DNA; note = Bacteriophage uvig_564581 from the Index of /pub/databases/metagenomics/genome_sets/gut_phage_database (ebi.ac.uk)
aagaaaaaacgcaaggtggagggagctgataagcgcaccgccgatggttccgagttcgaaagccccaagaagaagaggaaagtctagttctgcagagggtgatgccattcgacgaacttgtttattgcagcttataatggttacaaataaagcaatagcatcacaaatttcacaaataaagcatttttttcactgcattctagttgtggtttgtccaaactcatcaatgtatcttagtaccgcattcatttcagtgagagcttactcatcagagttcgtacgtgtatgaacaggttcacgaagaccccgcggcatacgatgttgtttcaatggatgattattcggacctagaggacgaccaaaaccgttccgaagaatatgagaaaacaagtgctccgtctgatactccggacgaatacgatatcttcacgctccttcttattggagttgcaatagccggaggctcatattatatgggtacaaagaagaataaataggaaacagaggtacaaacaaggtggtgatagtatgagatgtgcactttatatcagagtatcttctgatgaacaaaagagaaagacgtccgtatcagactaacgcttatccatttgaggggctttacccgaagcaagtcttttttatcggtcaggaaagcctctaacgtacatgacagttctgtcacgttacttagaggctaccatccctataccatagtgaagtattttgcaaccttatacggtggtgcgtcctcgtcgttcaggaagtcctgtgccaagtcgaaatagaagtctggagagtcacctgcatatttctgtccagtatccttggagtcgttataatacatattcattgccagataaaactctttaaagtggtcttctagtcctttggatttcacaaaatttacaggaatcgtcgactgcacgatcaaacatcgatcgaagctcctgtgcagagatgccacga

SEQ ID NO: 1704 - DNA, 966 bp, unidentified
  source 1..966: mol_type = unassigned DNA; note = Bacteriophage ivig_3762 from the Index of /pub/databases/metagenomics/genome_sets/gut_phage_database (ebi.ac.uk)
aagaaaaaacgcaaggtggagggagctgataagcgcaccgccgatggttccgagttcgaaagccccaagaagaagaggaaagtctagttctgcagagggtgatgccattcgacgaacttgtttattgcagcttataatggttacaaataaagcaatagcatcacaaatttcacaaataaagcatttttttcactgcattctagttgtggtttgtccaaactcatcaatgtatcttagtaccgcattcatttcagtgagagcttactcatcagagttcgattttttcatataaagaaggaaatgaaacggtgacaaattgtcaccagttgaaaatgaaggtatgccccactacttgatgattcaaataaataaaaaccgccccggagccaaccgggacggaaacttaatactgtacagaccgaagtcggtaagtatttcctgaacaaaaatattttaccatgaaacttcaacatctgtataggtgttatttttatactcttttttcataaactgtacaggaggattgctatgaagaaacaactaaacctttatggtcattattgtgcctatctccgtaagacgtccgtatcagactaacgcttatccatagcctaatttcaaactgcatttatatcccaaatttttttcagataattactgacaacatcatggtacagacgaactggcgcatttcgagatgatcggtgctattacatagatgttatcagtaaaaaatcggcctgggcgctagcccggccgattaccgtagttgtgcattcaaattgtatcttgaaggggtatcttccttatttataatatgttcctccgcaatttctgccgttttaaacagccgatcagctcttactcttaacgctgttttacggtttgaaatatatcttattgtataaggaatcgtcgactgcacgatcaaacatcgatcgaagctattcggacaagcgagtacga

SEQ ID NO: 1705 - DNA, 966 bp, unidentified
  source 1..966: mol_type = unassigned DNA; note = Bacteriophage uvig_580293 from the Index of /pub/databases/metagenomics/genome_sets/gut_phage_database (ebi.ac.uk)
aagaaaaaacgcaaggtggagggagctgataagcgcaccgccgatggttccgagttcgaaagccccaagaagaagaggaaagtctagttctgcagagggtgatgccattcgacgaacttgtttattgcagcttataatggttacaaataaagcaatagcatcacaaatttcacaaataaagcatttttttcactgcattctagttgtggtttgtccaaactcatcaatgtatcttagtaccgcattcatttcagtgagagcttactcatcagagttcgtcggaacttgctcgcgcttgcaatatatccgcgtcaacggtcaattcgtggtggaatcgttcttgtgaaaatatcagtttgcagacgcttttgaagttggcaaagttctttaattgcacgattgaggaacttgtaaacggcgcacccgaaaagtcgtatacttttgatttgaacgaatacacttttgcggaacttgaactaatccgtttttatgcagggttcttgaaagcaaacagagggaggacaacgaatgaaatcatcaagcgtggctttatacctccgaaagagtagggaagaagagacgtccgtatcagactaacgcttatccataccgttggcacaaggtggattcgctcgaattaaagatttttcttaaattgtaaaatttgctattgaaaaaagaaagggggtgtgttatcttataaacagtaatcatacaaatgcagtttcatttgcagttcaatgattactgtttatttttttatccattaaacacgcaaaagtgcatttcccccgtgcttttgcgtcatatcccttttacgaccgagcggcaagtcgttaaactgcgggtgtggacgagccaatgcagaaagtcgtctcggtgctaatcgcggagagaataacgcggcaggaatcgtcgactgcacgatcaaacatcgatcgaagctcttcttatcggtgcgtacga

SEQ ID NO: 1706 - DNA, 966 bp, unidentified
  source 1..966: mol_type = unassigned DNA; note = Bacteriophage uvig_584862 from the Index of /pub/databases/metagenomics/genome_sets/gut_phage_database (ebi.ac.uk)
aagaaaaaacgcaaggtggagggagctgataagcgcaccgccgatggttccgagttcgaaagccccaagaagaagaggaaagtctagttctgcagagggtgatgccattcgacgaacttgtttattgcagcttataatggttacaaataaagcaatagcatcacaaatttcacaaataaagcatttttttcactgcattctagttgtggtttgtccaaactcatcaatgtatcttagtaccgcattcatttcagtgagagcttactcatcagagttcgcatgcaaaatgagaacgaaaccaaagtgacatgggttttgtccgaacaagaaaaaaccctcgttgaattattccgaggaacaaccgaagaggggcgatttgagattataacagccgttatgaacatcattaaagagaaagaaaaaaaggttacggcagaaaatacagagtgtgtgggttaaacaacgcgacagaaaagtcatcccgtgggaactcgttcacctctacaagaagttgaggaaactggaaaaatgaatgtggttttatacttgaggtacagcagtgacaaacagtccgaacagacgtccgtatcagactaacgcttatccattattgtttcttggtcatgttatggtttatacaacaaaataccggacgaattagttttcgtccggtatttttgttatttgcatcattcggtatttccatcattgtcaacgtcatcgttatgtacgggggtgcgtttctctgcactctgctcctgcccctctccggattcggaaaagccgggtaattcaattttcgtgatgtcctcaccgctcgccgccgctttcatcaactgtttgaaaatttgatttgttccggtcgccgcaagccctgacacagcgcccgaaataatcgctgctgtaagggaatcgtcgactgcacgatcaaacatcgatcgaagctgtgattctcgcagccagcga

SEQ ID NO: 1707 - DNA, 966 bp, unidentified
  source 1..966: mol_type = unassigned DNA; note = Bacteriophage uvig_195589 from the Index of /pub/databases/metagenomics/genome_sets/gut_phage_database (ebi.ac.uk)
aagaaaaaacgcaaggtggagggagctgataagcgcaccgccgatggttccgagttcgaaagccccaagaagaagaggaaagtctagttctgcagagggtgatgccattcgacgaacttgtttattgcagcttataatggttacaaataaagcaatagcatcacaaatttcacaaataaagcatttttttcactgcattctagttgtggtttgtccaaactcatcaatgtatcttagtaccgcattcatttcagtgagagcttactcatcagagttcgctagaacatctaagaaagaagattttaaactggatatctcctatcatcaatagcagcctcattttttgggttgctatttttattcatctattaattttcttatttgtcctccgccttcttctatttgctttttagattttagtagtctttccatatattctggattgttatatatatcctcattgcctactggtttccctgtatcccattcctcaaatttatattcaccctcaaaacctttgattaattctttaaatgttttaggtttctcatttttcttatcttccatataatcaccccgacgtccgtatcagactaacgcttatccatcaactatttgtgataaaaagtacggaattattaatgaaaatgtgagcattaaagagaaacatctatataaggaagcttgccatttcctctttgagcataaccataaagatgttacgattgtcagaggtcgtatctatacgcatgagtggttgcagttgtttgatgacttcattaataaaaaagccacattaggtaaagagttcttctctctggcagaaaaaacccttaaacggaagaaagaagagatagcatgagttacctttggggattggttgtagctatttatttgagaaagtcacgggaatcgtcgactgcacgatcaaacatcgatcgaagctcactcagcacgcactagcga

SEQ ID NO: 1708 - DNA, 966 bp, unidentified
  source 1..966: mol_type = unassigned DNA; note = Bacteriophage uvig_27141 from the Index of /pub/databases/metagenomics/genome_sets/gut_phage_database (ebi.ac.uk)
aagaaaaaacgcaaggtggagggagctgataagcgcaccgccgatggttccgagttcgaaagccccaagaagaagaggaaagtctagttctgcagagggtgatgccattcgacgaacttgtttattgcagcttataatggttacaaataaagcaatagcatcacaaatttcacaaataaagcatttttttcactgcattctagttgtggtttgtccaaactcatcaatgtatcttagtaccgcattcatttcagtgagagcttactcatcagagttcgtagtaaatgaagaagatgtaatcgtttatttaaacatccctattacaaagtgaaatagcatataattcgtgtatgtcaaaaagtgatcacctcatctgcaccatagtgacatgcacagttaagagatagatttattctatctcttgtgtgtcatagttttatcaaagcaattcatatagatttgaatatcgctttcatttaccactattttttttactacaagatttatcaattcttttaatggagttgattcttcttctaacatttgttctgctttagatagcagtttttttatttgttgacgtccgtatcagactaacgcttatccatggagaaaacaaagatgaaagaagaaagaactataattataaaagaaaatgaaaatgctgaagaaatagaggcttatgaagaaaaaatcattaaacttttagcagaaatattgatggaaatacaagaataaataaaaaacttggaatttgtacttgacaaatccaatagttttgcgatatactccataatgtaacaacgtagggtctatagaaagtatcagatgtacacacacaaaaaaggagcgtgtattatgatagaaaactatttagacaaaattaagcaaaggttgaatgttgtagtggaatcgtcgactgcacgatcaaacatcgatcgaagctcatgatacctagaggcgcga

SEQ ID NO: 1709 - DNA, 966 bp, unidentified
  source 1..966: mol_type = unassigned DNA; note = Bacteriophage uvig_173343 from the Index of /pub/databases/metagenomics/genome_sets/gut_phage_database (ebi.ac.uk)
aagaaaaaacgcaaggtggagggagctgataagcgcaccgccgatggttccgagttcgaaagccccaagaagaagaggaaagtctagttctgcagagggtgatgccattcgacgaacttgtttattgcagcttataatggttacaaataaagcaatagcatcacaaatttcacaaataaagcatttttttcactgcattctagttgtggtttgtccaaactcatcaatgtatcttagtaccgcattcatttcagtgagagcttactcatcagagttcgatgcttgctatattgcttaccggttcggaggtgtccgccatggataaggagttattttttaatgaaataacttttcaggtaacgataaatctggcaaggaaaatgttgaatgataaacttattactaagaaggagtaccagtccttcaagaaggaaatgattcataaatatcaagcgtttttcggggatttatacacttgataattctactggttagagtgatatatatagttggaaggagggttcaactatggaaaagaaaatgtggaaaatagaacagaaggttaccgaaatttccaagacgtccgtatcagactaacgcttatccatccctgctgttccggttttattctagagaaaataaagaggtgcaattgccatgaaaaaagtgcaggttataccagctacactacagaattacacagaaaagcctattcatagccagaaaaagagaagggtcgccgggtatgcacgcgtttcaaccgaccgggatgaacagcttacaagttatgaagcacaggttgactattatacaaattatataaagggacgcagcgactgggaattcgctgggatgtatacggatgaaggaatttcagcgacaaataccttgcatagggaaggctttaaggaatcgtcgactgcacgatcaaacatcgatcgaagctaagagcctaccatgtcgcga

SEQ ID NO: 1710 - DNA, 966 bp, unidentified
  source 1..966: mol_type = unassigned DNA; note = Bacteriophage uvig_9846 from the Index of /pub/databases/metagenomics/genome_sets/gut_phage_database (ebi.ac.uk)
aagaaaaaacgcaaggtggagggagctgataagcgcaccgccgatggttccgagttcgaaagccccaagaagaagaggaaagtctagttctgcagagggtgatgccattcgacgaacttgtttattgcagcttataatggttacaaataaagcaatagcatcacaaatttcacaaataaagcatttttttcactgcattctagttgtggtttgtccaaactcatcaatgtatcttagtaccgcattcatttcagtgagagcttactcatcagagttcgacaccttcaaacccatgcttgaaagtgctaatttttctaatggtgggcgttgagaggctcgaactcccgacatcttccttgtaagggaagcgctctaccaactgagctaaacgcccgaatcaattggtttgtataactatattactaaataaatatgctctgtcaataattttgttatttttttgaaaaaagtccgagaagtttatctaaaaatccctgttcatcaaccatttcaccactggcgagaagatcaactttcttttttatttcctctttttcatcagaattaggtgcaaatttgacgtccgtatcagactaacgcttatccattttcttactaactccttgattctcttacccagcgtaattgttgtttcagtcatcttttcatacctcatttaattctgtaacaagcccggacaacaacattatggttacatttatgtaaaagtaaaacatttgtagaggcgtttttatagggttttcaaaaagatatgatgaattgtaaaactcttatatgctttatatggcattttagaagtatacaaagtagaatatgtttaagtttggataagtaaatatgaagaaaaaaggcgtattatacacaagagtctcaagcgaccctcaagaggaatcgtcgactgcacgatcaaacatcgatcgaagctgttcctcgctaggtatgcga

SEQ ID NO: 1711 - DNA, 966 bp, unidentified
  source 1..966: mol_type = unassigned DNA; note = Bacteriophage uvig_278778 from the Index of /pub/databases/metagenomics/genome_sets/gut_phage_database (ebi.ac.uk)
aagaaaaaacgcaaggtggagggagctgataagcgcaccgccgatggttccgagttcgaaagccccaagaagaagaggaaagtctagttctgcagagggtgatgccattcgacgaacttgtttattgcagcttataatggttacaaataaagcaatagcatcacaaatttcacaaataaagcatttttttcactgcattctagttgtggtttgtccaaactcatcaatgtatcttagtaccgcattcatttcagtgagagcttactcatcagagttcgcgcccggaacagatgataaagcgtaccgacgatgatatgcgccgcgaattcgcctacattgctgccggacagatcacgcagaaactgctcgacaagggacttatcacacccggcgaattcgacaagatcatggcgaaaaaccgcgaaaaattctcgccggcaatcgcaaagattatgccctgaatgacttgctattccgggctttcagagtgatatatactatacccctttaaggacaggaggcgagacaatgaaacggataacaaagatcgacgcggcggcgaaggaaacgaaaaaactgacgtccgtatcagactaacgcttatccataggaagtcggattcgccatgaagtgcggccccgtcttccgggaaaggatatgaggctatggaacacacaccgttcggatatgtgatcgttgacggcagaccgaaagtacacgatatggaggccgcgaggcttgccgcgctctactcggcataccttctcggaatgtcgtacgaaaatgccgccgaggtggcaggcatcaaagcgactcacagcatgatcaagcgtctgcttcacaataaacggtatcttggggacgacatttacccccggatcatcgatgacgatacgttcaatgccgtgggaatcgtcgactgcacgatcaaacatcgatcgaagctactctatgtgacgagtgcga

SEQ ID NO: 1712 - DNA, 966 bp, unidentified
  source 1..966: mol_type = unassigned DNA; note = Bacteriophage uvig_178349 from the Index of /pub/databases/metagenomics/genome_sets/gut_phage_database (ebi.ac.uk)
aagaaaaaacgcaaggtggagggagctgataagcgcaccgccgatggttccgagttcgaaagccccaagaagaagaggaaagtctagttctgcagagggtgatgccattcgacgaacttgtttattgcagcttataatggttacaaataaagcaatagcatcacaaatttcacaaataaagcatttttttcactgcattctagttgtggtttgtccaaactcatcaatgtatcttagtaccgcattcatttcagtgagagcttactcatcagagttcgtcttctatatcgaactgggaaatagatcgtagagttccatcattaaaagaacttgaacgaatagcaaagtattttggggttgggttagattattttggggttcaaacaacggatgatttatttgatattgtcgcaagggcaaaagaaatattcaataatgacaatatctctattgaagtaaaagaagaattatatcttgaaatgatgaaattgtatatggcattaaaagaaaacaactaggggtgcagttatgaatatagaatattcagggcttgtggcagatgcatattgtagatattcgacgtccgtatcagactaacgcttatccatccaagttcgctttaagtagagatataagccgttacgatataaataaattatagcaaatattcacaaaataaaaagggcagggatttattcctgtcctcctttctctttttttaatatatccataacttctaaactatcttttagcatttgcaataattgttctttggttttaatcggtttagttattgtcgaatgaaaaatcattttatcatctttcacaatctcaaagttataaaacttctctccaaacatataatctttataactaaatgctttgtatccgttatgatccacacttaaggaatcgtcgactgcacgatcaaacatcgatcgaagcttgacgtatagttggctgcga

SEQ ID NO: 1713 - DNA, 966 bp, unidentified
  source 1..966: mol_type = unassigned DNA; note = Bacteriophage uvig_286852 from the Index of /pub/databases/metagenomics/genome_sets/gut_phage_database (ebi.ac.uk)
aagaaaaaacgcaaggtggagggagctgataagcgcaccgccgatggttccgagttcgaaagccccaagaagaagaggaaagtctagttctgcagagggtgatgccattcgacgaacttgtttattgcagcttataatggttacaaataaagcaatagcatcacaaatttcacaaataaagcatttttttcactgcattctagttgtggtttgtccaaactcatcaatgtatcttagtaccgcattcatttcagtgagagcttactcatcagagttcgccgcgtgcagcggcggcgcaaacgagagaacaaatgtctgcatcaaggcataagaaaagcagacctgcctaaacaagtctgctttcatggtggacgatagctccccaaatccgaacccttccccggaaggagagtcagcgttgttgctgacccggaaagtcttggttttgcaggaagtgaggttgtatgcggtggtgattttatatccgtcaggttcgtcccatactgtcacggagtttaccagaaggtcgatgatacgccgcctgcaatcctcgtcctctatatcgcctccttggaactgacgtccgtatcagactaacgcttatccattgtctcccagtggatcgttattgacgggtgtaccgttatcctccactatgccgcaagcagtgaccctgcggcagcacgcgctgtgcaaaatagcctgtttaacttccaaagctcgccgcagccgattttttgcaatgacggcgaaagtgtgagataataatggtgtaaggtgtaccttgaaaaataaatagagaacaaaaagttcaagactacacgccattttccggtggggaaatgaggtgtatgtaacatggaaaacgtaaagcgagtatattgcctgtaccgcgtttcgaccgtgggggaatcgtcgactgcacgatcaaacatcgatcgaagctttcaccgtatacgtctgcga

SEQ ID NO: 1714 - DNA, 966 bp, unidentified
  source 1..966: mol_type = unassigned DNA; note = Bacteriophage uvig_452261 from the Index of /pub/databases/metagenomics/genome_sets/gut_phage_database (ebi.ac.uk)
aagaaaaaacgcaaggtggagggagctgataagcgcaccgccgatggttccgagttcgaaagccccaagaagaagaggaaagtctagttctgcagagggtgatgccattcgacgaacttgtttattgcagcttataatggttacaaataaagcaatagcatcacaaatttcacaaataaagcatttttttcactgcattctagttgtggtttgtccaaactcatcaatgtatcttagtaccgcattcatttcagtgagagcttactcatcagagttcggcattgatatttattacagctttgtaggcaagattgacttgcccgaagaataaagcccgacctatccgacaccctgcgcaagtgccggataggaacggcaaaattttttacacttctattacttctttatcacacataagcaaatattcaggagtttaaatgccttataaataaggcaaaaaaacaagctgacgaactgcaagatacaattaatcagcttgagtttttcaattttcattttaagtttgcgactgatgagtagctttttgttcttcaatcatattttcagctattgctacagacgtccgtatcagactaacgcttatccatcgccgcccggattgcgtgacggaaatccgcataggtaattctgtccttgtcgtttccggctatttcaagcaggacaccaccgccaccgccgccgataaaatgctgaaagtgctggaagcggaagctgctacacaaaaatcggcaatttgacgggacgtaaagaagcagaaaggactgtacagccagccccggcgtgtggtatgatagtcatacggaatagtggggctggctgtcggaaatggaggacactatgttaagacagaccacccgaaaccttattaccgccctttatccgagattggaatcgtcgactgcacgatcaaacatcgatcgaagctgtctagtctatacgttgcga

SEQ ID NO: 1715 - DNA, 966 bp, unidentified
  source 1..966: mol_type = unassigned DNA; note = Bacteriophage uvig_70560 from the Index of /pub/databases/metagenomics/genome_sets/gut_phage_database (ebi.ac.uk)
aagaaaaaacgcaaggtggagggagctgataagcgcaccgccgatggttccgagttcgaaagccccaagaagaagaggaaagtctagttctgcagagggtgatgccattcgacgaacttgtttattgcagcttataatggttacaaataaagcaatagcatcacaaatttcacaaataaagcatttttttcactgcattctagttgtggtttgtccaaactcatcaatgtatcttagtaccgcattcatttcagtgagagcttactcatcagagttcgtcaaactgtctctcggtgtcgtacattttgcgagtagcgggaactggatttgaaccagcgacaccacgggtatgaaccgtgtgctctagccaactgtatctgtacgccatcaggatattttatatagtttgtgccaatcgctggcaattttttatttagttgtttaaccgccattgcatccacaaagaatcctggttctgtaactaagtcaatctcatcaagcgtaactattctgtcactgttgattttgtttattgccgcccgctcttcattcacctcctttgctccaaacgcggatccgacgtccgtatcagactaacgcttatccatatccccaataaaacttagggttgatgacaacatggcttacgatgacgcacaggactcacataccttacaggagcaagagataccagttgcataattaaaaaccgcccctgcgccaacaggaacggttttagatgcactccgaagagatacacccctattcaaatatattgtatcatcttcgagcagccaatgcaagagaacgaaagttcgctggctgttatttttatactattttcaaggaggacaaataatgaataaacgcgtagccggttatgcccggtactctacagacaatcagacggaatcgtcgactgcacgatcaaacatcgatcgaagctacattgccgcagtgttgcga

SEQ ID NO: 1716 - DNA, 966 bp, unidentified
  source 1..966: mol_type = unassigned DNA; note = Bacteriophage ivig_2547 from the Index of /pub/databases/metagenomics/genome_sets/gut_phage_database (ebi.ac.uk)
aagaaaaaacgcaaggtggagggagctgataagcgcaccgccgatggttccgagttcgaaagccccaagaagaagaggaaagtctagttctgcagagggtgatgccattcgacgaacttgtttattgcagcttataatggttacaaataaagcaatagcatcacaaatttcacaaataaagcatttttttcactgcattctagttgtggtttgtccaaactcatcaatgtatcttagtaccgcattcatttcagtgagagcttactcatcagagttcgatggataaaccgaaaatggaatttaaaattacgacccaagaaatcattgatgacttgcactaccatcaagcccaagccatcgcagaagattttctagctcgcggactaatcaatcaaagtcagtttgaagaaattgaaaaattaaaccggcaatcattcccaccactattagctgagttaatggtctgaatcgttgctatatcaaggttttagagctaacatcacacactgatgaaaggaggtacataaaatggcaagcgtaactaaacttactaaaccacaatcaaaagtccaggcaacgacgtccgtatcagactaacgcttatccattcaagtgtggattaaatctaactgaagggagtaaacatcatgtcaaagcttaaatacggttatcaatggcaagccggacaaattgtcatcaaccctgaccaagctgatgtaatcaagcaaatcttcgctggttttcttgctggccagactcgcaatcatctagcgcgccaatttaacttaactcatacttctgttttgcgaatcttaacttcaaataaatatgttggtggagacggctacccacaaatcattaccactaccaacttcaagcaggtacagaagcaactgaaaaagcagattggaatcgtcgactgcacgatcaaacatcgatcgaagctataggtgacgcttgaaccga

SEQ ID NO: 1717 - DNA, 966 bp, unidentified
  source 1..966: mol_type = unassigned DNA; note = Bacteriophage uvig_443823 from the Index of /pub/databases/metagenomics/genome_sets/gut_phage_database (ebi.ac.uk)
aagaaaaaacgcaaggtggagggagctgataagcgcaccgccgatggttccgagttcgaaagccccaagaagaagaggaaagtctagttctgcagagggtgatgccattcgacgaacttgtttattgcagcttataatggttacaaataaagcaatagcatcacaaatttcacaaataaagcatttttttcactgcattctagttgtggtttgtccaaactcatcaatgtatcttagtaccgcattcatttcagtgagagcttactcatcagagttcgagggagtcgaaccctcggcctctgccatgcgacggcagcgctctcccaactgagctacgtccccaggacaagttgatattttacctacggctcgccaactgtcaacgcccaatacccagtctttttgggacggggctgttttgactacttttcgaacgcccgagccacccgatggttatttatcccccgtcccagaaaaatcatcgacgaacgcactactttgcgctggtaagaacaccggtggtgtcgaaggccggggtgaagctctcgtctaccgcgccgccctcttgccagaacatcgacgtccgtatcagactaacgcttatccatgctctggcgttaggttgctcgccgaatgagatattgagttgggatggtgaagataatgaaggtgacaaaatcactagcgatgaacgtgaaatcgtcgataactaccgtgacagctcgccggaatggcaacagaacatttcgatgaccgccagggctgctgcatctgaatcaaaaagaaaataaaaaagccccagcgctaccgtccaaagtctcgcaggggcatacctagaaaaggcaaggtgattttatcatgccaaaaggcatacgtgccgccatctatgcacgtttcagttcgcataaggaatcgtcgactgcacgatcaaacatcgatcgaagctcaatctcgtgcaatgaccga

SEQ ID NO: 1718 - DNA, 966 bp, unidentified
  source 1..966: mol_type = unassigned DNA; note = Bacteriophage uvig_268778 from the Index of /pub/databases/metagenomics/genome_sets/gut_phage_database (ebi.ac.uk)
aagaaaaaacgcaaggtggagggagctgataagcgcaccgccgatggttccgagttcgaaagccccaagaagaagaggaaagtctagttctgcagagggtgatgccattcgacgaacttgtttattgcagcttataatggttacaaataaagcaatagcatcacaaatttcacaaataaagcatttttttcactgcattctagttgtggtttgtccaaactcatcaatgtatcttagtaccgcattcatttcagtgagagcttactcatcagagttcggttcttaaaacaggtgggaaatccatatatgctgcgtcgtggaagtatgatgattaaggtaagctttgcgaataatggactgtcgatggaacaggcatttgaaaatctgcttttgaatgtctgaaaatttgtggtggaatttcaaagtgatatgtgctatgatgtttttggtataaaaattctaaattagtgcatatcaccttattgaaaagttatcttctaacttaaacaacaataggaggatgtgcatatgagtcagataagtcagatcaaaaagatctatcatgcagccatctatgtgacgtccgtatcagactaacgcttatccatttgatgtggacagtacaggaaaactgaatatcagattaaaggaggctgtgtagtatggcaagaaagagcagaaaaaatatgccggttgcagttgcagagccgactgacaatctgacgacaaaagcagttttaagcatggataaggaggcaaaaccatatcaggttggaatctatacgagactttcatttgaatcagaggcgaataaggaaagagatactgtagacacacagattgcatatatcagagagtttattaatgggcaggatgatatggtagaagtttgtgtgtatgctgatataggaatcgtcgactgcacgatcaaacatcgatcgaagctgaggttcgatgtctgaccga

SEQ ID NO: 1719 - DNA, 966 bp, unidentified
  source 1..966: mol_type = unassigned DNA; note = Bacteriophage uvig_579415 from the Index of /pub/databases/metagenomics/genome_sets/gut_phage_database (ebi.ac.uk)
aagaaaaaacgcaaggtggagggagctgataagcgcaccgccgatggttccgagttcgaaagccccaagaagaagaggaaagtctagttctgcagagggtgatgccattcgacgaacttgtttattgcagcttataatggttacaaataaagcaatagcatcacaaatttcacaaataaagcatttttttcactgcattctagttgtggtttgtccaaactcatcaatgtatcttagtaccgcattcatttcagtgagagcttactcatcagagttcgaagacatatgtaagtgggtgcaatcattacaatataagaagaaattattttagaactccccctaccattggtgctatcactttgccaattttgacctaatttttgatataaaagtgattgcatttttgacgaaaaacattataatatttatacaaggaggtgattttatgacaactaaatcagaaacaaaagtcattacagtaaggctcccagaagaaaccaaattcgcaattgaaatggcggctcacgcagaaaatagatcggtgaacaattggatattaaatgtcataaaaaatcactgacgtccgtatcagactaacgcttatccatgtcccttttattattaggagaatatttatgaaaatatactatatgccatatggcacaactcaagaagaaataaataaactaagaaaatcaatcaatgaaaaagttatagttgtcattagcggcaacgatgacttcaaaacaaatttaaaagattttatagtggctgctaaaaagtagccgctattttattgcgtttacataaccacaatgttataatagacataacaacaatgtgaaaggatgtgtaaaaatgatttcacaaagagcagcggcatattgccgtttatctaaagaagatggggaatcgtcgactgcacgatcaaacatcgatcgaagctgtcacacataacgttgccga

SEQ ID NO: 1720 - DNA, 966 bp, unidentified
  source 1..966: mol_type = unassigned DNA; note = Bacteriophage uvig_465509 from the Index of /pub/databases/metagenomics/genome_sets/gut_phage_database (ebi.ac.uk)
aagaaaaaacgcaaggtggagggagctgataagcgcaccgccgatggttccgagttcgaaagccccaagaagaagaggaaagtctagttctgcagagggtgatgccattcgacgaacttgtttattgcagcttataatggttacaaataaagcaatagcatcacaaatttcacaaataaagcatttttttcactgcattctagttgtggtttgtccaaactcatcaatgtatcttagtaccgcattcatttcagtgagagcttactcatcagagttcggaatgggtatggagaaaggaggcctatgaacgctatctgcgataccaccgctaaatcggaaactctttccgtcaaaggctgcaaggtcaaaatcacctatgcgcctacggatacggactgtctggatgcgatccagaagctgctgcaaaccaccatcctgcgcacggcaggacacaccgctgcctgacatccttgtgttccttgaatgcgtgagataagataaaatcgaactgaaccttgaaaacaaaatatggacgaagcacgtttgatttttcctttctcactcaaagaaagagagatgacgtccgtatcagactaacgcttatccatcaacctacgatggtgcggaaatttttgaagaaatttccgcaaagggggcataaaagcgatgcgcttgcccgcagcactgtgtaaaattcaaagaaagaagcgtgaaaccgatggattttcaaaaagtacatttatgaccccgcccggttcgcatccgacttcagggttcggaacccggcacagtctgccaaagttttttaggcataaaaaacgccgcatcgtacaaaacgatgcggcaaattggtggaggcaacgtgaccttgtgcgaactttttggacagttcgccagccgccgcctccggaatcgtcgactgcacgatcaaacatcgatcgaagctgccaatgacttcaggtccga

SEQ ID NO: 1721 - DNA, 966 bp, unidentified
  source 1..966: mol_type = unassigned DNA; note = Bacteriophage uvig_539852 from the Index of /pub/databases/metagenomics/genome_sets/gut_phage_database (ebi.ac.uk)
aagaaaaaacgcaaggtggagggagctgataagcgcaccgccgatggttccgagttcgaaagccccaagaagaagaggaaagtctagttctgcagagggtgatgccattcgacgaacttgtttattgcagcttataatggttacaaataaagcaatagcatcacaaatttcacaaataaagcatttttttcactgcattctagttgtggtttgtccaaactcatcaatgtatcttagtaccgcattcatttcagtgagagcttactcatcagagttcggttttgttagatgcactgggagtctggtgtgtgattgcaatctgtggaaataatcctgagaagggaattaagtatcgccacacatggaatattgtaaaaataggaggtacatattatcatctggatgcgacctttgataataccctgggaaaagatcgtgaaacttctgaaatccgctatgattatttcaatctggatgattcacagattttcagggatcatgagcctcttattgcgccggcgcctcactgcggtgatcatgagcacttttactataaggagaagaagctttcttttactgacgtccgtatcagactaacgcttatccattttactcggcggtattgtaagctgggtaaacaattcagatttaacactcttataatccaaaagggttattttgagagggctatcagtgtaagggctgatagccctatttttttttgtctaaatttcaggagatttctggttattactcaaataataagtaatgggtttacatagtatcaaaaaggtgtataataagtatgagatattatgacaaacctgtacaaattctaatcaacaggaggaaaacaggatggtacaggagaaattaagagcggtattttatgcaagggtatctacagaggaatcgtcgactgcacgatcaaacatcgatcgaagctacatgttaggagttctccga

SEQ ID NO: 1722 - DNA, 966 bp, unidentified
  source 1..966: mol_type = unassigned DNA; note = Bacteriophage ivig_4470 from the Index of /pub/databases/metagenomics/genome_sets/gut_phage_database (ebi.ac.uk)
aagaaaaaacgcaaggtggagggagctgataagcgcaccgccgatggttccgagttcgaaagccccaagaagaagaggaaagtctagttctgcagagggtgatgccattcgacgaacttgtttattgcagcttataatggttacaaataaagcaatagcatcacaaatttcacaaataaagcatttttttcactgcattctagttgtggtttgtccaaactcatcaatgtatcttagtaccgcattcatttcagtgagagcttactcatcagagttcggcacaaagcgtaccgttcctgacttcactctaaaaatctatccgagattataattcggtcgagcggatctgaacggtgcaatataaaatgggaattgagaaaatatgtggaatccatataacttcccggataaaaccttttaaacatctgctctaatcctgcttctttaataattttcccagctcttccataaacgtattgacgtccttaaactcgcggtaaacggaagcgaagcggacataggccacctcatccagttcttttaatttcctcataacgagttcaccaataatcgtcgtcgacgtccgtatcagactaacgcttatccataccagagatatccatctctttaattttcatatcaccacccctctctcgtaaagtttatgtaaccttggttgtacttgtttcttactttattacctgccgaacagtcaaatttaattcccatcacgccccttgctggggcgtatttaatttaccccagaatcatacaatttcagtggatacagaaaggaatgatggaatgccgcgatattgcagatatctcaggaaatcacgaaaagacctgcaggctgaaatgcatggagaaggggaaacgctggccaggcacgaaaaaatacttacggaggaatcgtcgactgcacgatcaaacatcgatcgaagctacgaggagtctgacttccga

SEQ ID NO: 1723 - DNA, 966 bp, unidentified
  source 1..966: mol_type = unassigned DNA; note = Bacteriophage uvig_590420 from the Index of /pub/databases/metagenomics/genome_sets/gut_phage_database (ebi.ac.uk)
aagaaaaaacgcaaggtggagggagctgataagcgcaccgccgatggttccgagttcgaaagccccaagaagaagaggaaagtctagttctgcagagggtgatgccattcgacgaacttgtttattgcagcttataatggttacaaataaagcaatagcatcacaaatttcacaaataaagcatttttttcactgcattctagttgtggtttgtccaaactcatcaatgtatcttagtaccgcattcatttcagtgagagcttactcatcagagttcggaaaacggcgagatcgctgccgttatcatcgaagatgaggctacgctgaaacgggtctactacgaccgtgaaaacaaccgcttgcagctgatcgcagagaacccaaggtatgcaccgctggtgtatacgggcgaggaactcaactatatccgcattctgggaaaagcggtaacgctgatgcgggagttgtgatatacataaaattgccctgccaaaaccggcagggcatcactatagaaaggagtgccccatgaaaatcgcagcggcgtacattcgtgtgtccacggacgaccagatcgagacgtccgtatcagactaacgcttatccatggatcgtatttgaccgcaaaagcacacgtgtgaaagtggagtatcacgggtgatttcttatgcgtttcgattgtcagcttttgcaatttggcggacttaattgcaaaaagtgataataagaacacaacaaaaaaccggcagtacagcaggagatttcctgttttgtactgccggttttctgcatagttatgccttatttacacttcccgaaaattatccacgctcacataccccgtgacatacttccctgccggctttttgccgcagtactctttacgtgtcgtcacgcgataccgtcccggaatcgtcgactgcacgatcaaacatcgatcgaagctacatacggtgaatcgatcga

SEQ ID NO: 1724 - DNA, 966 bp, unidentified
  source 1..966: mol_type = unassigned DNA; note = Bacteriophage uvig_271148 from the Index of /pub/databases/metagenomics/genome_sets/gut_phage_database (ebi.ac.uk)
aagaaaaaacgcaaggtggagggagctgataagcgcaccgccgatggttccgagttcgaaagccccaagaagaagaggaaagtctagttctgcagagggtgatgccattcgacgaacttgtttattgcagcttataatggttacaaataaagcaatagcatcacaaatttcacaaataaagcatttttttcactgcattctagttgtggtttgtccaaactcatcaatgtatcttagtaccgcattcatttcagtgagagcttactcatcagagttcgaatgcttttatcgaagcagaaagataggtgtgggcgaaaatgaaaagtaatatagaacgctattacatgtcgcttgcacccatccaggctatggaaagaaatggtctcatattgcattctgaatttctcaaagcggaggattttttggctcaaaaatataacctgaaaaaacacaatatttataggtcaaatgacttgataaaaaccgagaaaagagtgatagatatactaccaaaaaaggaggcgcaaaatgatacaaaaaaagataacgacaatagacgctgcaccgagattagaaaggacgtccgtatcagactaacgcttatccatgtcaaagggcgatagcgcaatatcgaagaaaggaaggcaagcacaatggctaaggttaccatcatcccatcgaaaataaacccaataacgcttactcccgttgggcaagtggccaaaaggaaggttgccgcttacgctcgtgtttcaaccgacagcgacgagcagtacacaagctacgatgctcaagtcacttactacacgaacttcataaatggcaaaccgaactgggaattcgtaaaggtctatgcggacgaaggaatttcaggcacgagcacaaaaaggcgagatgagtttaaggaaggaatcgtcgactgcacgatcaaacatcgatcgaagctcgcacactgactgctatcga

SEQ ID NO: 1725 - DNA, 966 bp, unidentified
  source 1..966: mol_type = unassigned DNA; note = Bacteriophage uvig_373577 from the Index of /pub/databases/metagenomics/genome_sets/gut_phage_database (ebi.ac.uk)
aagaaaaaacgcaaggtggagggagctgataagcgcaccgccgatggttccgagttcgaaagccccaagaagaagaggaaagtctagttctgcagagggtgatgccattcgacgaacttgtttattgcagcttataatggttacaaataaagcaatagcatcacaaatttcacaaataaagcatttttttcactgcattctagttgtggtttgtccaaactcatcaatgtatcttagtaccgcattcatttcagtgagagcttactcatcagagttcgtaaccgtcttcggaatgattttcgtccaaaccagaaaacacgccttgccgtaattggcagggcgtgttctttttttcttggataaactggctggaatcgggctggttactttttatacatcccctgcaaaaccccaaccctttcggcctcggcgatgaaacgcttgtgcagatgttcgtaccttgccatcatgtctgcggggagttcacctttcttctgccggtaggcctcaatcatacgaaccacatccttatgcagaaggctcatgtggttcatctcatctgcggaaagcttgtgaaagacgtccgtatcagactaacgcttatccatcgggcaatgcagagagaactataccatgtgcgcagagattggcgttccgtagcgtatgctgcctgtactatggcggtactgctagggttctttttaatgatatacgttatcctggatgcccggaatccaaacatgggcctgtttcggcggcgggagataagccccatcgtttatgttgcggcgttctcaatcgtcctggttctgttcgtgatagcacattcgctcgttaagaaaaaagttggtgataaaaatgcagatgataccaattgatttatcagccctgacagcctcggaacagcgggaatcgtcgactgcacgatcaaacatcgatcgaagcttgctgcaaggctggagtcga

SEQ ID NO: 1726 - DNA, 966 bp, unidentified
  source 1..966: mol_type = unassigned DNA; note = Bacteriophage uvig_217517 from the Index of /pub/databases/metagenomics/genome_sets/gut_phage_database (ebi.ac.uk)
aagaaaaaacgcaaggtggagggagctgataagcgcaccgccgatggttccgagttcgaaagccccaagaagaagaggaaagtctagttctgcagagggtgatgccattcgacgaacttgtttattgcagcttataatggttacaaataaagcaatagcatcacaaatttcacaaataaagcatttttttcactgcattctagttgtggtttgtccaaactcatcaatgtatcttagtaccgcattcatttcagtgagagcttactcatcagagttcggcgaagtcaccaaagacggtcagcgtaatattactatcaatatggctatataattaattttgattctattttacatctactatatttgtattcactaagaggtgcagaattttctgcacctctatttttttctattttcaagaatttacaaccgttcacgaaccatcatcaaggcatatccaagcagattttgccctttccatttgtcaatttgcaacctatccggattgttcattgacaaacctatgccccatattctgtccttaactgcacactctgccaaaattgagttatcggttggacgtccgtatcagactaacgcttatccataatatctgtaattagttgtaaaatacttatttattatctaagtgaatatattatacaggaggtgggagttatgtcaaagacatgtacttacaacatcaaagtcaactatgcaaatcgtgacgaaaaagaccgaaaatacacagtcaacaagaaattgacaaacgtaatcctaacagaatcggctgtcgcatacatacaaaacagataaaacaaaggcaaggtctaaccttgcccctaaggaggtgcaacgatgaattccattcaaaaagttgcattatatatgcgactgagtaaagaggaggaatcgtcgactgcacgatcaaacatcgatcgaagctgtcgattatccttgagtcga

SEQ ID NO: 1727 - DNA, 966 bp, unidentified
  source 1..966: mol_type = unassigned DNA; note = Bacteriophage uvig_581095 from the Index of /pub/databases/metagenomics/genome_sets/gut_phage_database (ebi.ac.uk)
aagaaaaaacgcaaggtggagggagctgataagcgcaccgccgatggttccgagttcgaaagccccaagaagaagaggaaagtctagttctgcagagggtgatgccattcgacgaacttgtttattgcagcttataatggttacaaataaagcaatagcatcacaaatttcacaaataaagcatttttttcactgcattctagttgtggtttgtccaaactcatcaatgtatcttagtaccgcattcatttcagtgagagcttactcatcagagttcggttgttttaaatggtggaggttaggagattcggtcttgctcgttcgcatttaacggcaattccgtgttttgcttcaatgactattcgtcattttgcaaaaacactccagcctcagctcactcgcgcaactcctagaaaatgctaaacgcatttttggaggttctcatcaatccataacactgcaaaataaaatacacgataactaaagtcatcgtgtattttatggtggactcaaagaggagacgttagaacttttagcaagaaaactatacgactctgtccgagataaaaataatgttagacgtccgtatcagactaacgcttatccataactcctttaaacaaaaatctgatttatcaatttcatgctcatatttttattatcttatttctagtaaaaactataaaatgaaatttttcaattattctgttgggtaatattaagcattctaaaattcaatagggaacttacttcccagtaaatattattgggaagtcgtatgtcaagcctactttactttttgccaaaatgagtaaaaataaaaacatacaagttcagaaattttaaggagttcagattatgcaaaacaaacaagcggttatttatgcacgtgtatctagcagagaacaggaatcgtcgactgcacgatcaaacatcgatcgaagctcgaagatcgccgtagctcga

SEQ ID NO: 1728 - DNA, 966 bp, unidentified
  source 1..966: mol_type = unassigned DNA
aagaaaaaacgcaaggtggagggagctgataagcgcaccgccgatggttccgagttcgaaagccccaagaagaagaggaaagtctagttctgcagagggtgatgccattcgacgaacttgtttattgcagcttataatggttacaaataaagcaatagcatcacaaatttcacaaataaagcatttttttcactgcattctagttgtggtttgtccaaactcatcaatgtatcttagtaccgcattcatttcagtgagagcttactcatcagagttcgggagtgcgaatgactttagcaatattcaaaatattaaacaatgttttttcaactacctccccgacttcgggaggtcttaaatggatgagttagcaagattttatcgaagaaatgcttgaaaaatatggtaataaaatagatgaaaaaaaagaagcagaggacccaagtgaaaaattgagtattgaagaataaaagtatataatacttagagaacgtgaaattgtgtccaaacttttttaggaggaaacaaatgataaaaaagagagcgtatatctatacccgtgtttctacaggtatgcagacgtccgtatcagactaacgcttatccatgtttggacaataatgagcacgtggagtgtgtcgctctgcttgtaaagaactagaaaactttgaacgaagggattccatagagaattactcattttctctaattagataaaatgtaacctctgttattcttgtataactactttacaagttttgaaaaattggtatgatctgcatcatttatatatttgtatgtttatgttcgagagaaatctatacgcatagttaagaaagaaaagagccgcgaaagcgactctttttggttttaaatgattatctaacaaattcgttgatttctttttcggaatcgtcgactgcacgatcaaacatcgatcgaagctccgtgaaccaatcacaatga

SEQ ID NO: 1729 - DNA, 966 bp, unidentified
  source 1..966: mol_type = unassigned DNA; note = Bacteriophage uvig_460604 from the Index of /pub/databases/metagenomics/genome_sets/gut_phage_database (ebi.ac.uk)
aagaaaaaacgcaaggtggagggagctgataagcgcaccgccgatggttccgagttcgaaagccccaagaagaagaggaaagtctagttctgcagagggtgatgccattcgacgaacttgtttattgcagcttataatggttacaaataaagcaatagcatcacaaatttcacaaataaagcatttttttcactgcattctagttgtggtttgtccaaactcatcaatgtatcttagtaccgcattcatttcagtgagagcttactcatcagagttcgtaaggctgaaagtgaatctattgtaaatcagtcaattttgattgataagatgtgctgattcagctggtgatggattctttgaaaatgtacagtaagatgacggatgccatatgcttcttcagtatgtggaaaaaataaatgtatttgaaggaagaaaaatagagattgtttaccgattccaagatgagttggtaacagctgcaagattggcagaacagattggaaaaacaaaacaggaggtggctgtataatggcaagaacaagaaatcgccagatgaaacaggctgaagcattcgtacagacgtccgtatcagactaacgcttatccattatcagaaattttagaggagggggtgatcagatgtcagatggtaagtgcatagtaaagtatttaagattgtcgctggaagatgaggatatgctggatgaatccaatagtattaccaatcagagaattgtgattgggcaatacatagccagtaaaaatgagttcaaaaatacggaagtgttagaattcaaagatgatggctatagtggaacgaatttcgatcgcccaggattccaaagtatgatggaattagtaagagatggaaaagtcagcacaattatagtgaaagacctttctcgattggaatcgtcgactgcacgatcaaacatcgatcgaagctactcgtccagccagcaatga

SEQ ID NO: 1730 - DNA, 966 bp, unidentified
  source 1..966: mol_type = unassigned DNA; note = Bacteriophage uvig_200966 from the Index of /pub/databases/metagenomics/genome_sets/gut_phage_database (ebi.ac.uk)
aagaaaaaacgcaaggtggagggagctgataagcgcaccgccgatggttccgagttcgaaagccccaagaagaagaggaaagtctagttctgcagagggtgatgccattcgacgaacttgtttattgcagcttataatggttacaaataaagcaatagcatcacaaatttcacaaataaagcatttttttcactgcattctagttgtggtttgtccaaactcatcaatgtatcttagtaccgcattcatttcagtgagagcttactcatcagagttcggttcggatagcgtagagtatggtactcccgaccagagtcgaactggtgactaacccttaggaggggtttattattgtcataaaacacgccagaagtctttgtcggatttcctaacatcaataacttgttattttcacctgacaatgtaccaagtatagcttccataatgatgtcagcaacacctgaagcctcgtctactatgaacaacatattatcttcgtgaaaaccttgcatattttcgggttttgttgccgttttcgccaccgcaaaccaccgcttatcgtgacctttcatataaacgacgtccgtatcagactaacgcttatccattgtacacgaatatgtagacggcgaagaacattatgcggatactttaggcagtggaatgacattatcgaaatttcacatatatacagataatggagatatagaaaaaatacaataagtaaaaaatcccccttgctacgccaatagcaaaagggatttaagagtgttatgatataacctcaattccaaatataattatatcataacactccgataaatacaagaaaaatcaaataaaaggagtgtttttttaatgcaaaaaaataataatataggtaacagatgtgtaatttatgcaagataggaatcgtcgactgcacgatcaaacatcgatcgaagctctcgtatatgagccagatga

SEQ ID NO: 1731 - DNA, 966 bp, unidentified
  source 1..966: mol_type = unassigned DNA; note = Bacteriophage uvig_540211 from the Index of /pub/databases/metagenomics/genome_sets/gut_phage_database (ebi.ac.uk)
aagaaaaaacgcaaggtggagggagctgataagcgcaccgccgatggttccgagttcgaaagccccaagaagaagaggaaagtctagttctgcagagggtgatgccattcgacgaacttgtttattgcagcttataatggttacaaataaagcaatagcatcacaaatttcacaaataaagcatttttttcactgcattctagttgtggtttgtccaaactcatcaatgtatcttagtaccgcattcatttcagtgagagcttactcatcagagttcgcagatgtagttggccctttacaatatgatccttatgaaggaactgtttttttatgggattctatgttcaataagcatcctcataaaaattactatatttattaaaaaaagaaccggccacaaaggaccggctccaagaatggtattaaccactccctagacaagaatgattatactatttttgaaccccctttgcaaacggtgttatttttttaccgtttttttcataaatttacaaaaggagtttcaaaatgaaaataggagctttatatattagagtatctacagatgatcagttggagacgtccgtatcagactaacgcttatccatttttcaataaaaaagaggaaaaattcactctttactattttatcaattactagaacccctttatttatcggggtttgagccgttacacgttcttgcagtatgggggtcctgacggagaatcagcggccgcaatgcgttatatgtcacagaaatttgcaatgaaaaaccctaaagttgcaggtttaatcaacgatattgcggtggaagaacttgggcatctcgaaatggtcggctccattgtttcccagcttgtaaaagaccttccttgtgatgatgttgaccttgcaggctttgagaaatggaatcgtcgactgcacgatcaaacatcgatcgaagcttaggcggtattcggcgatga

SEQ ID NO: 1732 - DNA, 966 bp, unidentified
  source 1..966: mol_type = unassigned DNA; note = Bacteriophage uvig_533354 from the Index of /pub/databases/metagenomics/genome_sets/gut_phage_database (ebi.ac.uk)
aagaaaaaacgcaaggtggagggagctgataagcgcaccgccgatggttccgagttcgaaagccccaagaagaagaggaaagtctagttctgcagagggtgatgccattcgacgaacttgtttattgcagcttataatggttacaaataaagcaatagcatcacaaatttcacaaataaagcatttttttcactgcattctagttgtggtttgtccaaactcatcaatgtatcttagtaccgcattcatttcagtgagagcttactcatcagagttcgttgaatctgcggcatctggcgaactaacatatgtaattgatccttttggtgaattcacatccaaagcagaagtaaatggagattttgtgctgttgtatgatgtgaaatcagacaaagtatcggctgcatttgctactgtagacgtagaataaacaaaaccgcccaccctttttacggggtgggcgtaaatttgcactaattgtcacgccctacacgggcgtgtgagttgaaataataaggaggaggtcatatgcaaactgctgcggcgtatataagagtttcgacagatgatcaggttgagacgtccgtatcagactaacgcttatccatttaacagaaaaaagaatttgtttgagatcgtgtaccgggacccgtttgcatagcgccctactatatccttttgcaattagcaccgcccaactgggtaatgataggtgctgacgatataggggtctgtttgtgtgccggtgccggtcatagtatcacctcacaattttgataccgtccgggatcacgatgcggctcacctgcttgccggtgtagcatgtcgcaccgatctccagaacgggcttactctttacagttttaggcgcagccaggtgtgtggcggatccaatgtagtaatccagcggaatcgtcgactgcacgatcaaacatcgatcgaagcttctcgcgttcgacgccatga

SEQ ID NO: 1733 - DNA, 966 bp, unidentified
  source 1..966: mol_type = unassigned DNA; note = Bacteriophage uvig_424088 from the Index of /pub/databases/metagenomics/genome_sets/gut_phage_database (ebi.ac.uk)
aagaaaaaacgcaaggtggagggagctgataagcgcaccgccgatggttccgagttcgaaagccccaagaagaagaggaaagtctagttctgcagagggtgatgccattcgacgaacttgtttattgcagcttataatggttacaaataaagcaatagcatcacaaatttcacaaataaagcatttttttcactgcattctagttgtggtttgtccaaactcatcaatgtatcttagtaccgcattcatttcagtgagagcttactcatcagagttcgtacaagtggcgttgttggtgacccaggagagattcgaactcccgacaccttgattcgtagtcaagtgctctatccagctgacggcatagaaaaagcaggcctgaaaaacggcgaatatctctccaaagaaatggtcttgaaatcagaccccgacttcttcctcgtttccgccgaccgtcctgtggacacaagaaaaacaaacaaatataaacgggaatttctcgccgatccggtcgtacaaaccatgaaaggccgccacaacgtagttgccgtcccgagccgctacatttactgcggaaagacgtccgtatcagactaacgcttatccatgtatgaaaatggaaatataaaaaatataagcaaaagcgaatttataaaaaaatgtcttaacattgaataaaaatcgtttgaaatcgtttcaaacgattagaaaaaaccgccaccatgagttatcatgatgacggtttccccggtcggatattagccgtatccgccggaatttgtaaatcactcaccctgagctgattacttctatattatatcacaatcagctcttgttgtagaaaggagctgttttattatgcttagagctgctttatatggcaggttttcctcggataatcaaagagaggaatcgtcgactgcacgatcaaacatcgatcgaagctacgtgcgattatcgtcatga

SEQ ID NO: 1734 - DNA, 966 bp, unidentified
  source 1..966: mol_type = unassigned DNA; note = Bacteriophage uvig_334631 from the Index of /pub/databases/metagenomics/genome_sets/gut_phage_database (ebi.ac.uk)
aagaaaaaacgcaaggtggagggagctgataagcgcaccgccgatggttccgagttcgaaagccccaagaagaagaggaaagtctagttctgcagagggtgatgccattcgacgaacttgtttattgcagcttataatggttacaaataaagcaatagcatcacaaatttcacaaataaagcatttttttcactgcattctagttgtggtttgtccaaactcatcaatgtatcttagtaccgcattcatttcagtgagagcttactcatcagagttcggtgtatcaaagagcattgggcggaaccggaaatatcaaatcatctttttgtaattgttttaccgttaagttaagtttccggtatgctgattcattccagtcatttcattaaataccgtactcttccccacattcgggttacctgccagcgcgatgaccttatcatcttcccggcgttttttgatttcaagtccgcagtccacagacttgatccccacagaatctctgcttaaccccatattacgtcctccgtttcctcctgtcctgccttcccctcacagattgaggcggtatctgcggcgacgtccgtatcagactaacgcttatccatgttgctttacaggtggaatttattggattgtaggttttgttttaagggttaattggaaatctaaaaactaataaagtaaaaagccccaggagctaccaactccaagagcttttcacatagattctcttgccggatcattccggaaagatatgtctttctcgcaaattgattatatcatttccagaatgtcttgacaagaggtgtattttttatacgccaaattaatacactagaccaaggagatgatatcatggcacaaccacagaccgcccttcagcgcgtagccctctacatccgtgtggaatcgtcgactgcacgatcaaacatcgatcgaagctaccaagtggcacagatatga

SEQ ID NO: 1735 - DNA, 966 bp, unidentified
  source 1..966: mol_type = unassigned DNA; note = Bacteriophage uvig_80185 from the Index of /pub/databases/metagenomics/genome_sets/gut_phage_database (ebi.ac.uk)
aagaaaaaacgcaaggtggagggagctgataagcgcaccgccgatggttccgagttcgaaagccccaagaagaagaggaaagtctagttctgcagagggtgatgccattcgacgaacttgtttattgcagcttataatggttacaaataaagcaatagcatcacaaatttcacaaataaagcatttttttcactgcattctagttgtggtttgtccaaactcatcaatgtatcttagtaccgcattcatttcagtgagagcttactcatcagagttcgctacagtagatgaacaaaagtccattgttgatttactaaaggggtataaagaattactagatgctggtattatgacacaagaagaatttgacttgaagaaaaaagaattattaaatttataaactaaaaaatcacccactggcggcaaccagtaagtgatcggtgcaaaataaaattaaccgctcagttaatgtcttttttgcacccttagtatatcaaatttcataagatagtacaagggagtgatgatatggaacagtattgcctgtatcttagaaaatcaagaagtgatcaggaagcgacgtccgtatcagactaacgcttatccatcagatgccggctttaccctgaaaatataccctcttatcatgccgaaaaagtaagccaaacagttgagttttccacaaccaaaaagtgcttataagcctatgaaataaggcttttagcaaaacttctaccctcaacgtgcatacgaatacgcgcatggatggtggaagtaatataaacttaatacacagactgtctgtttacgttcattataaaaaagtaagactcacccttaattaaggagtgagcccgtttgatataaactatataatcatttaaagttactcatttttaaataaccttggaatcgtcgactgcacgatcaaacatcgatcgaagctctgtgtctgaagtgctatga

SEQ ID NO: 1736 - DNA, 966 bp, unidentified
  source 1..966: mol_type = unassigned DNA; note = Bacteriophage uvig_538824 from the Index of /pub/databases/metagenomics/genome_sets/gut_phage_database (ebi.ac.uk)
aagaaaaaacgcaaggtggagggagctgataagcgcaccgccgatggttccgagttcgaaagccccaagaagaagaggaaagtctagttctgcagagggtgatgccattcgacgaacttgtttattgcagcttataatggttacaaataaagcaatagcatcacaaatttcacaaataaagcatttttttcactgcattctagttgtggtttgtccaaactcatcaatgtatcttagtaccgcattcatttcagtgagagcttactcatcagagttcgctcgttgcactatcagcaattatgagtgccaacggcgacttccacaccttaacgaattacggttattgtgtgatttctttggttgttcacttgactacttcggcgtatcaacggaagatgaaacttttgaattgttgagccgtgctaaaaatgtttttcttaacaaagatatcccaaaagaggaacgagaacggttgtataaggaaataatgcgtatgtatctcgacgcagaataacagggggaaacaacatggcaagtcagacaagaaaagtaaaaaggaacggagcgcaaataaagcggacgtccgtatcagactaacgcttatccataaatgaaacgccgttttagcagaaagcgtaatatccgcaacaaaaacagttgaattgtatctaataagtttatgaaaaaatagcgtcgctgtaaaggggaaaagtaaaggcgggggcgaaagcccctgcctttttgttttaacaatatgtaaaagggattgccgtgttactgtcttttgctatcgttccgttacatagttcgcatttaatatcgcacaaatggttttttgtcgggacggcaacaaacaatgattttttgccgcaaatggggcatttttttgccatagggtcttttgctatggaatcgtcgactgcacgatcaaacatcgatcgaagctgaggatctctgtgcaagtga

SEQ ID NO: 1737 - DNA, 966 bp, unidentified
  source 1..966: mol_type = unassigned DNA; note = Bacteriophage uvig_390438 from the Index of /pub/databases/metagenomics/genome_sets/gut_phage_database (ebi.ac.uk)
aagaaaaaacgcaaggtggagggagctgataagcgcaccgccgatggttccgagttcgaaagccccaagaagaagaggaaagtctagttctgcagagggtgatgccattcgacgaacttgtttattgcagcttataatggttacaaataaagcaatagcatcacaaatttcacaaataaagcatttttttcactgcattctagttgtggtttgtccaaactcatcaatgtatcttagtaccgcattcatttcagtgagagcttactcatcagagttcgccatcaccaagagcataggtcggacattcctgccgacaccggaattacagtaggaaatatgacaccggatataaacaacaacgcctgactgcaaccatgcaatcaggcgttctctcttgctcggaactagaagttcgagcccttcgtggtcgagatgacaggattcgaacctgcgacctctgcgtcccgaaagtagtacaaaaatcccattacattcgattataaagcaccttttaaatcttttgtgacacccatctgacacccatgcatttttaattcaaaaatagtttctaacagtcggacgtccgtatcagactaacgcttatccatcccgcagcgacctgacaaagaagaattttaataataaaactgtaatttgtactgatgaaaaagaaactgtaaattttgacactaaagaacgaaacgagataatctcaaaaattttagccagaatgattttagataaaacgaaaaagtaatttttaagctgtaatttttaaccgtacaaaataaaggggtcaagcatatattatcatcttgataagggcttgaccctaacttattgaagaaaggaaaaaccatgaacacaaatcagataccagtagtaagttacagccgattcagctcggaggaatcgtcgactgcacgatcaaacatcgatcgaagctcgacgcttccattgcagtga

SEQ ID NO: 1738 - DNA, 966 bp, unidentified
  source 1..966: mol_type = unassigned DNA; note = Bacteriophage uvig_91735 from the Index of /pub/databases/metagenomics/genome_sets/gut_phage_database (ebi.ac.uk)
aagaaaaaacgcaaggtggagggagctgataagcgcaccgccgatggttccgagttcgaaagccccaagaagaagaggaaagtctagttctgcagagggtgatgccattcgacgaacttgtttattgcagcttataatggttacaaataaagcaatagcatcacaaatttcacaaataaagcatttttttcactgcattctagttgtggtttgtccaaactcatcaatgtatcttagtaccgcattcatttcagtgagagcttactcatcagagttcgctttagaacagttgtgcctattaaatcacccgttccaatatgaactggagtaataattttaactgtgctcatacttataccgaaaaaccaataccataatgataaatacatttaccttctgtcatggtctctattatccttccatagtattcttttttctgattcactttcatccaactaccctctaaaaaatgtacatattttccatttatgaagccacctgtatattctttagaagaacgataaatatccccatttaattgatagaaagaactactgtaatcaaagtcattcacatccgacgtccgtatcagactaacgcttatccataacgaatatttctatatcggaagatattaccaatacgggcaagatattatcgttgtatttgcaagcgaaaagtatcaacctatatatgcaaatgaaattagtcacttccaaatattaggaaggctatgtactgtaatcacaagttatgatgatgaagaataacgaaaaataaccatctttcgatgattattcccctacctcattcggctatctaggctcacattataacattttaagaaaaggaaacaatatgaaagaacttataccagccgttatatatgcaagattttcttcatctggggaatcgtcgactgcacgatcaaacatcgatcgaagctgtgaccacgcaaccaggtga

SEQ ID NO: 1739 - DNA, 966 bp, unidentified
  source 1..966: mol_type = unassigned DNA; note = Bacteriophage uvig_188377 from the Index of /pub/databases/metagenomics/genome_sets/gut_phage_database (ebi.ac.uk)
aagaaaaaacgcaaggtggagggagctgataagcgcaccgccgatggttccgagttcgaaagccccaagaagaagaggaaagtctagttctgcagagggtgatgccattcgacgaacttgtttattgcagcttataatggttacaaataaagcaatagcatcacaaatttcacaaataaagcatttttttcactgcattctagttgtggtttgtccaaactcatcaatgtatcttagtaccgcattcatttcagtgagagcttactcatcagagttcgttgccaatacaattcaggagcaaactacatctcaatttgccgccgcgacctgagtggcgtgcattagcacataaatcgtcaaaaaactttgcttagcgaaaagaccgcaaggtatctggaaagaccccgatggcaaacaaggagcgaggcaaatgccaaaaagaaaaggattcctgtatgaatggatgtgtgacaaagaacacatccgcgaagccattgtgtttggcgcgaaagacaaacacgatcggcgcgacgtaaggagggtgctggccgacgtggacggctacacggaccgcgtctgacgtccgtatcagactaacgcttatccattcaataattatccacaaaaggtccagattgtccgcaatgacacgggcgaacagatttacgaatccggcgctatcgccgtcggcagcaaaatcgaacgcgcgaagctggatgttgttctccccgctggtacatacgaatgtaccgcgtattttcacaacttggaccccgaaaccggcgatattatcggcacggctggggcaattatcacaatcacaattcaacactaattttaatcaaaggagtcattacaatgaagaacactaagaaaatcgtatccctcatcctcgcggtctgcatgatggaatcgtcgactgcacgatcaaacatcgatcgaagcttcctaactcacactcggtga

SEQ ID NO: 1740 - DNA, 966 bp, unidentified
  source 1..966: mol_type = unassigned DNA; note = Bacteriophage uvig_192283 from the Index of /pub/databases/metagenomics/genome_sets/gut_phage_database (ebi.ac.uk)
aagaaaaaacgcaaggtggagggagctgataagcgcaccgccgatggttccgagttcgaaagccccaagaagaagaggaaagtctagttctgcagagggtgatgccattcgacgaacttgtttattgcagcttataatggttacaaataaagcaatagcatcacaaatttcacaaataaagcatttttttcactgcattctagttgtggtttgtccaaactcatcaatgtatcttagtaccgcattcatttcagtgagagcttactcatcagagttcgagatagactgtgacaacttaaataaagtattgactatttatttttactcatagccagcaggtcttcaatcaccctgccgcaatcagcagaaatacaaatgctgcggtcttgtatatcctccggcgcagtagcttgaaataagttcacgcatatataatttgcggacttattttttcttactgcgtcatggaacacaaatttaattattacgggtgtgttcattccaacgccaagctctaataacaacatttttatctctttatgcctgcgaagaaaatcagcatatctttcggctgcacggacgtccgtatcagactaacgcttatccattttgtcacgctgcaaggtgataaccctaaacaggatttagaaaaatattcttcattgataaatcagaaaataagagcctttacagacgacattctgaaaggttaataaaataaaatgccccggtcgtgctgggaacacttccggggtgtgcaaagatatatcataccagatacaacataccgtctgcgcttattatattatcacggcatgacgggaaataaaaggaaattgaaagaaagttggtgattttatgataccagccattgtgtatgcaagggcttctacggaccatcaagaataggaatcgtcgactgcacgatcaaacatcgatcgaagctcgagacttgcgccttggtga

SEQ ID NO: 1741 - DNA, 966 bp, unidentified
  source 1..966: mol_type = unassigned DNA; note = Bacteriophage uvig_180924 from the Index of /pub/databases/metagenomics/genome_sets/gut_phage_database (ebi.ac.uk)
aagaaaaaacgcaaggtggagggagctgataagcgcaccgccgatggttccgagttcgaaagccccaagaagaagaggaaagtctagttctgcagagggtgatgccattcgacgaacttgtttattgcagcttataatggttacaaataaagcaatagcatcacaaatttcacaaataaagcatttttttcactgcattctagttgtggtttgtccaaactcatcaatgtatcttagtaccgcattcatttcagtgagagcttactcatcagagttcgagcttattcagaaactcgatgtttactataaattcgtcggcagactggattaattttttgttactatgagatgttccgttgggtggggtcaacagatgatggctcatatgtaacattatgtggcagctcccagggaaaaattaacgaaatcaagaattgccttcgcaacacgcctgctataatcaagatttccaacaacatagctccttattattatacatatattgttgttgtctttcgtgataatatgctttatattcttgatcctacagccaattctaataaaggattcaccgtcaggacgtccgtatcagactaacgcttatccatcgccatatcgcacaattcgtcctagcaaggcgacagccttgcgtcgtcctcattgtacaatctggcgaaaaatctgactgcacaatcgcacgacaataattatgcggtattgccttgcaaaaaaattatccatacagaaaagtacggaaagcgagaatattgtaccttaaaaagacttgcaaagcgcgggcagctgatgtataataaagatgtcgaataatcggttgtccatgtttgaaggaggtttataatggcaggacaacccaagtacaatacagcattatatcttcgtttatcaaaggaatcgtcgactgcacgatcaaacatcgatcgaagctgcggtatgtgttcttggtga

SEQ ID NO: 1742 - DNA, 966 bp, unidentified
  source 1..966: mol_type = unassigned DNA; note = Bacteriophage uvig_129321 from the Index of /pub/databases/metagenomics/genome_sets/gut_phage_database (ebi.ac.uk)
aagaaaaaacgcaaggtggagggagctgataagcgcaccgccgatggttccgagttcgaaagccccaagaagaagaggaaagtctagttctgcagagggtgatgccattcgacgaacttgtttattgcagcttataatggttacaaataaagcaatagcatcacaaatttcacaaataaagcatttttttcactgcattctagttgtggtttgtccaaactcatcaatgtatcttagtaccgcattcatttcagtgagagcttactcatcagagttcgcggagcaaaaccgggaaatgagggcgtttattgaaatgtgctttgacccaaaagcccccgtcaacaagcgtctgaaagaggcgctgttccgtatcatggaggagggggagcagaaatgaaagccgtgatttatgcccgctattccagcgacaaccagcgggaggaaagcatagaaggccagcttcgggagtgtacggcctactgttagaagaacgacattaccatcttacggacatacattgaccgggccatgtccgccaagaccgaccaccgcccggacttccagcggatgattaaagagacgtccgtatcagactaacgcttatccatgtacgggaaaagacagtgcttgcggacatacactttcaccggctttccgatgatgctttgtcgaactgtgttgttaagacaccaaagcgcgcgggaaacggtcaggctggagacggtatggcttttccccgtcttttcgtcggtaatgacgcatttggccacagcacagacttcgtcgacatccacatcggtgacagtcgccgtgatgcacttccctgttttcttgaggtgttccgctcgtttcctgtcgaaccaggcgttggtcggatacggcaggagatagaagcagacccacagacaggaatcgtcgactgcacgatcaaacatcgatcgaagctatccgatggccatcatgtga

SEQ ID NO: 1743 - DNA, 966 bp, unidentified
  source 1..966: mol_type = unassigned DNA; note = Bacteriophage uvig_127383 from the Index of /pub/databases/metagenomics/genome_sets/gut_phage_database (ebi.ac.uk)
aagaaaaaacgcaaggtggagggagctgataagcgcaccgccgatggttccgagttcgaaagccccaagaagaagaggaaagtctagttctgcagagggtgatgccattcgacgaacttgtttattgcagcttataatggttacaaataaagcaatagcatcacaaatttcacaaataaagcatttttttcactgcattctagttgtggtttgtccaaactcatcaatgtatcttagtaccgcattcatttcagtgagagcttactcatcagagttcgttgaattaagatacaaacattctcagataatcgaacaccttaaatcactttaatcctttatctaccattgccccacgccgcgtcgaaactaatcgatgccactttttcatcgcccttgtcaacgcaataaatcggcaggtcttttttattgcccgacaccgatgaaatagcggcattttttattacaaacacgcttaatatcacaataagcagcaacagcaaggctgtgatacagctttttcgtgtgataacccaaagtttcatttaaattcactcccttttgacttttgataaagtatagacgtccgtatcagactaacgcttatccatacagataaggcataaaagcttcagtaactgaatattttttattaaagagagaggtggtttttatagaaaatgataatattttagggtatcaaataatacgtacatacggcgatgaaaatattatgaataatatagaaagaatgattgacgaactattaatgttaagtgataagctcaatgattaaggttggcgagggggttgacacaaccccctcgcagtgttataatattagcgaaaggaggatgcaagatgttttatgcaggtgtctacgcgagagcatctcgtgaggacggagacagggaatcgtcgactgcacgatcaaacatcgatcgaagctcttagtcagtcttagtgtga

SEQ ID NO: 1744 - DNA, 966 bp, unidentified
  source 1..966: mol_type = unassigned DNA; note = Bacteriophage uvig_184013 from the Index of /pub/databases/metagenomics/genome_sets/gut_phage_database (ebi.ac.uk)
aagaaaaaacgcaaggtggagggagctgataagcgcaccgccgatggttccgagttcgaaagccccaagaagaagaggaaagtctagttctgcagagggtgatgccattcgacgaacttgtttattgcagcttataatggttacaaataaagcaatagcatcacaaatttcacaaataaagcatttttttcactgcattctagttgtggtttgtccaaactcatcaatgtatcttagtaccgcattcatttcagtgagagcttactcatcagagttcgcaccttcagggattcgaaccctggacaccctgattaagagtcaggtgctctagccagctgagctaaaggtgcaaattttgaacacaagagctattatactattaactcataaccccacaagcagatgacttgtgggggtgttttttaccgttttacttcctcattcgatacatcatcgtgatgaatcgcaaatccttatcgtcaaggttcagaccgttttcgtcaccgtttaatatgccgttctcgactgcccacgataccgccgagcgcgcccattcgggcatattattgtcaatataggacgtccgtatcagactaacgcttatccatacagataagattggctgtaaacggtgattatgattccgtcttatactgtgctgtaccaaaatctaaaaccgaaaacacccgaatccttgaaaacgaccgcataaccgtaatgggaatatctatgggtcttctgagttataaatcaacaatgggcggaacaataactatcccaagtataagcgttgatgactggggtcaaaactaactttaaagggggcattcgctcccttttttgaaaggatatgaatctatggataacaaattaaaagttgttctgtatctgcgttattcatcgcataaggaatcgtcgactgcacgatcaaacatcgatcgaagctcggcaaggaactacaactga

SEQ ID NO: 1745 - DNA, 966 bp, unidentified
  source 1..966: mol_type = unassigned DNA; note = Bacteriophage uvig_538870 from the Index of /pub/databases/metagenomics/genome_sets/gut_phage_database (ebi.ac.uk)
aagaaaaaacgcaaggtggagggagctgataagcgcaccgccgatggttccgagttcgaaagccccaagaagaagaggaaagtctagttctgcagagggtgatgccattcgacgaacttgtttattgcagcttataatggttacaaataaagcaatagcatcacaaatttcacaaataaagcatttttttcactgcattctagttgtggtttgtccaaactcatcaatgtatcttagtaccgcattcatttcagtgagagcttactcatcagagttcgaaacacttcaatatatgcaccgtattttgaaaagaacgatgaaccgttctttatgaaaataggtaatacaacttacgaagtaaacacacattttaatcctaatggcagagaaaatgtacttcaacaatttgaatatttacttacagaattgaaaatagcataagtttgcacaatcgacactgcggcattgcaaatgtaaaatacaattacattgcaatgccctgttgtcacagaagggagcaaatagtttatggcaacaaataaaaatatacaagggcaagaagtaaaaatcaccgctctgacgtccgtatcagactaacgcttatccatttattgatacaatggaaagagtaaaacagaaaaatgcggagaaatccgcttaaataaagaaaaaggtgtaacccctttatcgggattacaccataattccttaaatactgccttattagcccgtggctaactactaccgtgtttcgtcctctgtcagccattccatactaaccctcagcacttccgcaaatacttttagctcataatctgttacaaatcttgtgccgatctctatacggcttatgctgtctctttctagcattattcccgcaacctgcatacgtgccgctaaatcactttggaatcgtcgactgcacgatcaaacatcgatcgaagctacgtgtaatggtaagactga

SEQ ID NO: 1746 - DNA, 966 bp, unidentified
  source 1..966: mol_type = unassigned DNA; note = Bacteriophage uvig_254484 from the Index of /pub/databases/metagenomics/genome_sets/gut_phage_database (ebi.ac.uk)
aagaaaaaacgcaaggtggagggagctgataagcgcaccgccgatggttccgagttcgaaagccccaagaagaagaggaaagtctagttctgcagagggtgatgccattcgacgaacttgtttattgcagcttataatggttacaaataaagcaatagcatcacaaatttcacaaataaagcatttttttcactgcattctagttgtggtttgtccaaactcatcaatgtatcttagtaccgcattcatttcagtgagagcttactcatcagagttcgaagaacgatgataaaatccttggtataaaaataatctatgacgaggatgaagaagagtttgaagatgactgggaagatgaagaagaatattaaaaaataaaaataagttatttgaagagggagtttccctcttcttttaatactggaggtaaattatgataatagctaatgaaaaaatgacagaaactgaaaaaataatagcagcaagaaaaatactagaattaataaaagctaaaaaagatgattaaaaatgaaaagagcagttatatatattagagaatctacaaaatttcaagacccgacgtccgtatcagactaacgcttatccatagattagattagtaaataattttagatgtgttgtgataaccactatcttctaaggagcaactatgattttatatgaaaagattttagataggtattcaagaacagagttaaataaaatattagatcctagattagcaaggaaaatatactacaataggggaattattccccttggaaaaatatctaaattaatctcttttgatgaaattggttataatgttgaagatgcagttattgattattctttagataaaaaatataaagagtatagatatgtctttgaactcctaaaagctggtaggaatcgtcgactgcacgatcaaacatcgatcgaagctctccacacggaatcgactga

SEQ ID NO: 1747 - DNA, 966 bp, unidentified
  source 1..966: mol_type = unassigned DNA; note = Bacteriophage uvig_295592 from the Index of /pub/databases/metagenomics/genome_sets/gut_phage_database (ebi.ac.uk)
aagaaaaaacgcaaggtggagggagctgataagcgcaccgccgatggttccgagttcgaaagccccaagaagaagaggaaagtctagttctgcagagggtgatgccattcgacgaacttgtttattgcagcttataatggttacaaataaagcaatagcatcacaaatttcacaaataaagcatttttttcactgcattctagttgtggtttgtccaaactcatcaatgtatcttagtaccgcattcatttcagtgagagcttactcatcagagttcgtgaagggaaggagaagagtgtattttgcaggaaacagatacgaaagagctgaatgtgacggagtgttcacaacatgatgcaaaacagcagggaaaggcgaaacggtatggaaaatatactgttcagtccacctttgcaggaagctgtagcattacggatgttatgaattgctatatagaacggaaagcgtcacttagatatcaatagaagctatttttacagcagttgaagaacgacaggaggaattgtaatgagtaagaaacagattgatatatacagaacaggaatttatctgagattgacgtccgtatcagactaacgcttatccattgtacaccatggtagatggtttgccagtgttggagcttaaggaggcggtgtaaatggcgagaacgaagaatagatttaatgcagttcagataccagaaccggcaacagctgatatacctgcaaagcaaagaaaatcctttcgcgttgcactttatgccagattgtcggtggaactgaaatcaagaccgtcggagtccatagccaaccagctgagtattttaagagaatttatcagggataaggctgaatttatagaatatcaagagtatgttgacagtgcagtgtcgggaaccagttttgggaatcgtcgactgcacgatcaaacatcgatcgaagctaggcgactaccgtgcactga

SEQ ID NO: 1748 - DNA, 966 bp, unidentified
  source 1..966: mol_type = unassigned DNA; note = Bacteriophage uvig_280868 from the Index of /pub/databases/metagenomics/genome_sets/gut_phage_database (ebi.ac.uk)
aagaaaaaacgcaaggtggagggagctgataagcgcaccgccgatggttccgagttcgaaagccccaagaagaagaggaaagtctagttctgcagagggtgatgccattcgacgaacttgtttattgcagcttataatggttacaaataaagcaatagcatcacaaatttcacaaataaagcatttttttcactgcattctagttgtggtttgtccaaactcatcaatgtatcttagtaccgcattcatttcagtgagagcttactcatcagagttcgatcctcgaacgtttgttcggggattttttgttttagtgatttgtctgggataacaagcatcgtcccccgcaccgtaggggcggattccatatccgcccgcggagccttgccattactgcaaacgtcccgggtcgctggcgagcattgacccctgcggcgctgtaggcgtgatgccctatgcaactgcgaaatgtacgcggtacaaatacacctatcccgcgcacaaaaacattttttgcaatttttttcccacgttacaccgaccagaattgactgtttttgatggtactacagctgtacgacgtccgtatcagactaacgcttatccatcgacccagagcaaatcaagcgcattgcaaaagccaaggagccgaagtgcgctccgcaatctatcgactatgaagctagaacgggtgttttcaaggggtccggcaaaaagccgtatgaggtcacagaaaccacctgcacctgccgagattattttgtccgcaagctgccgtgcaagcatatctaccggctgcgcatggagcttgccaaggctgacggcgaataattataaccagaaaaggagcgtgacggcatgagaaagaaagcaaatattgcccccgaagcccgtgccgtcatctatgcggaatcgtcgactgcacgatcaaacatcgatcgaagctaccaagttacgtactactga

SEQ ID NO: 1749 - DNA, 966 bp, unidentified
  source 1..966: mol_type = unassigned DNA; note = Bacteriophage uvig_428055 from the Index of /pub/databases/metagenomics/genome_sets/gut_phage_database (ebi.ac.uk)
aagaaaaaacgcaaggtggagggagctgataagcgcaccgccgatggttccgagttcgaaagccccaagaagaagaggaaagtctagttctgcagagggtgatgccattcgacgaacttgtttattgcagcttataatggttacaaataaagcaatagcatcacaaatttcacaaataaagcatttttttcactgcattctagttgtggtttgtccaaactcatcaatgtatcttagtaccgcattcatttcagtgagagcttactcatcagagttcggaatttgaaaaaatcagacgtaagctgatggacagttatctggtatccggtgagcgaagtgacgatccggtgaaagcaatcgcttgattatgatatagaaagacgaggtaaaaaataatggaagataaagtaattcaacagtcgttcacatttaaaaattcagatagaatgacagcacaggcaaagaaaacagccacaaatattcagaaaagaaagtggcaggtaaaagaaatggaggaagattatgagcatgagagaagtacaggtcttacaggcaacaaaaacggcaccaaacagccggacgtccgtatcagactaacgcttatccatataatgcgaaagcagactacagagcaaatcagaaagggaaaaaggtgtcataaatggagcagaataaggcagagcgattgaatgaaaatgtaactgaaaaaatgtgttcatcagacggtaacgtggttggggaaatgtgttccccagccgatgccgacacacgtagaaagtgcagtaaaacttgtgagggaataaggggatttgcaggattttaggtgcaaagttcagtcgttttgccacccatttgccaccctaaaaaaataaatattgtagttgaacggaaaaacggttgaacactctggaatcgtcgactgcacgatcaaacatcgatcgaagctgagcaagcggagtaagctga

SEQ ID NO: 1750 - DNA, 966 bp, unidentified
  source 1..966: mol_type = unassigned DNA; note = Bacteriophage uvig_565627 from the Index of /pub/databases/metagenomics/genome_sets/gut_phage_database (ebi.ac.uk)
aagaaaaaacgcaaggtggagggagctgataagcgcaccgccgatggttccgagttcgaaagccccaagaagaagaggaaagtctagttctgcagagggtgatgccattcgacgaacttgtttattgcagcttataatggttacaaataaagcaatagcatcacaaatttcacaaataaagcatttttttcactgcattctagttgtggtttgtccaaactcatcaatgtatcttagtaccgcattcatttcagtgagagcttactcatcagagttcgcagcagagtggaagcttcccatccaaccgatgctgaactgcagaacgagtacaactacatcctggcagagaatctgaccaagaagctacttgaaaaagggctgatttctgtggatgaattcaacaagatcatggagaaaaatcggcgaactttctccccgttattctcccgtatctaaacagatacaacttgctattatgaccatttagagtgatatatagactaccctgaaagaaaggagaccgagactatgaaacggataacaaagattgaggcagccgataccggagcggtgcgaaagacgtccgtatcagactaacgcttatccatcggaaataggattcgacatgaaattcggacccgtcttccgggaaaggatttgattatgaaacacacaccatacggatacgacattgtgggcggtgcggcagtcatcaacgaagaacaggctgccaacttgcgaaagctgtgtgagaactacctttccggcatgtcttttgtacaggcggcaaaggatgccgggttggagatgaagcacagcggtgttaagagactgatgcagaacccacgctaccttggagacgatttctaccctgcgatacttaccgccgagatcgcccaggcagtggaggaatcgtcgactgcacgatcaaacatcgatcgaagctatccggtcagtaatagctga

SEQ ID NO: 1751 - DNA, 966 bp, unidentified
  source 1..966: mol_type = unassigned DNA; note = Bacteriophage uvig_118880 from the Index of /pub/databases/metagenomics/genome_sets/gut_phage_database (ebi.ac.uk)
aagaaaaaacgcaaggtggagggagctgataagcgcaccgccgatggttccgagttcgaaagccccaagaagaagaggaaagtctagttctgcagagggtgatgccattcgacgaacttgtttattgcagcttataatggttacaaataaagcaatagcatcacaaatttcacaaataaagcatttttttcactgcattctagttgtggtttgtccaaactcatcaatgtatcttagtaccgcattcatttcagtgagagcttactcatcagagttcggcagccctggacggaggtagaggtactttttatcgacggttgcaaagttacggtgcggtacagcagacagaaaaacccgtctgctgtcaaggtgattaaagaaactcttttagtcagcggaactactcgaaaaatctgattttttgcatattttgcttaaatatgagataataatggtgtaaatggcaccttgaaaacaaaatattccggccgccatatatacaccattctcagaaagcgagaggtatatatggctgaaaaaatcatgcaaggcataaagcagatttctgagttgatcgggacgtccgtatcagactaacgcttatccatcccggtctgctacttatctctcccttgtggagaaatccgggcaggctggttgaaaatacgccccatcttcaagacaatcgacattttctcttttatccagtttctttcccggcaaacaaactacataataaaattctttttgctaaaagtgctttatttggtgtgcgtcacaaattagagaaagttgacttgaattatcagaaccatatactaattgtcggtcaggacatagaggaagtagtcgctttgatgtgctatctccagatttctatgcttggagtagccggatacattaaggtaggaatcgtcgactgcacgatcaaacatcgatcgaagctcgcaagccacctaagcctga

SEQ ID NO: 1752 - DNA, 966 bp, unidentified
  source 1..966: mol_type = unassigned DNA; note = Bacteriophage uvig_124951 from the Index of /pub/databases/metagenomics/genome_sets/gut_phage_database (ebi.ac.uk)
aagaaaaaacgcaaggtggagggagctgataagcgcaccgccgatggttccgagttcgaaagccccaagaagaagaggaaagtctagttctgcagagggtgatgccattcgacgaacttgtttattgcagcttataatggttacaaataaagcaatagcatcacaaatttcacaaataaagcatttttttcactgcattctagttgtggtttgtccaaactcatcaatgtatcttagtaccgcattcatttcagtgagagcttactcatcagagttcgttttgcgtatttatggaagtgaaaataaatttaattttaatagatggacaaaatatatttttctggaaagggtgatatacatagtagaaaaaaacgagggcattatgagcaaaaagaaaagcagagttattaaagtaaatgtgatttatggtgataaaaatttgaaagattgtatggagcaggtaatccagaaacatgaacggagttttgactttttgaccctgatatcataatattaatgaggtgaaagatgaacaataaagcagtattatatctaagattatcaaaagaagacagaaagacgtccgtatcagactaacgcttatccatgtggactggatatttattacagattccgtaatccatttcaggtagcaaattaattcctactatgcgaatacgccacacatgcatcgttagcggaggagacagcaatacattttatcatagtgtctacgctctgggtttcacctggttctaaaaatacctgggagcctcccatagaaatagcacacttatgatggaattgataaaaatatttaaataagaggagttatatcaatttcaaaagtgctttctctccaacgatttcctttttccttatcagttgtatatgttattttttttataggaatcgtcgactgcacgatcaaacatcgatcgaagctctcgtgattaggtgctctga

SEQ ID NO: 1753 - DNA, 966 bp, unidentified
  source 1..966: mol_type = unassigned DNA; note = Bacteriophage uvig_295592 from the Index of /pub/databases/metagenomics/genome_sets/gut_phage_database (ebi.ac.uk)
aagaaaaaacgcaaggtggagggagctgataagcgcaccgccgatggttccgagttcgaaagccccaagaagaagaggaaagtctagttctgcagagggtgatgccattcgacgaacttgtttattgcagcttataatggttacaaataaagcaatagcatcacaaatttcacaaataaagcatttttttcactgcattctagttgtggtttgtccaaactcatcaatgtatcttagtaccgcattcatttcagtgagagcttactcatcagagttcgtgctgtggcaaaggacctggagcagtttcgtgaaggtctggtgattggaaatctggatcgtgtggcactgttttcatttattgacaggattctgatttatgatgatttcagggtggaaattgtgttcaagtatcgtcaggagatggaaaaggttgccagattgtttgatgtcgcaaatgagaagaatgcggagcctgtgtacaccatggtagatggtttgccagtgttggagcttaaggaggcggtgtaaatggcgagaacgaagaatagatttaatgcagttcagataccagaaccggcgacgtccgtatcagactaacgcttatccatacctgaattttaaagatgagtatgccaggatggcagacggagaggagatttaaagtggagcagatagcaatatatttgagattatcaaaggaagatgaatttgtaaaagatgagagcaacagtattatcaatcagcgtgcttttatccgtggatttattaataaaaataaggaacttcgcaaaatgagtgtggttgagtttgtggatgatggctattcgggtaaaaatatggaccgcccggatatgcagagaatgctggaactggtgaaaagaaagcagatttcatgcgttattgtaaagggaatcgtcgactgcacgatcaaacatcgatcgaagcttaggtccagtattgcattga

SEQ ID NO: 1754 - DNA, 966 bp, unidentified
  source 1..966: mol_type = unassigned DNA; note = Bacteriophage uvig_30637 from the Index of /pub/databases/metagenomics/genome_sets/gut_phage_database (ebi.ac.uk)
aagaaaaaacgcaaggtggagggagctgataagcgcaccgccgatggttccgagttcgaaagccccaagaagaagaggaaagtctagttctgcagagggtgatgccattcgacgaacttgtttattgcagcttataatggttacaaataaagcaatagcatcacaaatttcacaaataaagcatttttttcactgcattctagttgtggtttgtccaaactcatcaatgtatcttagtaccgcattcatttcagtgagagcttactcatcagagttcggtatcgtatacgaaaagaagaagcaaaacctcgccctttatttttacatctgattataaccactatttgcagtctggaccgccgtattgtgagataatgaatttcgcaagcgccggattcgggtttgcgatttttaccgggtattgcagcttcttctcatatacaaacatatttagccctccatacccgctttatagtcccacggccacgggtttttgagccatgtatatgacttgcactgacttacgtcacagcggcttacgggaccgtactgcgtggtgtacctttcccttgcctcctgacgtccgtatcagactaacgcttatccatattcggtataatttaactctgtttaccattgttcacattataacccttttacattattttaacagtgaataccactaagttggtacaatactactatgatggtattaaccgatgctatgggaaaagatataaagcatatcgcacaattttaccgcatcactatcatacaaaaagtcaaaatttttcattgctgtggaactttcctgataatggtggtagaatccaagcagcaatgcaaggagggtaattgatgaagatagcagcagcatatctccgtgtatcgacggaggagcaggatgaggaatcgtcgactgcacgatcaaacatcgatcgaagcttcctgttgacgtgtcattga

SEQ ID NO: 1755 - DNA, 966 bp, unidentified
  source 1..966: mol_type = unassigned DNA; note = Bacteriophage uvig_230232 from the Index of /pub/databases/metagenomics/genome_sets/gut_phage_database (ebi.ac.uk)
aagaaaaaacgcaaggtggagggagctgataagcgcaccgccgatggttccgagttcgaaagccccaagaagaagaggaaagtctagttctgcagagggtgatgccattcgacgaacttgtttattgcagcttataatggttacaaataaagcaatagcatcacaaatttcacaaataaagcatttttttcactgcattctagttgtggtttgtccaaactcatcaatgtatcttagtaccgcattcatttcagtgagagcttactcatcagagttcgtggatagcttcgttttggatgttcatgttaatcttcaggcacatccaatatagaaaaataataacttccctgcgaaggtgtccgaatcggacaccgataaaatttctcagccattttatgcctcctcgtatgttacgcagagcgctccatctacaatacttaatccctcaataccaccgttgctaccattcaaacattcctctactgtccttccatctgccgtttccactgcatccgccattgttcggggataccatttttcccataccggactcgccttcgtacctgtattccgatacagacgtccgtatcagactaacgcttatccattttttctgggaattattagttttagaaaaagtaaagaaaaataaaaccgcccctgcatcagcaggaacggaatttacaagtaaaaatgggaagaccacccaatgctggaacatcggatggtcggactctccttgcggaaagtttagatatgttttataaaaagacatttttattttacatcactttctgtaaatccgcaagggtttattttttatacccatttttccttgtttttggaaaggggatatctatgttaaaagaagatggtatctattatgcgtatctgagaaagagccgtgaggaatcgtcgactgcacgatcaaacatcgatcgaagctgataagctcgaacaagttga

SEQ ID NO: 1756 - DNA, 966 bp, unidentified
  source 1..966: mol_type = unassigned DNA; note = Bacteriophage uvig_220226 from the Index of /pub/databases/metagenomics/genome_sets/gut_phage_database (ebi.ac.uk)
aagaaaaaacgcaaggtggagggagctgataagcgcaccgccgatggttccgagttcgaaagccccaagaagaagaggaaagtctagttctgcagagggtgatgccattcgacgaacttgtttattgcagcttataatggttacaaataaagcaatagcatcacaaatttcacaaataaagcatttttttcactgcattctagttgtggtttgtccaaactcatcaatgtatcttagtaccgcattcatttcagtgagagcttactcatcagagttcggcgtcacacaggaaattgatatttactttactcatattggaattgtaaagtagacaaaaagaaaacggagggcgttggtctgaatgactcagacggctctccgtgatacataactttagggacgttccctatttgtgccgcgataacacgggctttttaaggtgagtatccatttggtatcaccaatatggttgcgggagaccgcaacatatttttcccacgatacttttcaaatttttatacttttttcaaagatagaaaaaaatcagccgaaatgataaatatatgacacgaaatttggacgtccgtatcagactaacgcttatccatctgagggtaaatatatcaaaagccgttccgaaatcattgacggaattatttacaatatcaactcggtgtttgatatgacctcaaaatccacagcggaggacaagctgaaatatttgctgaagtccgccgctgaaaaattatcataaacttatagattattgctggactttcagaaccggttgtgatatactttctgtaatctcaatcggtttgacatagtccgcagcacagacggaaagagaggttaatcatgtcagacacgaataagataacggctttgtattgcaggctcagccacgaggaatcgtcgactgcacgatcaaacatcgatcgaagctagatccgtacgaccacttga

SEQ ID NO: 1757 - DNA, 966 bp, unidentified
  source 1..966: mol_type = unassigned DNA; note = Bacteriophage uvig_229288 from the Index of /pub/databases/metagenomics/genome_sets/gut_phage_database (ebi.ac.uk)
aagaaaaaacgcaaggtggagggagctgataagcgcaccgccgatggttccgagttcgaaagccccaagaagaagaggaaagtctagttctgcagagggtgatgccattcgacgaacttgtttattgcagcttataatggttacaaataaagcaatagcatcacaaatttcacaaataaagcatttttttcactgcattctagttgtggtttgtccaaactcatcaatgtatcttagtaccgcattcatttcagtgagagcttactcatcagagttcgttggtgaaaattcgcatttggaaacctcgcctccaccacataaaaacacgtaatcggaaaggttacgaaacccacgtaatcacgttatatagcgtggttacgtggtttttcttttgcaaattttgcctgatttttcgggagttcaaagcgaatttgaccgtgacctgattaaaatgcgtcgtattttcaggatacccctctcttgcggaaaaaatgggaaaatgggaaaaacaagcgtgtttttctaagagcctgtgttcataaactgccacagattatatagtcggtcttgaatgaactgacgtccgtatcagactaacgcttatccattatcgttcggattcgtattttatgacaaagatgcaagaagaaggtgtaggtcttcgaaagaacaagaaaaaaccactgcccaaagattacaattatgaaaaagtacaggatgctgtacagcgtgcaaaagaattggattgcgatggagaagaatatccgaaagatcatctcggaagcaccgtatataaaatcattgaaaaactcattgaaatgaaaaatcaaatcgaataaccagtaaaggaagtgtaagatgaacgttgtcatctatgcccgttattcttgtgaacggcagacggaacaggaatcgtcgactgcacgatcaaacatcgatcgaagctttcgtagtcatgtcgcttga

SEQ ID NO: 1758 - DNA, 966 bp, unidentified
  source 1..966: mol_type = unassigned DNA; note = Bacteriophage uvig_51701 from the Index of /pub/databases/metagenomics/genome_sets/gut_phage_database (ebi.ac.uk)
aagaaaaaacgcaaggtggagggagctgataagcgcaccgccgatggttccgagttcgaaagccccaagaagaagaggaaagtctagttctgcagagggtgatgccattcgacgaacttgtttattgcagcttataatggttacaaataaagcaatagcatcacaaatttcacaaataaagcatttttttcactgcattctagttgtggtttgtccaaactcatcaatgtatcttagtaccgcattcatttcagtgagagcttactcatcagagttcgtgtgtttagtgatgtgccctcaaacaatttgaaggaaataatcatgggcattctttcagcggcacaagaagataaactacaatgcattttacatcaatatgaataaataatacagtatgactaacatccgcacctttgcaaatctaaatctgttaaattaccatagggatgcagaagtgatctgcacccgcacattgacaaccgcatactcaatcagtgcaatcctgtgtaaagcatgaaaggaaaacacatgaaaagaatacatacgttatacagggtgtccaccaagaagcaagtggagacgtccgtatcagactaacgcttatccatagttttgtgaagaatggagcaatacggaaatcagcaaaaaaatggctatttaagttaagccagcttttgataatgggctttctccctccttattccggtttgtaacccttacactggtagagcatgcggctgttaaccgcagtgtcgttggttcgagtccaacagggggagccaaagaaaagccctaaatctctaaagatttggggcttttgtcattttcaaaaaacttggcaaaacgccctcatgcaccccatttcaccctgcctctgattgttaaccgtaatgttttccctctgattgggaatcgtcgactgcacgatcaaacatcgatcgaagctcagacggcactaagtcttga

SEQ ID NO: 1759 - DNA, 966 bp, unidentified
  source 1..966: mol_type = unassigned DNA; note = Bacteriophage uvig_254558 from the Index of /pub/databases/metagenomics/genome_sets/gut_phage_database (ebi.ac.uk)
aagaaaaaacgcaaggtggagggagctgataagcgcaccgccgatggttccgagttcgaaagccccaagaagaagaggaaagtctagttctgcagagggtgatgccattcgacgaacttgtttattgcagcttataatggttacaaataaagcaatagcatcacaaatttcacaaataaagcatttttttcactgcattctagttgtggtttgtccaaactcatcaatgtatcttagtaccgcattcatttcagtgagagcttactcatcagagttcgtaagaaatgttaaaaatccgtattgctttatggtaggagatgtaatagtaaaatcttcttttacagaaggagtcagcctgaaacaaagattacgggagttggcagatggaatatagaatgaaaattgctataaaggtctggaaaaaaggaaagttctgtgctaatatatgcataggactaaatgaatagaaaccacttcttatttttatagcagattgttctggctaatatgaataaggagtgtttttttatgctatcaaacaacttatctaaaacatatctatgcggaggttatctgcggacgtccgtatcagactaacgcttatccatctggactggtaggtgaaatcaagcaggaaacggctgttcgggaggtgatttgatggcacgaaaagtcagaaatcatccggttccgagagataagatgagtgagaacaaattatcggaacagaccccaaaagttaaaacacatgatttttccgttgcactttacattcggctgtctaaagaagatagcggaaaaaacaatcaaaaaggagaaaatactatgacagaaaaaggaatggagaacaacaaagtaaccgtaatcggaacgatcgtttcaggattcacattcagccatgccgtgttggaatcgtcgactgcacgatcaaacatcgatcgaagctcactaagccacatgcgaaca

SEQ ID NO: 1760 - DNA, 966 bp, unidentified
  source 1..966: mol_type = unassigned DNA; note = Bacteriophage ivig_3141 from the Index of /pub/databases/metagenomics/genome_sets/gut_phage_database (ebi.ac.uk)
aagaaaaaacgcaaggtggagggagctgataagcgcaccgccgatggttccgagttcgaaagccccaagaagaagaggaaagtctagttctgcagagggtgatgccattcgacgaacttgtttattgcagcttataatggttacaaataaagcaatagcatcacaaatttcacaaataaagcatttttttcactgcattctagttgtggtttgtccaaactcatcaatgtatcttagtaccgcattcatttcagtgagagcttactcatcagagttcgaagaatggacaaaaattgatcagtttgtcattcagctttatcctaagatataataaaaccgttggtgcaccaacggtttttcttgtgtatatggtttgatgttaaatacgaacatttgttcctatttattttgtggaaggagccaggaagcaatgacgaggatacctgaaaaagaccgggacatcatggagcaggccatctatctgccgatggtcctgacagtcctcaaccgagatcttgcggtaattgaaaggagcccgttcaagctgaggaagccttatcaggaactggtcgaggagagacgtccgtatcagactaacgcttatccatggatgtattaataggtaaagacggatatcttggtgtgatttttgattcaaacaatataaagaagttgattcgtttcaatacatttagcgaagctcaggattataaaagtagtaattatcaataaataaattttgtgaattccaacttagaagaatatctctaaggattcaacctttggaaaagccatttagggctttttctatttattctaatgtgtattgcttgtttaattatgtatagaggtgatgtaatgaattatcgtagtttcgaaatgcgattattggtctaccttagaaaaagggaatcgtcgactgcacgatcaaacatcgatcgaagctagatatcgagaggtcgaaca

SEQ ID NO: 1761 - DNA, 966 bp, unidentified
  source 1..966: mol_type = unassigned DNA; note = Bacteriophage uvig_123245 from the Index of /pub/databases/metagenomics/genome_sets/gut_phage_database (ebi.ac.uk)
aagaaaaaacgcaaggtggagggagctgataagcgcaccgccgatggttccgagttcgaaagccccaagaagaagaggaaagtctagttctgcagagggtgatgccattcgacgaacttgtttattgcagcttataatggttacaaataaagcaatagcatcacaaatttcacaaataaagcatttttttcactgcattctagttgtggtttgtccaaactcatcaatgtatcttagtaccgcattcatttcagtgagagcttactcatcagagttcgtggtaatagatgatgataacaatctgcaggtcaatgtaaaggaggttgtataaaatggcacgaaagagcaggaaaaacattccggaagtagtcagcagtgcaaccgtccagacagaggtgagcagaccgttccgggcaggattgtatgccagaatttcaatggaaacagaagaaaccttagaaagaggaacgatagaaacccaggtggaactgatgaaaaactttgtggcagatacggaagacatcgcagttgcagaaatatataaggattctgattattctggtacaaatttcgaccgtgacgtccgtatcagactaacgcttatccattcaggaacggagagatatttttctgaataaagtaggaaatccttatctggtccggatcggtaatatgaaagtaaaagtcagatttgcaaataacggtatatctatggagcaggcatttgagaatatgcttctgagtgtctgaaaaagtactggtaaaattgaggggactgtgttagaatgtcggtaaggacaaattatgcagcccccttttattacatggattttctgacgtaataaaaggaggtaagatatgtatcagaatatcaacaaaatctatcatgccgccatctatgtcagattggaatcgtcgactgcacgatcaaacatcgatcgaagctatgtggtgatctggtgaaca

SEQ ID NO: 1762 - DNA, 966 bp, unidentified
  source 1..966: mol_type = unassigned DNA; note = Bacteriophage uvig_138779 from the Index of /pub/databases/metagenomics/genome_sets/gut_phage_database (ebi.ac.uk)
aagaaaaaacgcaaggtggagggagctgataagcgcaccgccgatggttccgagttcgaaagccccaagaagaagaggaaagtctagttctgcagagggtgatgccattcgacgaacttgtttattgcagcttataatggttacaaataaagcaatagcatcacaaatttcacaaataaagcatttttttcactgcattctagttgtggtttgtccaaactcatcaatgtatcttagtaccgcattcatttcagtgagagcttactcatcagagttcggaaaacaaaaatgccgtgctgtatgcaagattcagctcagatatgcagcatgaaacctcaattgaagcgcaggaagaagctatccgcaagtatgccagggagaacggatataccatcattgcggagtacatcgaccgtgcaaaatcagctactacaacggcaaagcgtgacagattcaatcagatgatagaggacagcaaggacggcggattcagtgtcgtaatagtccataagtacgacagattcgcaagaaacaggctggatagtacggtagctaaagctattctcgataagaatggagacgtccgtatcagactaacgcttatccataagcgtttggtgtattattaccgtcccattgactttttttacagcagtgccaatgctttaagctgcaaaatttatattagcaggataaatataaaatactgacccaacataataattgacagaagccgactacataacattccaattatagtcagtgaccatcagcgacaagctgataaagaagctataaaaaatcaagagggataagccgctcagcttatccctcatctgtatatggaaaggaaaaacgatgtcagaaagcactctgaaaaaagctgtattctacggcagatacagttcggaatcgtcgactgcacgatcaaacatcgatcgaagctggaccatggaagcaacaaca

SEQ ID NO: 1763 - DNA, 966 bp, unidentified
  source 1..966: mol_type = unassigned DNA; note = Bacteriophage uvig_22285 from the Index of /pub/databases/metagenomics/genome_sets/gut_phage_database (ebi.ac.uk)
aagaaaaaacgcaaggtggagggagctgataagcgcaccgccgatggttccgagttcgaaagccccaagaagaagaggaaagtctagttctgcagagggtgatgccattcgacgaacttgtttattgcagcttataatggttacaaataaagcaatagcatcacaaatttcacaaataaagcatttttttcactgcattctagttgtggtttgtccaaactcatcaatgtatcttagtaccgcattcatttcagtgagagcttactcatcagagttcgaaacaaaaatcattttaaacggagaaaacgaaaatgcaaggcagtcaaacaaagaatttgaaaagcagtacatgagcgcggtactgctgtcgctctacgaaaacaagatgatcaattatcagcagtatgaagaatgtaagcgcaggctcaaaattgtttagctggactttgaagattctttgcatataatgtgtgttgaaagcgggcgccggaataaacaaaggcgcccgcaaatgaaaggaggataaaaatgtttattgatgataacagaccaaaacgggtggcggcgtactgccgcgtgacgtccgtatcagactaacgcttatccatctgcacctatatccgtcagcaggccttttaattcgggcagcggcatagaatagcgctgggaaaggtagcgcagtgacgcacccaattcgccgtccggccctcttgacggcaaaaagagatgatttaagtataaaaaataatatcaagccggttttccggcttaacatatatgattttgctgatgatcgtccgcagggcttcgttctttgcctgttctgaaacatcgggtgatttaatgaaatcaagcacatttatcacgcgttttgaaaattcctttttgctgactttgttacagtctgcggaatcgtcgactgcacgatcaaacatcgatcgaagctgaggttctcaacgtacaaca

SEQ ID NO: 1764 - DNA, 966 bp, unidentified
  source 1..966: mol_type = unassigned DNA; note = Bacteriophage uvig_67879 from the Index of /pub/databases/metagenomics/genome_sets/gut_phage_database (ebi.ac.uk)
aagaaaaaacgcaaggtggagggagctgataagcgcaccgccgatggttccgagttcgaaagccccaagaagaagaggaaagtctagttctgcagagggtgatgccattcgacgaacttgtttattgcagcttataatggttacaaataaagcaatagcatcacaaatttcacaaataaagcatttttttcactgcattctagttgtggtttgtccaaactcatcaatgtatcttagtaccgcattcatttcagtgagagcttactcatcagagttcgctaatacaatgcgggtagagatttattacagatttattgggaaagtcgattagtgtgcgctttgggtatcgctctagagttttcccccacaagcaacatataaaatctagtcgtgactatcctccgaaacagtccggcggactgtttcggaagaacattacacatctaaattatagtttgtcacaatcccaactggcatgcctatcattaaggatcccacaaactacgcctgtaattttatctcacacattaaataccgttccgacaaacagcggctgaccatcaagcccggttatcacggacgtccgtatcagactaacgcttatccataaccgcgaggttatggtataattgtccgatacgcacggagcaaatctatgatttgcgtatgtgcgaggacgttttgatgtataataaacgctttgcgtttattataccacagaaccaaatcttttacaacggtaaacagtatcaaatttgcagcttttacgctttagcgtcttgaattttatttgagaatagtgtataatataaagtgcaaatattccgattctgtctgctgaaagaaaggacggttattatgaacatacagcagaacaggattacagcgctttattgcaggctcagccgggaatcgtcgactgcacgatcaaacatcgatcgaagctgactgacctcgcgagcaaca

SEQ ID NO: 1765 - DNA, 966 bp, unidentified
  source 1..966: mol_type = unassigned DNA; note = Bacteriophage uvig_505551 from the Index of /pub/databases/metagenomics/genome_sets/gut_phage_database (ebi.ac.uk)
aagaaaaaacgcaaggtggagggagctgataagcgcaccgccgatggttccgagttcgaaagccccaagaagaagaggaaagtctagttctgcagagggtgatgccattcgacgaacttgtttattgcagcttataatggttacaaataaagcaatagcatcacaaatttcacaaataaagcatttttttcactgcattctagttgtggtttgtccaaactcatcaatgtatcttagtaccgcattcatttcagtgagagcttactcatcagagttcgaagcgaggtgacagtggatggacgctcaaatgaggaatgagtatcgcaaggcagtggcattgcagtacctcaaacggctctttacagcagggctgcttactgacgaggaatatcaaagggcttgtgacctgctgataagaaggtatctggcagcagcataagagcctatctgtctgcgcttcaccatagatatattgaggattgtgtggtagtgttgttgcttgaaaagagccgaaaggaggtgccctgcatgcccaaggtacgtgtgatacaggcaacgaaaggatcgcttgcaaacaggacgtccgtatcagactaacgcttatccattaaacgggctggaactgacaggctcggagggaaacagcgatggcgagaaatagatgtctgccctttggatacaggttggaaaacggagaaatcgtgatatgcgcttccgaagccgagtgcgtaaagaacgcatatgcttcctatgctgatggcatctcctacgcctccatcgcagtaactctgcaggccacaggcatccgctatcacccagatacgccgctttggaataagcacatggttaaacgcatgctggagaataagcggtataccgggatggatgggtatcccatcatcatacagggaatcgtcgactgcacgatcaaacatcgatcgaagctcgccgagaatcctctcaaca

SEQ ID NO: 1766 - DNA, 966 bp, unidentified
  source 1..966: mol_type = unassigned DNA; note = Bacteriophage uvig_433950 from the Index of /pub/databases/metagenomics/genome_sets/gut_phage_database (ebi.ac.uk)
aagaaaaaacgcaaggtggagggagctgataagcgcaccgccgatggttccgagttcgaaagccccaagaagaagaggaaagtctagttctgcagagggtgatgccattcgacgaacttgtttattgcagcttataatggttacaaataaagcaatagcatcacaaatttcacaaataaagcatttttttcactgcattctagttgtggtttgtccaaactcatcaatgtatcttagtaccgcattcatttcagtgagagcttactcatcagagttcgtttttctgcatcagtctctccctttggagtatttcttgccattcttctttgtagcagtacatattttctcgattctaaactcctttgcttttttatccctgttgtattctattggggggaagaaatctctaggtttgataaatatgaaaaattgcgttccaatttatggtggggtgttgttatagcaatttttgtcggaattatcagcagttttctctattcccttattaattaaaaatgaggtaatcatatgattcccttttctgtatcatcttccgctctacccgatggatgtagtgggacgtccgtatcagactaacgcttatccatgaccgcaaagaacattgattctttgcggtcttttggcatttgtaacccactaaataacccacttatttttcaatcctcaaaaccttttcaaaaagttcatttacactgcttgccaattcttcatcttcaccctcaagcgcatgaccataaataccgaacgtatccatatccgcagagtgccccaccaagggcttgacctctccagctggcaatcgcttgaccacactcacaaacgtgtgccgcatctcataaggtgttatacgctgcaaatcattgtgcttgcagaagcgatcccaatgcggaatcgtcgactgcacgatcaaacatcgatcgaagctgtccgcttcgaatcataaca

SEQ ID NO: 1767 - DNA, 966 bp, unidentified
  source 1..966: mol_type = unassigned DNA; note = Bacteriophage uvig_123245 from the Index of /pub/databases/metagenomics/genome_sets/gut_phage_database (ebi.ac.uk)
aagaaaaaacgcaaggtggagggagctgataagcgcaccgccgatggttccgagttcgaaagccccaagaagaagaggaaagtctagttctgcagagggtgatgccattcgacgaacttgtttattgcagcttataatggttacaaataaagcaatagcatcacaaatttcacaaataaagcatttttttcactgcattctagttgtggtttgtccaaactcatcaatgtatcttagtaccgcattcatttcagtgagagcttactcatcagagttcgagtttgcagatttacagaaattaaagaaagagaaggaggcgcagtcaagatgacaaatcatagaaaaacagctgtttacatccgtttatccgcagaagatgacaatgtagatggcagagctaaaaaagagagcgacagtgtaacttctcagagaattctgttaaaatcatttgtgattgatcagctgggtgtagatgaggcagatatcctggaatatgtggatgatggtgtcagcggtactcattttaaacggcagggatttcaacagctgcaggatgacatgaaaagtggagaaatcgggacgtccgtatcagactaacgcttatccatgaaaaagcagacaaagccaatacctggctggattattttgtgaaatatcaggatattgaagaactgtcccgcactgtggtggtagaactgatcaggcaaatcagagtatatgataaaaagaatatagagatcacttttgattttgatgattgttatcagacattgctgaatcaattacctgctatgggagttgatatggtaatagatgatgataacaatctgcaggtcaatgtaaaggaggttgtataaaatggcacgaaagagcaggaaaaacattccggaagtagtcagcagtgcaacggaatcgtcgactgcacgatcaaacatcgatcgaagctcttaacgtggccgtctaaca

SEQ ID NO: 1768 - DNA, 966 bp, unidentified
  source 1..966: mol_type = unassigned DNA; note = Bacteriophage uvig_205573 from the Index of /pub/databases/metagenomics/genome_sets/gut_phage_database (ebi.ac.uk)
aagaaaaaacgcaaggtggagggagctgataagcgcaccgccgatggttccgagttcgaaagccccaagaagaagaggaaagtctagttctgcagagggtgatgccattcgacgaacttgtttattgcagcttataatggttacaaataaagcaatagcatcacaaatttcacaaataaagcatttttttcactgcattctagttgtggtttgtccaaactcatcaatgtatcttagtaccgcattcatttcagtgagagcttactcatcagagttcgtttggtttggtcatgtgtttaagatcagaataagactgccggaaagctattaatgccgtttcggcggtcttattctattaacaataaaaaacagcacgaatgcgatatatgttgcattcgtgctgttttttttcgcgaaacaaatgtctttacacttaaaatacttattatgtatttggcgcaatgatattttttgctctcactttatctactacggtttgataaacatcaatgttgtattccggagccatctcaaaagttgcaaataaagcgtatggaattaagacatcagcatctgaagacgtccgtatcagactaacgcttatccatctaagaccaaaagtgtaactcaaaaaggtcatggctgtctttggtggatatgcatcggttggtggtggtggatgattgacatgctcttttggtgtgttgcttttatcccgcgcctcataattcaatcccttaaagggcgaaaggataaaacgcgatccacaacaaaaactgtctccaatgaaaagatacataccgtgtatcgttccatgtgtatatgccacgactgtggacatcattgggagaaataattatgcccgctgaaatcaacttcaaccttcccggaaataaaaaatccgaacaggaatcgtcgactgcacgatcaaacatcgatcgaagcttcctggccgtggtgaagaca

SEQ ID NO: 1769 - DNA, 966 bp, unidentified
  source 1..966: mol_type = unassigned DNA; note = Bacteriophage uvig_311654 from the Index of /pub/databases/metagenomics/genome_sets/gut_phage_database (ebi.ac.uk)
aagaaaaaacgcaaggtggagggagctgataagcgcaccgccgatggttccgagttcgaaagccccaagaagaagaggaaagtctagttctgcagagggtgatgccattcgacgaacttgtttattgcagcttataatggttacaaataaagcaatagcatcacaaatttcacaaataaagcatttttttcactgcattctagttgtggtttgtccaaactcatcaatgtatcttagtaccgcattcatttcagtgagagcttactcatcagagttcgatgaaaacaaagagatagtaagagttgatttttttagattaacttcgatgtaacttatattcccctgtaggctcatctgccaatataacagatggatgtgtaaccaatgcacgaccaatggatgctctttgttgctgacctccagacaattcatttggtaaatgtgtttttctgttttctaagcctaaatgtttgatgagttcatttagctctttttcatcaacttttctaccatctaaatctagaggaagcgtcatattttctactacatttaaaattggtattaaattataaaactgagacgtccgtatcagactaacgcttatccatcaattggatacaacccctaagtggattgcacatatatcgacaccaaaaatagaatacaaatcaaaataaatactcccctgcgccaacagaggagtaacaaagtgatacgccaatatcacatataaaaaaacttcgcctaaagtccttttacgtactttattttaccatataaagcacgtctaaggcaaatatataagataggacgtgtttttattatgccaatttgcataacaaagaaagggatggttgtatgagaaagaaaatacgtgtagcacaatatgagcgtgtttctcatgaagaggaatcgtcgactgcacgatcaaacatcgatcgaagctaccaatctagcatagagaca

SEQ ID NO: 1770 - DNA, 966 bp, unidentified
  source 1..966: mol_type = unassigned DNA; note = Bacteriophage uvig_268018 from the Index of /pub/databases/metagenomics/genome_sets/gut_phage_database (ebi.ac.uk)
aagaaaaaacgcaaggtggagggagctgataagcgcaccgccgatggttccgagttcgaaagccccaagaagaagaggaaagtctagttctgcagagggtgatgccattcgacgaacttgtttattgcagcttataatggttacaaataaagcaatagcatcacaaatttcacaaataaagcatttttttcactgcattctagttgtggtttgtccaaactcatcaatgtatcttagtaccgcattcatttcagtgagagcttactcatcagagttcgggcatgccgcgccggatgatttcgagattacgatattcccccggctgtcctaaaaaattctctatgataacctcggtgtaccgaagaaatggcgcactgggaaatgattggctccatgatccttcaatgcatgaaaaacgccagtattgaagaaataaaggccgcggggctagccgggtattataccatgcatgatcacggcgtatacccagcggatcccaatggggtccccttcacggcgtcctatatccaatgcacaggcgatccaattgctgatttggttgaggatctagctgctgagacgtccgtatcagactaacgcttatccatattacttatactggcaatcacaagacaaaaaaacgctaaagcgtataaacctgctgttacaggatatcgatcgcaatggctattccggtttaggcaagccggagcctttaaaaggcgatttacatggttattggagccgacgcattgacgaaacaaaccggcttgtataccgcatagtcagcgaccgggttgagatattacaatgccgtacgcattacaaacatattcaataaaaaagccggaggcagtcatggcgcaagaaaactatatcatctatctgcgcaaatcccgggcggacgcggaatcgtcgactgcacgatcaaacatcgatcgaagctgtgaacgtccactgaggaca

SEQ ID NO: 1771 - DNA, 966 bp, unidentified
  source 1..966: mol_type = unassigned DNA; note = Bacteriophage uvig_490592 from the Index of /pub/databases/metagenomics/genome_sets/gut_phage_database (ebi.ac.uk)
aagaaaaaacgcaaggtggagggagctgataagcgcaccgccgatggttccgagttcgaaagccccaagaagaagaggaaagtctagttctgcagagggtgatgccattcgacgaacttgtttattgcagcttataatggttacaaataaagcaatagcatcacaaatttcacaaataaagcatttttttcactgcattctagttgtggtttgtccaaactcatcaatgtatcttagtaccgcattcatttcagtgagagcttactcatcagagttcgaaatacagaggatatatacagtcagtttccgtcttcaagggacgcagcataaggaggttcagaaatggtaggatttattattggattgcttgcaggcggtacagcgggagtattcacaatgtgtctctgtactgcggcaaagcaggcagatgaaaatatgtcaaattcggacaagtaattttgtcaggtttggtgataccattctgaaaagatttgtggtattcttgttggttgaaaggagagtgagaaaatgccgacagtaacggtgatacagcctacaatatcagaagaacaaaatacgacgtccgtatcagactaacgcttatccatatgagctggagtttcacttgatcggcggattgaaattcaaagaaaacatataacagaaaatgccttgcagtaaaattgcagagcttttctttgttggttttggtactggatttccgcagaattttgtagtattgttgtacatggaggtgaaattagatgcccaaaaacagagtaataccgttcggctactgcatgaaaaacggcgaaataacgaccgaaccaaaagaagtttatgcagttgcagagattttcagagaatatctgaatggcagcagtttacttcaaattgcaaagcttatgggaatcgtcgactgcacgatcaaacatcgatcgaagctcacatcagccattccggaca

SEQ ID NO: 1772 - DNA, 966 bp, unidentified
  source 1..966: mol_type = unassigned DNA; note = Bacteriophage uvig_220844 from the Index of /pub/databases/metagenomics/genome_sets/gut_phage_database (ebi.ac.uk)
aagaaaaaacgcaaggtggagggagctgataagcgcaccgccgatggttccgagttcgaaagccccaagaagaagaggaaagtctagttctgcagagggtgatgccattcgacgaacttgtttattgcagcttataatggttacaaataaagcaatagcatcacaaatttcacaaataaagcatttttttcactgcattctagttgtggtttgtccaaactcatcaatgtatcttagtaccgcattcatttcagtgagagcttactcatcagagttcgtggaaataatggttgcggagacaggatttgaacctgcgacctccgggttatgagcccgacgagctaccgaactgctccactccgcgatatacaattgaccccgcctgctgcgcgatgtcaaagacctctttggcaatggccgcctcgtgcattcagttcttcttcggctggcggcggacgttgcgctcgcgcacgagcgacttcttgagcggcttgcagaagagcacgcggtcgccgtcgaccatcttgcgcacgtccttcgggcacttcgtgacgcacacgccgcagccgatgcagcgcgacgtccgtatcagactaacgcttatccatcttttcggctctgaatgaagttgggcaaaaagtagcttgtgagcgtgtggaggagctggccaagatagacgattataagcgcacagagccgccagaaacgctttcagatacggataccacccaaaaaggaaagccgtcagagggcgtagaaacgcccacaggcggcaacaatgaatcgtgattacacacggcgttactgtaacaaaaaaccgcccatgcagaagcatgagcggtaaaaggatgtgagaacatgaacgctgtaatatatgcccggttttcatcagaccggcagaacgaggcggaatcgtcgactgcacgatcaaacatcgatcgaagcttggcacttcagcattggaca

SEQ ID NO: 1773 - DNA, 966 bp, unidentified
  source 1..966: mol_type = unassigned DNA; note = Bacteriophage uvig_127324 from the Index of /pub/databases/metagenomics/genome_sets/gut_phage_database (ebi.ac.uk)
aagaaaaaacgcaaggtggagggagctgataagcgcaccgccgatggttccgagttcgaaagccccaagaagaagaggaaagtctagttctgcagagggtgatgccattcgacgaacttgtttattgcagcttataatggttacaaataaagcaatagcatcacaaatttcacaaataaagcatttttttcactgcattctagttgtggtttgtccaaactcatcaatgtatcttagtaccgcattcatttcagtgagagcttactcatcagagttcgcgtatcaaggaatacatacggcagattaaaaacccgtaccggtttaagtgcggaaattttgtcgttacggcaaaatacagtgacaaaggcttatccattgaggattgtctgcaaagcattatcatataattttttgcggtgttcgccgttccgtgataaaatatattacggaaaaagaattgaatacaagataaattcaatactctttgattttgaggacaaaccgtaaatttcaaggaggtacaaatttatgtataacgccacaaaatatcttcgcttatcctacacaagcgacagagcgacgtccgtatcagactaacgcttatccatacgaatacgaacaggcattatctgcattaaacgaatatcgggaggtggtttgatatggcaagaaaaagcagaaaaaatatcactgttgcacagacaaagccggaaaatatgtctatatacataaaaacagcacagtatatcagattatcggttgaggacagccacaacaagggtaattccattgaaaatcaaaagatgatacttgatgattttatcgcacaaaacggaaatatgcgtttggcaggagtatatatcgacaacggagcgacaggcacaagctttcaccgccccgaatttcagggaatcgtcgactgcacgatcaaacatcgatcgaagctcatcgacgcttgcgacgaca

SEQ ID NO: 1774 - DNA, 966 bp, unidentified
  source 1..966: mol_type = unassigned DNA; note = Bacteriophage uvig_418530 from the Index of /pub/databases/metagenomics/genome_sets/gut_phage_database (ebi.ac.uk)
aagaaaaaacgcaaggtggagggagctgataagcgcaccgccgatggttccgagttcgaaagccccaagaagaagaggaaagtctagttctgcagagggtgatgccattcgacgaacttgtttattgcagcttataatggttacaaataaagcaatagcatcacaaatttcacaaataaagcatttttttcactgcattctagttgtggtttgtccaaactcatcaatgtatcttagtaccgcattcatttcagtgagagcttactcatcagagttcgtctggcaaaaagtatcataccgtccattgttcctatttagataactgtcaggatttatatatctattctgttgatggagctaaagcgaaagggtatgaaccatgtagcgtttgtcatccatctaaaagcccctactccgcagcccaacaagatgggtacactgcacaagatatagcagacatactttcgtctaattatcctcaatgaatttctaaattttttcggtaccatacccaaggaggagtaataaatgtctttttcgccccctcgcaaagctgctctttatgcaaggttctctacgacgtccgtatcagactaacgcttatccattggtgtttactattcctcgtagcatactcgcccttttgaatttttcagcctaatattctataactttgcgtaatgaatagatattacgatttttttgtagtacttttaaggatagtgttttagtgttacaatattatttaatgctctaataggttacaacttactgtaagtgcagtttattcctttctgcagtgagggataaattaaaaaaaactcacgttaaattaaacgttgcaaacgcaatgtatgaggtgaacttaattgcctgaaaatgtaatcaaatataatttgctaatttccggaatcgtcgactgcacgatcaaacatcgatcgaagctacacaggcaacaaggcgaca

SEQ ID NO: 1775 - DNA, 966 bp, unidentified
  source 1..966: mol_type = unassigned DNA; note = Bacteriophage uvig_169032 from the Index of /pub/databases/metagenomics/genome_sets/gut_phage_database (ebi.ac.uk)
aagaaaaaacgcaaggtggagggagctgataagcgcaccgccgatggttccgagttcgaaagccccaagaagaagaggaaagtctagttctgcagagggtgatgccattcgacgaacttgtttattgcagcttataatggttacaaataaagcaatagcatcacaaatttcacaaataaagcatttttttcactgcattctagttgtggtttgtccaaactcatcaatgtatcttagtaccgcattcatttcagtgagagcttactcatcagagttcgccagggctttgactatttcggtaaaaaacaaacctattggctttcagttataggcggttataatgataatagataaggacgtgaaatgcacgaatgaagctccatataaccgacgattcgcacgcatagatcgaagacatgccaaacattcggcttttcttcagctcttctcctgatcaggacattgagaatatggttttgggaatgtagttgcgggactctccacatcaacgggaggaagaaaacaagcatgaaacgagtattatgcctttacagggtttcaaccatcgggcaggtagagacgtccgtatcagactaacgcttatccattggatatccacttccgcatcacggcgcaacagtatttgggaaaagcatcgtgagggagtcaatatcatttgcaccataatatgcgctgcttgacgatgatcgctttgcgtcggagccgcatttcgccaacgaggaaaaaacgctcgctctgcctacgggtctccaagctgggcattccactcatatctccttctctcttgcttttcaccgtgcttttcgtcaatgtgcaggcctcattgatgactcggacggctccttttttgccgcgtcgaaaaatttccattttgagacttgcgcagaggaatcgtcgactgcacgatcaaacatcgatcgaagctatggtaagatccaatcgaca

SEQ ID NO: 1776 - DNA, 966 bp, unidentified
  source 1..966: mol_type = unassigned DNA; note = Bacteriophage uvig_572866 from the Index of /pub/databases/metagenomics/genome_sets/gut_phage_database (ebi.ac.uk)
aagaaaaaacgcaaggtggagggagctgataagcgcaccgccgatggttccgagttcgaaagccccaagaagaagaggaaagtctagttctgcagagggtgatgccattcgacgaacttgtttattgcagcttataatggttacaaataaagcaatagcatcacaaatttcacaaataaagcatttttttcactgcattctagttgtggtttgtccaaactcatcaatgtatcttagtaccgcattcatttcagtgagagcttactcatcagagttcgcggtcacggcagcagctggaatgcacaactggaaatgctctgcgcgcacgatcacacaactatgcacagccgcgtcactgtcgcgcgggcaatcttggaaaactatgagatggaagccgcgcaaggcaatcttgtcgcgacagatcacattgcgccggatctagaccgtttgcgtgcagccgtggaaagcggaaaagatgccgcgcaggaaggcaaaatcggatatgtacacgcaggggaggtgtgatacatggatgctatatacgcccgtcagtcaattgagaaaaaagactctctatcgacgtccgtatcagactaacgcttatccatttgacaaagtgcttgtctccccgtcccgcccgccggaaatcatctggaaataattgtgtttatttatgcactgtgtatttttatgtctagcgtatctacatccaatgggtatagcaaaaccgcctcgcttgcgcttggcggtttcttcattcttactttttcttcgattgtttgcattcttccggatagagcttttcatatgcaggatataaaaaacgattcgtatctaaaattgcatccgagcagttatgatgtttcccatagcgaagatcgtcagacggaacgccatatttcttgcatggaatcgtcgactgcacgatcaaacatcgatcgaagctgtgttgaacacctaatgaca

SEQ ID NO: 1777 - DNA, 966 bp, unidentified
  source 1..966: mol_type = unassigned DNA; note = Bacteriophage uvig_327543 from the Index of /pub/databases/metagenomics/genome_sets/gut_phage_database (ebi.ac.uk)
aagaaaaaacgcaaggtggagggagctgataagcgcaccgccgatggttccgagttcgaaagccccaagaagaagaggaaagtctagttctgcagagggtgatgccattcgacgaacttgtttattgcagcttataatggttacaaataaagcaatagcatcacaaatttcacaaataaagcatttttttcactgcattctagttgtggtttgtccaaactcatcaatgtatcttagtaccgcattcatttcagtgagagcttactcatcagagttcgatatttaaaaatgcctgcaaagccgttgacagatgcggagcttttacaggactacaactattttatggcgcagaggttagctaaggatatgcttgaaaaaagacttatctcgttggaagaattcaacaaattaacaaagaaaaatcgtgatacattctctccatttttagccgagattatgccgaaaacaacttgacaattgtgacatttagagtgatgtatatacaagtgaaagtggaggtgagttatcatgaaaaaggttacgaaaattgacaaaattcaacctgcaaaaaatgccgagacgtccgtatcagactaacgcttatccataaaaaataggatttgttctgagatgtggccttacatttgaggagatgatttaatgggacacacgccatttggatatataatcgttgacggaaaggctgttgttgacgaagccactgccgaacaggttcgcaatgtctatttgaattaccttagcggactttctcttgtcgatgcggcaaagagggtaggacttaatatgcgacattgcggagtgaagaatatgctgcaaaacaagcactatcttggcgattacttctacccgcaaataatagacaatgaaatttttaatgctgccaaaatggaatcgtcgactgcacgatcaaacatcgatcgaagctgacgacgcctcttggtgaca

SEQ ID NO: 1778 - DNA, 966 bp, unidentified
  source 1..966: mol_type = unassigned DNA; note = Bacteriophage uvig_177600 from the Index of /pub/databases/metagenomics/genome_sets/gut_phage_database (ebi.ac.uk)
aagaaaaaacgcaaggtggagggagctgataagcgcaccgccgatggttccgagttcgaaagccccaagaagaagaggaaagtctagttctgcagagggtgatgccattcgacgaacttgtttattgcagcttataatggttacaaataaagcaatagcatcacaaatttcacaaataaagcatttttttcactgcattctagttgtggtttgtccaaactcatcaatgtatcttagtaccgcattcatttcagtgagagcttactcatcagagttcgcaaaagaaagagcttctgcattgcaggagctcttttacgttaggttgatatatacacaaagcaggcaactatttcttaatagttatgcaaaatatactaacaaaacaaaaagctccggcgcaaaccggagcaaagatatactataccgcaaggtgcaatataatataaccgtaagcaagtcatattatatcacaatgcaccttacaatgtatagggtgtattttttatactcataaaggagcgtgatattatgtactgtatctatcttagaaaatctcgtgcggatatggaagcagaacggacgtccgtatcagactaacgcttatccatacggaccatacaacaacttccagatcgttgtacaccctcgtattccggtataatttattacttacaccctcttggcacgggttcctcggtgccaatatccgtaagcattccgatcacccgtttatccggcattgcataccgttgtgataaatatcttgtagctgcacctttttcaccatccggtccgccaagctgactcatgatcgccattgcaagctttgcatctgttgttttaatattaaccggatattccaacattttaatataagtccacattagcaatcacatcctttctgccatggaatcgtcgactgcacgatcaaacatcgatcgaagctgagtgtggtagtcagacaca

SEQ ID NO: 1779 - DNA, 966 bp, unidentified
  source 1..966: mol_type = unassigned DNA; note = Bacteriophage uvig_457951 from the Index of /pub/databases/metagenomics/genome_sets/gut_phage_database (ebi.ac.uk)
aagaaaaaacgcaaggtggagggagctgataagcgcaccgccgatggttccgagttcgaaagccccaagaagaagaggaaagtctagttctgcagagggtgatgccattcgacgaacttgtttattgcagcttataatggttacaaataaagcaatagcatcacaaatttcacaaataaagcatttttttcactgcattctagttgtggtttgtccaaactcatcaatgtatcttagtaccgcattcatttcagtgagagcttactcatcagagttcgttgtgtttctttcagcgctgaagctgctggagcagctcaccgaaaagggcctgctgacagtggatgaggcggagaagtcccgcattgaactggagcgcaagctccggcccactctgctgttcgcctgaacaggctctatgcgagaatagctgattgcccagtttttccacttctttttcgttggtgttggtaatggctattgcggaaggactgtggtagtgtgtgttgctgaaaggaggtcaaaaaagatatgacggaaacaaacataagtacagcaagagttccgcaggtcacagtaatgacgtccgtatcagactaacgcttatccatgcctgctgaatgggatggaactggcagaaaacatagagaggacggtgcgataaatggcgtggcaaagaaaaattcctttcggctatcaggtccggaacggcaggatcaactgccatccggaggaagcagagcttgtaagggctatcttctcccgctatctgctgggcggctcctacagtcagatcgctgacgagatgacccagcaaggtgtgcgctatcatcaacataatgcccagtggaacaaacacatggtcaagcggattttggagaatgaacggtatctcgggatggatggctatcggaatcgtcgactgcacgatcaaacatcgatcgaagctaggacgcctcgatcgacaca

SEQ ID NO: 1780 - DNA, 966 bp, unidentified
  source 1..966: mol_type = unassigned DNA; note = Bacteriophage uvig_580269 from the Index of /pub/databases/metagenomics/genome_sets/gut_phage_database (ebi.ac.uk)
aagaaaaaacgcaaggtggagggagctgataagcgcaccgccgatggttccgagttcgaaagccccaagaagaagaggaaagtctagttctgcagagggtgatgccattcgacgaacttgtttattgcagcttataatggttacaaataaagcaatagcatcacaaatttcacaaataaagcatttttttcactgcattctagttgtggtttgtccaaactcatcaatgtatcttagtaccgcattcatttcagtgagagcttactcatcagagttcgaaatcgtgtacgaaaaatcaaagaaaagacttgtctttttctttcacacataaagttatattcctttactgtacggcggtccggacggtgagttgggagcttaagcgtgctataatgtagtcacaaaagaaaaagaaaggaatgaatgacttatgacaaacaatatgtattacgtagcagaggaaaagatattaaacgagatcgcaaatgaaaaaaagttttcattccgtgctctcttgaaccttctgacagcaggcgctatctcaagaaagttctgagagactcggcttttgcgagccggacgtccgtatcagactaacgcttatccattatgaggacggggaaatctcatatcaggcttccgctctcggaacaacaaaaacaatcagacttgagaaagtaaaataattcagttgcagagcttataaataaaactgccgcccggtgctggaacaccgaacggcaaaagatacaatccacacacatacacattaaaaaggagcagattgcgtaaatatattatcacatctgcttcgtttttgcaagtttaatttactcaaaaataaagcaggtgttttttatgacaacagcagctgcatatatcagagtttcctccgagcgtcaggacgaggaatcgtcgactgcacgatcaaacatcgatcgaagctaagtagagcaatagagcaca

SEQ ID NO: 1781 - DNA, 966 bp, unidentified
  source 1..966: mol_type = unassigned DNA; note = Bacteriophage uvig_576757 from the Index of /pub/databases/metagenomics/genome_sets/gut_phage_database (ebi.ac.uk)
aagaaaaaacgcaaggtggagggagctgataagcgcaccgccgatggttccgagttcgaaagccccaagaagaagaggaaagtctagttctgcagagggtgatgccattcgacgaacttgtttattgcagcttataatggttacaaataaagcaatagcatcacaaatttcacaaataaagcatttttttcactgcattctagttgtggtttgtccaaactcatcaatgtatcttagtaccgcattcatttcagtgagagcttactcatcagagttcgctaggagcatatctcctagtatttttttgcattaaattttgaaatattaatagtatatattatagcaattataatcagggtgaaagtgtgagagttaatattatttatggagaaagagattttgaggagttatttaagaagttaatagaggaaaaagtaaatgatttaattcttgaagtgaaaagtcattatgatttacgttataatgataataactatctatccactttaaaggccgaggtggataaagatgaataaggtatggaatgtagcaatatatgctagagttagtactgacaagacgtccgtatcagactaacgcttatccattcggtgggaatcgagaaaaagaggttaatatatattttaagttcagtaattgataaaaaagttattttttttataaaataacctttatcgtctaataagggactgctacgtgtataggtctttcagctgttaagcttttaaagaaagatggagatgcagttatggttgttcttccgtcagatcattatattgagaatgaaaagaattatgtagaaacattgaatcaagctgtagaactagctaatagaagaagaggaatagttactttagggatagagccaactagaccagaaacggggtggaatcgtcgactgcacgatcaaacatcgatcgaagctatgcacctcttgatcgcaca

SEQ ID NO: 1782 - DNA, 966 bp, unidentified
  source 1..966: mol_type = unassigned DNA; note = Bacteriophage uvig_157917 from the Index of /pub/databases/metagenomics/genome_sets/gut_phage_database (ebi.ac.uk)
aagaaaaaacgcaaggtggagggagctgataagcgcaccgccgatggttccgagttcgaaagccccaagaagaagaggaaagtctagttctgcagagggtgatgccattcgacgaacttgtttattgcagcttataatggttacaaataaagcaatagcatcacaaatttcacaaataaagcatttttttcactgcattctagttgtggtttgtccaaactcatcaatgtatcttagtaccgcattcatttcagtgagagcttactcatcagagttcgtatctatccaggcttttcgatcaacatccaggaactgttgaaatagcatcctgtaatttaaccaaataacgcaaaaaccgccccggtgctagtaacaccgaagcggaattgctaagattgtaacctacaaatccctaaggactgcgtgatataatcttccttaagcaagagcattataccacacatccttccaatttgcatagggtgtattttttttaccctttttacataatttagagaaggtgattctatgaaaaatgggaattatgctatgtacctgagaaagtcccgtgccgatcggacgtccgtatcagactaacgcttatccatccaaaaaagatgcgaaagtattcattcacgtatatccaaaaaccccggaataacttgggttctcaacccatgacaccctgatggaacagaagaactggcacatattcccaaactgaactgattacactatatcacaggtggagtgcgacattctacgacatcttgaaattatttaacgcactcccatggattctctggggctgtctttcgttataccccattttttctccgatttctttccaattcagcccccacagataccgcagtcgcagcaccctctgctcatccgggttctccataggaatcgtcgactgcacgatcaaacatcgatcgaagcttaatacagccagctcgcaca

SEQ ID NO: 1783 - DNA, 966 bp, unidentified
  source 1..966: mol_type = unassigned DNA; note = Bacteriophage uvig_555782 from the Index of /pub/databases/metagenomics/genome_sets/gut_phage_database (ebi.ac.uk)
aagaaaaaacgcaaggtggagggagctgataagcgcaccgccgatggttccgagttcgaaagccccaagaagaagaggaaagtctagttctgcagagggtgatgccattcgacgaacttgtttattgcagcttataatggttacaaataaagcaatagcatcacaaatttcacaaataaagcatttttttcactgcattctagttgtggtttgtccaaactcatcaatgtatcttagtaccgcattcatttcagtgagagcttactcatcagagttcgtgccggggaccggaatcgaaccggtacgggtatcactacccgagggattttaagtcccttgcgtctgccagttccgccacctcggcctgaaatggaggcgacacccggaattgaaccggggataaaggttttgcagacctctgccttaccgcttggctatgtcgccgaccagctataaaaaagaggctggctcctctttcttagctaaatggagcggaaaacgaggctcgaactcgcgaccccaaccttggcaaggttgtgctctaccactgagctatttccgcataaatggtgcctcaggacgtccgtatcagactaacgcttatccatttaaaagcccctacaattaaaggcaacaaaagtacaaaaatgaaaaaagctgaaagctttatccttgcagggcaagatttaaaaattctaagtgaagatactttttatgatttaatagaagacctctaaagccaaaaaaatccctctgcccggcaccacccggacaaagggcaaaccacggaatgtgatttaaacttaacaccaatattattatatcacattccaccattttaagggagtgtgattttttatgcctaaaaatgctgttatttacgcccggtttagctcggaaaatcaacaggaatcgtcgactgcacgatcaaacatcgatcgaagctgcgcgaaggatccatgcaca

SEQ ID NO: 1784 - DNA, 966 bp, unidentified
  source 1..966: mol_type = unassigned DNA; note = Bacteriophage uvig_193710 from the Index of /pub/databases/metagenomics/genome_sets/gut_phage_database (ebi.ac.uk)
aagaaaaaacgcaaggtggagggagctgataagcgcaccgccgatggttccgagttcgaaagccccaagaagaagaggaaagtctagttctgcagagggtgatgccattcgacgaacttgtttattgcagcttataatggttacaaataaagcaatagcatcacaaatttcacaaataaagcatttttttcactgcattctagttgtggtttgtccaaactcatcaatgtatcttagtaccgcattcatttcagtgagagcttactcatcagagttcgttcgatttgaattgattggcggaattggctttgtggaacagattatgaggtaagaaaatggtgaaaaatcgaaatataccatttggatattgcatggtgaacggaaaatatgcgttgaacgctcccgaagcagaaacagtacaggaaatatttaaaaaatacataggcggcaagtcgctaaaaacaatagcggcagaaatgaggataccgtataatacgggcaaggcggtttggaataagaacatggtctgccgagtgcttgaaaaccgaaaatatgtcggcgagaacggttatccgcaggacgtccgtatcagactaacgcttatccatcaagaagcaatcataaggtacaaattctatttgtgccaaaattttctggataaactgttgggcgaaaatctcataaccgaggcgcagcgcaggaaaatcgaaagtgctgtcataaagcggctttcggatgtttgaacccatgtccgcttttgttggttatgatacaaaccgccgcagatattttagtggcattggtgatagataaacccgaatcgtttcggtatactgtgttgtgaaagggagtgatgagatggcggaaattacaatcatacctgctaaaaatcatgcggacgaaatcgtggaatcgtcgactgcacgatcaaacatcgatcgaagctacgcctattcttgttgcaca

SEQ ID NO: 1785 - DNA, 966 bp, unidentified
  source 1..966: mol_type = unassigned DNA; note = Bacteriophage uvig_363401 from the Index of /pub/databases/metagenomics/genome_sets/gut_phage_database (ebi.ac.uk)
aagaaaaaacgcaaggtggagggagctgataagcgcaccgccgatggttccgagttcgaaagccccaagaagaagaggaaagtctagttctgcagagggtgatgccattcgacgaacttgtttattgcagcttataatggttacaaataaagcaatagcatcacaaatttcacaaataaagcatttttttcactgcattctagttgtggtttgtccaaactcatcaatgtatcttagtaccgcattcatttcagtgagagcttactcatcagagttcgtaacctactacaaggaagatgagaaattagagtttgtattttatatctcttagcaaaaaagcccggaaatacgggcttttttgcgtatcatctgttactgtcatccggtccaccgaactgcagtaacatagaatacaatccattataataggaagaaaatcgaatccgagtccagtattgattgccacacatttcacaaatgctctgcacatactattccatactctttgctgactcatagaattgtctttcactggatttgatccattcataactggagtctgcatctcgtacctttttgacgtccgtatcagactaacgcttatccatctacaatccttagaaaatagtaatgccgcaatccgattaaaagaaaacattcaaaatcaaattgagcaaaaataataaaaccgcccctgcgccaacaggaacggtatgaaattgcatatccgaagatatacactatactttggtcagtaatattgtatcatcttcgggaacagcttgcaagagaacaaaagttcgctggctgttatttttgtacctttttttacataaaacttacaaaggagctgatacaatgtcaaataacacaccttcttcgcttcctgatttgcgtactggtgccctggaatcgtcgactgcacgatcaaacatcgatcgaagctcgttggacgccgatgtcaca

SEQ ID NO: 1786 - DNA, 966 bp, unidentified
  source 1..966: mol_type = unassigned DNA; note = Bacteriophage uvig_195006 from the Index of /pub/databases/metagenomics/genome_sets/gut_phage_database (ebi.ac.uk)
aagaaaaaacgcaaggtggagggagctgataagcgcaccgccgatggttccgagttcgaaagccccaagaagaagaggaaagtctagttctgcagagggtgatgccattcgacgaacttgtttattgcagcttataatggttacaaataaagcaatagcatcacaaatttcacaaataaagcatttttttcactgcattctagttgtggtttgtccaaactcatcaatgtatcttagtaccgcattcatttcagtgagagcttactcatcagagttcgaaaaatgtcctaagtccacacgggatacttaggatcattaaataatatgcaccgaaaatattaaataatacaaaaataaaattataaaaaaagacctcatgctggaacatgaggccaaaatgcaaaaaacaaataaagtccactacgacacgaatgtagaatgcctacaaacgaaatgtttttttgctatttaattatagcatgaaaaatatctcgtatcaataatatttagagaggaagtgctataattatgagaaaaaaagtagcctatttaagaaaatcccgtgctgatatagaattgacgtccgtatcagactaacgcttatccatgaggaaaaggacatgaagaagaatttgaattacaaattaacattaaattataaaaattatcgtgtgggtaccaattcttcagtaccaatatcagttaaaagagcctttcctctattatctggcattgtatatctttgatttaaataacgaagtgctgctcctagttctccgccaaaaccaccatattgagtaactaattgtttagcaaaagctaaattctttttcttaattgaaataggatactgtaatcttttttcatatgcccacatcttacatttcctccatttcccatggccaagcggaatcgtcgactgcacgatcaaacatcgatcgaagctcaatcggaaggagtctcaca

SEQ ID NO: 1787 - DNA, 966 bp, unidentified
  source 1..966: mol_type = unassigned DNA; note = Bacteriophage uvig_180433 from the Index of /pub/databases/metagenomics/genome_sets/gut_phage_database (ebi.ac.uk)
aagaaaaaacgcaaggtggagggagctgataagcgcaccgccgatggttccgagttcgaaagccccaagaagaagaggaaagtctagttctgcagagggtgatgccattcgacgaacttgtttattgcagcttataatggttacaaataaagcaatagcatcacaaatttcacaaataaagcatttttttcactgcattctagttgtggtttgtccaaactcatcaatgtatcttagtaccgcattcatttcagtgagagcttactcatcagagttcgaggatgacagttctataaaagtggaggtaatatttaagtttaaatttctttaattttaattgtccatcttgagtgtttccccatgctaattgttaatatggacaacacaaataaaatcgtaaaaaatagggatagaagagtaattaaactcaactatccctataattattattgtgtcctaccaatgtattattctgacaatttccagtgaaattcatcaggatttaaaacagtcggataatttttaaggttatatttttgatttgtttgaaattctaaaaccaatggtttagcatttaggacgtccgtatcagactaacgcttatccatatattatcaaatatgcttgcataacatttaagaaaaaggaactatatggaaagaaatattaaaataatttatagcacaacaaatgaaaaagatttaaaaacctcaatagaaaaaatttctttgcaaatacataataatcatagtaaaaagagtcatgaataatggctcttttgttgtattgtccatatgaatatgctacaatggtaactatgatacaatatacaatactattagaaaggatgagactattatgctttggaatattggagtgtatttgagactgtctaatgatgatggagaggaatcgtcgactgcacgatcaaacatcgatcgaagctagtgtgcgactagtctcaca

SEQ ID NO: 1788 - DNA, 966 bp, unidentified
  source 1..966: mol_type = unassigned DNA; note = Bacteriophage uvig_557335 from the Index of /pub/databases/metagenomics/genome_sets/gut_phage_database (ebi.ac.uk)
aagaaaaaacgcaaggtggagggagctgataagcgcaccgccgatggttccgagttcgaaagccccaagaagaagaggaaagtctagttctgcagagggtgatgccattcgacgaacttgtttattgcagcttataatggttacaaataaagcaatagcatcacaaatttcacaaataaagcatttttttcactgcattctagttgtggtttgtccaaactcatcaatgtatcttagtaccgcattcatttcagtgagagcttactcatcagagttcgtcgtcttgccttatggtttcgtacttgcgacccagattaaggataggctttgagcctgtcctttttcttttggtagtcggtagtccgttttaacgaattttccttatatatacatgtaatgcgagggagcgacgagattgcgctttgaatccctttactttttggaaaaatcttcttagtttttacgaactaccagtactaccagatagccaaaggccttgtaaatcaaggactttcttcggtagcaggctcagtagcagagggctcgggctcgactacctcgactgctacggagacccggacgtccgtatcagactaacgcttatccattgacacactcagtactgctggcttgagcattgctcgtgcaagctacacctctggtgataccgacaaggacagctactatatttccagagttgaggacccggatgacccggacctgagaatagaaattgaatattctaagctggcaaatatcatccaccaggtgcttgaggatgccgatgctaagagagaggaatatatccaaaagcgcctggacgctgagttttcattgtgaaagtgagatgagccctacatgatacccgctgttatctatgcacggtttagcagccactctcaaacggaggaatcgtcgactgcacgatcaaacatcgatcgaagctatgtattgctccttctcaca

SEQ ID NO: 1789 - DNA, 966 bp, unidentified
  source 1..966: mol_type = unassigned DNA; note = Bacteriophage uvig_89445 from the Index of /pub/databases/metagenomics/genome_sets/gut_phage_database (ebi.ac.uk)
aagaaaaaacgcaaggtggagggagctgataagcgcaccgccgatggttccgagttcgaaagccccaagaagaagaggaaagtctagttctgcagagggtgatgccattcgacgaacttgtttattgcagcttataatggttacaaataaagcaatagcatcacaaatttcacaaataaagcatttttttcactgcattctagttgtggtttgtccaaactcatcaatgtatcttagtaccgcattcatttcagtgagagcttactcatcagagttcggagatgaaacaataacatttaaatttattaatggtaaagaaatcaccttataagaggagtctatcagttagtgtccgctgatagacttttttgtcactatatggtaaaatatacgcaagtaaatgcatgtacttcgtaggtgcttcctaagtattcgtggagccgagttgagcgtagtgccttgggctcgttaaaaggaagtgcacattcggtcacggaatcagtgattggtctagagttctgatgccacaaagaacttattttttagttagatggagaatgttagccatgatgtatggggacgtccgtatcagactaacgcttatccattgtccttccaaatgcgtacctgatgctgaattgaaaagaataactgataaggttggtttagataatattgattgggttgaggtatttcctaataatgaattaaaaatatatttacgtgatggtacaaatgtaattgaaaaatggaatgactattcacgtaagaattcttggactgatgaaatgaaagcaaaggctagagagcaagctataaaaaagtcattagttaattatttgaggggcggtaatattaatggctaaagttacaattatcccctcaaagaaaaatccaataaccttaacggaatcgtcgactgcacgatcaaacatcgatcgaagctggaagatctccttgaataca

SEQ ID NO: 1790 - DNA, 966 bp, unidentified
  source 1..966: mol_type = unassigned DNA; note = Bacteriophage uvig_576812 from the Index of /pub/databases/metagenomics/genome_sets/gut_phage_database (ebi.ac.uk)
aagaaaaaacgcaaggtggagggagctgataagcgcaccgccgatggttccgagttcgaaagccccaagaagaagaggaaagtctagttctgcagagggtgatgccattcgacgaacttgtttattgcagcttataatggttacaaataaagcaatagcatcacaaatttcacaaataaagcatttttttcactgcattctagttgtggtttgtccaaactcatcaatgtatcttagtaccgcattcatttcagtgagagcttactcatcagagttcgttaggttcaatgggaatgatgaaattgaggttgtacttgtaggtggtatttaaactgggttgcacaacctgcccatccaccacctacaactataacttttattttgtagggatgtaaatgcccgttttaaaggtcagaatatactgacctttttattttgtatttaaaatatttcgtagtccataatgaactgtaaatttcagttctaaatttgcatttggattaccgtcttttctatatccccatgagtatataatttcttctttacatgttttccttaaatttcccaaaacgcccaatgacgtccgtatcagactaacgcttatccataatcttttattgatgaaactattgaatattatagagctaaatatggtacatgctataagatagataattatattatttattttcagcctaactttggtatattaaaaatgctttaaatctattacttaataataaaaacttacaaaattgaatatacttataatattactctatccagttgatttttagttgcaactggcttattttaaaaactaaaaaaaacatacattctttaaagggaggttattttatgaaaatagcaatatatagcagaaaatcaaaagaaactgatacaggtgaggaatcgtcgactgcacgatcaaacatcgatcgaagcttgacggactaagcggataca

SEQ ID NO: 1791 - DNA, 966 bp, unidentified
  source 1..966: mol_type = unassigned DNA; note = Bacteriophage uvig_1903 from the Index of /pub/databases/metagenomics/genome_sets/gut_phage_database (ebi.ac.uk)
aagaaaaaacgcaaggtggagggagctgataagcgcaccgccgatggttccgagttcgaaagccccaagaagaagaggaaagtctagttctgcagagggtgatgccattcgacgaacttgtttattgcagcttataatggttacaaataaagcaatagcatcacaaatttcacaaataaagcatttttttcactgcattctagttgtggtttgtccaaactcatcaatgtatcttagtaccgcattcatttcagtgagagcttactcatcagagttcgaaaaagaccctgtaacaaaaaatgtacctattgaaatacattggaatttctaaggttctcacatctggcaactagtatgccagatgttcgggaactatctttaaaacattaaatgttgtctttacacaatcgcaccatctgcagcaagatcctcgaacagatcagtgatcggatcacctttccgaaaaaactcttttacgtcctgagatagcaattgagaagctgatggatttggatatataaattgattacatatattcgttttatcatcttcttttaatattccataccattcgattggacgtccgtatcagactaacgcttatccattatacgcaagtgaggtgattcaatggcaaatgacacaaatatagtttgcaaaaatgtttttaaaaattgtgataagacggcattagcaacagcatttactttgaaatgggttgaacttatcaaccaatatgaaaaaagcaacagaaaggcaacacctgccagataatagacaaactatcctgctagatgttataatgacatcatgtagagatagtttgttttgtcttctctggaaaaaggagaaagacttatgacaacatcaaaattaagagttgctatttattgccgattatcagaagaggaatcgtcgactgcacgatcaaacatcgatcgaagctgcgatgctcacaatcataca

SEQ ID NO: 1792 - DNA, 966 bp, unidentified
  source 1..966: mol_type = unassigned DNA; note = Bacteriophage uvig_151346 from the Index of /pub/databases/metagenomics/genome_sets/gut_phage_database (ebi.ac.uk)
aagaaaaaacgcaaggtggagggagctgataagcgcaccgccgatggttccgagttcgaaagccccaagaagaagaggaaagtctagttctgcagagggtgatgccattcgacgaacttgtttattgcagcttataatggttacaaataaagcaatagcatcacaaatttcacaaataaagcatttttttcactgcattctagttgtggtttgtccaaactcatcaatgtatcttagtaccgcattcatttcagtgagagcttactcatcagagttcggatgaaaaagccgaaaggcaatgacgaggtatttctccccaaagggatttgtcattgttgggagttggcgaaataccacaataagccacagcgatgtggcagcgaaaataaacatacagatgttatctttggccaaatgcaaagagatactcaaacccgaccttaatctaagtgatgaggagattaaagcgcttcgggattatctatacctcatcgccaacataattgtaaaacacaactcataaagaatatgaatgtaatattatattgccgtgtaagcacggacgagcaaagagaatagacgtccgtatcagactaacgcttatccattcagtacccggacccgggctcgaaccgggatggattgctccaacggtgtttgagaccgtcgcgtctaccgattccgccatccgggcaaagaggtctgccccggtagatggggcttttgcgatgcaaaggtaataagtttttggttatcgcgcaactttttgtcgggaaaaccgattagggagggatactgattccccgtgctggtgtccggcttaccgggtcaggacgatgttcttgtcggtggcgatgcggcgcatgttgagaatcgcgtagcgcatacggcccagggcggtgttgattggaatcgtcgactgcacgatcaaacatcgatcgaagctaagaaccgtgacgcggtaca

SEQ ID NO: 1793 - DNA, 966 bp, unidentified
  source 1..966: mol_type = unassigned DNA; note = Bacteriophage uvig_282034 from the Index of /pub/databases/metagenomics/genome_sets/gut_phage_database (ebi.ac.uk)
aagaaaaaacgcaaggtggagggagctgataagcgcaccgccgatggttccgagttcgaaagccccaagaagaagaggaaagtctagttctgcagagggtgatgccattcgacgaacttgtttattgcagcttataatggttacaaataaagcaatagcatcacaaatttcacaaataaagcatttttttcactgcattctagttgtggtttgtccaaactcatcaatgtatcttagtaccgcattcatttcagtgagagcttactcatcagagttcgctattgcaagatgttttaaatatcttatgcagtgagcagtcgcttcctcccaaatacaaagaccacaatctttctggtaactacgaaggacatcgggaatgccacatcactcccgactggttactaatatataagattgagcacgacatattgaccttgtcattaaccagaaccggaacccatagcgatttattctaaactacccccggacctttaaagttcggggaattttctatcataggtggtaaatatggatcagtcaaataaagaaaatatcaatcagcttcgtgtaggatgtctgacgtccgtatcagactaacgcttatccatcaatttctttcgatcgtaaatctggtgaattgctctttgatgcaaaatcataggttaatgctatatggtggaccggatggcgaaatcggagcttccatgcgctatctgtcacagcgtttcaccgcgccaaaccgtacctgtatgggaatattgaacgatatcggtacagaagcccctgaaatgttccgttcaggggctaacgctttttttgacgcttttgcaaccgtatagctccatttcataggaagcaaattcagatatacatcaatgttgtccttatcattgacaaccatcttatctggaatcgtcgactgcacgatcaaacatcgatcgaagcttcgtcaacagataccgtaca

SEQ ID NO: 1794 - DNA, 966 bp, unidentified
  source 1..966: mol_type = unassigned DNA; note = Bacteriophage uvig_69193 from the Index of /pub/databases/metagenomics/genome_sets/gut_phage_database (ebi.ac.uk)
aagaaaaaacgcaaggtggagggagctgataagcgcaccgccgatggttccgagttcgaaagccccaagaagaagaggaaagtctagttctgcagagggtgatgccattcgacgaacttgtttattgcagcttataatggttacaaataaagcaatagcatcacaaatttcacaaataaagcatttttttcactgcattctagttgtggtttgtccaaactcatcaatgtatcttagtaccgcattcatttcagtgagagcttactcatcagagttcgatcggagtttactggaaaagagagctgatatggagcaggagggagcaaattgaaagagaattttaatctctctgatttgagtgtccgctgtagcggacagacgggagcaaggatgaagaaatatatggttgcaaaatatatccggctttccatggaagatttagatttatgcaattctgaagaaaaggcagagagtgtaagtatcagtaaccagagaaatttcatagatacctttatagagcaaggagaagaatttcagggagcagaaatcaaggaatttgtggatgacggatattccgggacgtccgtatcagactaacgcttatccatctacggaattgagcaagaaaaaaagaatgctattagatggcagatatgaaaaagaaagtttcatggagaaatttttgacaagcaaagatatagagttaaagcgttccttattcgttcggtttatcagtcagatatatgtgtatgaagatcatcggatagagattatgttccgctatcaggatgaaatcaagcaattagccaggttagtagaagagataaggaatgatgtagcacttggggaggtgatctgatggcacgaaaggtcagaaatcatccggttccgagagataagatgagtgaggaatcgtcgactgcacgatcaaacatcgatcgaagctggtatgtcggctcttgtaca

SEQ ID NO: 1795 - DNA, 966 bp, unidentified
  source 1..966: mol_type = unassigned DNA; note = Bacteriophage uvig_318656 from the Index of /pub/databases/metagenomics/genome_sets/gut_phage_database (ebi.ac.uk)
aagaaaaaacgcaaggtggagggagctgataagcgcaccgccgatggttccgagttcgaaagccccaagaagaagaggaaagtctagttctgcagagggtgatgccattcgacgaacttgtttattgcagcttataatggttacaaataaagcaatagcatcacaaatttcacaaataaagcatttttttcactgcattctagttgtggtttgtccaaactcatcaatgtatcttagtaccgcattcatttcagtgagagcttactcatcagagttcgaccccgacaagcgcattgagatcgcatacaaaatccaggacatttttgattgaggtggcagtcatgaaaattgctttctattgcagagtggacggacagggctttggctttgtcctccccgatgaagctgacaagctccgcgagtttttcgccgagcatcaggataagcctgcgcttgaaaatccatcaagcgcaagctaaaaatttttgtcgtgtgcttgacatacgggtgccggaggtcgtgaaagcggatgccggacagttcggcagcagcaagaacagatttaaaggccgcttctggacgtccgtatcagactaacgcttatccatacgaaagccgcattgccgacctcgccgtggaaatggaacagttggaggacggcctgcgaacgatggatgctcaagcagagcagcaccgggcgctggaacaggatgccgcacaaatcaagaccgaccgggcgctgaccggcgcactcatcgagcggctgatcgaccgcatcgaggtgtcccatgataagcaaatcacggtgcgctatcgtttccagagcgagtttgaaacctatgcggaggtgctggaacaatgcagaaatatgtgattgctctctatatccgcctctccattgaggactaggaatcgtcgactgcacgatcaaacatcgatcgaagctatgtccactccgagactaca

SEQ ID NO: 1796 - DNA, 966 bp, unidentified
  source 1..966: mol_type = unassigned DNA; note = Bacteriophage uvig_227965 from the Index of /pub/databases/metagenomics/genome_sets/gut_phage_database (ebi.ac.uk)
aagaaaaaacgcaaggtggagggagctgataagcgcaccgccgatggttccgagttcgaaagccccaagaagaagaggaaagtctagttctgcagagggtgatgccattcgacgaacttgtttattgcagcttataatggttacaaataaagcaatagcatcacaaatttcacaaataaagcatttttttcactgcattctagttgtggtttgtccaaactcatcaatgtatcttagtaccgcattcatttcagtgagagcttactcatcagagttcggtgttcacaagagtgttcgtcgtagccgaaaatacgatatcgattttttatagtttagttttacctctaatgaatagtatccgaccggaaactggccgggcaaaaccgtgtccaacgcccagggctggtgcaaaaccgggcgtcacgggtacgtgctggtggatattcccggaacctattccctgatggcccattccgctgaggaagaggtggccagaaatttcatctgcttcggcaaaagcgacgccgtggtggtggtgtgcgacgccacctgcctggagcgcaacttaaacctggtgcgacgtccgtatcagactaacgcttatccattttaacctctggttcatagattttagaagcgattgggatggacctgaaatgacaatatcttaaaaataaaagcccctgtgcgggaacacagagacttttacataattcttacccttccaggctttcagtaccaggaatgatagaacgtggaaatatgcactgctattatatcatttcaaaggcgctctggcaaggggcgtattttttgtactcttttttaatatgttgtagaacaggaagggatgatattatggcaaagcagcttatacgcgtggcattgtatacacgtgtttcttcagaggaatcgtcgactgcacgatcaaacatcgatcgaagctatagccgcgaggtcgctaca

SEQ ID NO: 1797 - DNA, 966 bp, unidentified
  source 1..966: mol_type = unassigned DNA; note = Bacteriophage uvig_182406 from the Index of /pub/databases/metagenomics/genome_sets/gut_phage_database (ebi.ac.uk)
aagaaaaaacgcaaggtggagggagctgataagcgcaccgccgatggttccgagttcgaaagccccaagaagaagaggaaagtctagttctgcagagggtgatgccattcgacgaacttgtttattgcagcttataatggttacaaataaagcaatagcatcacaaatttcacaaataaagcatttttttcactgcattctagttgtggtttgtccaaactcatcaatgtatcttagtaccgcattcatttcagtgagagcttactcatcagagttcgggagcgaggaaggagtgctaataactccgggtactacctctggcgtaccatgacgagtgttcttataggatttgatcctttgagaacactcgtcatttttattgcccattttgcgccggttcgtaactgacatagacacctctgcgggtgttgacggttacatcgggcacgggcatggacggggtatccgggataaacagggcaccgacacagttgtagtagatggtcaatttctggacccattcgccgttgattttctcggcttggtgaacctcaatgtggattatgaacgcagttcctgacgtccgtatcagactaacgcttatccatttgtcgctgactgtgttacgcttctgacagtggaggctgtcggaccattatgcatactgcctgcaatgcgcactgctcaacgcgactggtacggcagcggcgtaaatcacgacaatctgtcccgctcctctgctggcttgatcatagcagacagccgggcgggatgtaaagttacagttatgttaacctttgcgctgacccacagatacaaaaggatgtgcccaatttggacacacgagaggtgacagctatggcaaaacgcctgcatggggcgctcatctgcgcccgatactccaccgaggaatcgtcgactgcacgatcaaacatcgatcgaagctatgctgctcgtaacattaca

SEQ ID NO: 1798 - DNA, 966 bp, unidentified
  source 1..966: mol_type = unassigned DNA; note = Bacteriophage uvig_166254 from the Index of /pub/databases/metagenomics/genome_sets/gut_phage_database (ebi.ac.uk)
aagaaaaaacgcaaggtggagggagctgataagcgcaccgccgatggttccgagttcgaaagccccaagaagaagaggaaagtctagttctgcagagggtgatgccattcgacgaacttgtttattgcagcttataatggttacaaataaagcaatagcatcacaaatttcacaaataaagcatttttttcactgcattctagttgtggtttgtccaaactcatcaatgtatcttagtaccgcattcatttcagtgagagcttactcatcagagttcgacaagatttatataggcaataataaagttactgtctatttaaaggaacggtggtttagaacaaccattctgacattagacagatattaaaatataccgtattttctatatgagaaaatacggtatatttttttgcacaggcattttcactcccccttgttcaaaaattacttttttgaaaagtttttaatgaacaatatattattacaagtttttttgtaataatatttcaaagaatggagggctataaaatgcctaatattttaaataataatgttgtctatgatgacaatactaaacagacgtccgtatcagactaacgcttatccatttgacagtgtttacattacagaaaacgatattaaagttatatttaaagagtaagtagttttacctcactaaaacaattatcaactattgacaatcactgttttttctgttaatgtaaaagctaacggagtttaatttagaacttctacactattttatacataaagaatactcgtaaagtgtaaatcagagaataccaccaaacctatggtagtattctctattttatcggaggaaattgatatgattcgcaccttctccgccaaaacgtataaaccgcataaatacttgaatatcaagtggaatcgtcgactgcacgatcaaacatcgatcgaagctcaacatcggtgtcaagagca

SEQ ID NO: 1799 - DNA, 966 bp, unidentified
  source 1..966: mol_type = unassigned DNA; note = Bacteriophage uvig_586179 from the Index of /pub/databases/metagenomics/genome_sets/gut_phage_database (ebi.ac.uk)
aagaaaaaacgcaaggtggagggagctgataagcgcaccgccgatggttccgagttcgaaagccccaagaagaagaggaaagtctagttctgcagagggtgatgccattcgacgaacttgtttattgcagcttataatggttacaaataaagcaatagcatcacaaatttcacaaataaagcatttttttcactgcattctagttgtggtttgtccaaactcatcaatgtatcttagtaccgcattcatttcagtgagagcttactcatcagagttcgcgcctcgacgaaaaggacgatcgcataaagcatcgcgccgaactgctcgatcatgagcaggagcgctccgaccggtctatcgagcgcgaaacccgccgcgccaatcgcgcaacgctcgccgcctgcattatcggcgcgctgttcatcatttttatttttgttgaccttctctggccgactcgcggctggtttatccactgattgccaaaaataaaaaaagcggccttctggccgtatgggaggtttttctatggttgccgccgcttatgcccgctattcgacggagcggcagaacgaaacgacgtccgtatcagactaacgcttatccataatctcgtctactttacaacctgacgatccctcgccccgatcttgccgcttaaatcatttgtacccctcgatcatcgcgcgcacctccgccgtcttctccatcagctcatcgtgcatggcgctataggccgcgatcattccctcggcatactccggcttcctcttgtattcctcgcccgccttgtacgcctcgatcatcttcttgaccaacgcgtggccgttggtgttaaacgcaatgtgcgcgttcgccatttcccgataccacgccgccgcttccgggcactccgtcttcagcccgtaggaatcgtcgactgcacgatcaaacatcgatcgaagctgtcagccatcgacgagagca

SEQ ID NO: 1800 - DNA, 966 bp, unidentified
  source 1..966: mol_type = unassigned DNA; note = Bacteriophage uvig_275384 from the Index of /pub/databases/metagenomics/genome_sets/gut_phage_database (ebi.ac.uk)
aagaaaaaacgcaaggtggagggagctgataagcgcaccgccgatggttccgagttcgaaagccccaagaagaagaggaaagtctagttctgcagagggtgatgccattcgacgaacttgtttattgcagcttataatggttacaaataaagcaatagcatcacaaatttcacaaataaagcatttttttcactgcattctagttgtggtttgtccaaactcatcaatgtatcttagtaccgcattcatttcagtgagagcttactcatcagagttcgtgctcaggctacccctactaatgaagatgaagaagacattctccgagtatatcgttctttgtccagaagatcgaagcatgagttcatgtcgatggtttacacctttgagactcaagaagaattggcaggggatacggagaacactcagtcttctattgggtgagatcaaaaagaaaaaggtcatcccttacaaggcttttgaaacctttcggagattgacccttagaaaacgagtattggagcagaagcgatgacaaaagctgtgatctatgctcggtattcgagccacaatcaaagagagacgtccgtatcagactaacgcttatccatctttcttcttcgtgaagaacgtcttcgggtttgcgatagaggttacggtttaatccgtagcctcttttctatttcaggcaggaatcttcaagacctgaccgtcacgaatcatcgtacctgaaatgctgttgagagcggcgatctccgtccatctaccgcctctgccaagcagcttcttggcaagattccagagcgtatcacctctctggacaacataggttgcatagccttgagcatcatcactctcaggctcgttctcaggcgtggaataggcgctcagagccgcgaaagactccttgcggaatcgtcgactgcacgatcaaacatcgatcgaagctccattgtcgacgctggagca

SEQ ID NO: 1801 - DNA, 966 bp, unidentified
  source 1..966: mol_type = unassigned DNA; note = Bacteriophage uvig_128002 from the Index of /pub/databases/metagenomics/genome_sets/gut_phage_database (ebi.ac.uk)
aagaaaaaacgcaaggtggagggagctgataagcgcaccgccgatggttccgagttcgaaagccccaagaagaagaggaaagtctagttctgcagagggtgatgccattcgacgaacttgtttattgcagcttataatggttacaaataaagcaatagcatcacaaatttcacaaataaagcatttttttcactgcattctagttgtggtttgtccaaactcatcaatgtatcttagtaccgcattcatttcagtgagagcttactcatcagagttcgatgtcgcaacttttgaacttaccctatatccaaaaatccctatgaaatcctaactttttgtttgtttatattaccgataacatcatggtactaacgaacttgctcatatggaaatgatctgcgcaatcgtataccaactgacgaaagatctgactccggaacagatcaaagaatctggctttgacaaatattatgtcgaccatactctcgcactctggcctcagtctgccggaggaacaccttggactgcaacttatttccaatccaaaggggatccaatcactgacctccatgaagatagacgtccgtatcagactaacgcttatccatgtcttttgctatatatgcaaataaaccgcccctgcgccaacaggaacggttattacgccctctccgtacaacagagataggacgatttaactataacacctccggagatgctacagcatttcaccaaatatattgtatcatcttcggacagctatcgcaatcggaacgtatattcgatggctgttatttttgtactcatttttaatataatttacaaagtttaatataatttacaaaggagactgatataatgtcttatttaatttatttacgtaagagtcgtaaggatctagaaaatccggaatcgtcgactgcacgatcaaacatcgatcgaagctagtagaactggtgctgagca

SEQ ID NO: 1802 - DNA, 966 bp, unidentified
  source 1..966: mol_type = unassigned DNA; note = Bacteriophage uvig_8240 from the Index of /pub/databases/metagenomics/genome_sets/gut_phage_database (ebi.ac.uk)
aagaaaaaacgcaaggtggagggagctgataagcgcaccgccgatggttccgagttcgaaagccccaagaagaagaggaaagtctagttctgcagagggtgatgccattcgacgaacttgtttattgcagcttataatggttacaaataaagcaatagcatcacaaatttcacaaataaagcatttttttcactgcattctagttgtggtttgtccaaactcatcaatgtatcttagtaccgcattcatttcagtgagagcttactcatcagagttcgtttccctggcggaacagattgccgcgcataatgaagaaaggaaggtgggctaaatggcaagaaagagcaggaaacaggcggtggtttccatgccggccccgtccttatatgtgcatgtggcgctgtatatccgtctttctgtggaagataacaagaaacgcggctgttccgtggagaaccagaagctggtgctgaatgacttcctggcggacaagccggatttcgttgtctacgatacctatatcgacaacggggcgacaggcacgaatttccaccgccccggtttccagcagatgctttgacgtccgtatcagactaacgcttatccatcggcagatcaaggatccctaccgctttaaatgcggacgttttactgtacaggccagctttgcagcaggaggcgccaccctggaggaatgtatcaaagggattctgcggtaggccagatttttttcaggaaaggggctgactttcccgcaatggcgtggtagaataagaatcggaaaaggaattgaatacggcacagccacacttcttgaattgcggggatttttctgcgcaaagaaaggagtgtttttttatgcaggtttacaaagcaatcaagtacatccgtctttcttataccgatgaggaatcgtcgactgcacgatcaaacatcgatcgaagctataggtcctctatagcagca

SEQ ID NO: 1803 - DNA, 966 bp, unidentified
  source 1..966: mol_type = unassigned DNA; note = Bacteriophage uvig_86984 from the Index of /pub/databases/metagenomics/genome_sets/gut_phage_database (ebi.ac.uk)
aagaaaaaacgcaaggtggagggagctgataagcgcaccgccgatggttccgagttcgaaagccccaagaagaagaggaaagtctagttctgcagagggtgatgccattcgacgaacttgtttattgcagcttataatggttacaaataaagcaatagcatcacaaatttcacaaataaagcatttttttcactgcattctagttgtggtttgtccaaactcatcaatgtatcttagtaccgcattcatttcagtgagagcttactcatcagagttcgaaaggctatattgatatgccgcttgaacatgttcgccacttgtctagttattattgcgtacctgttgactctttacttgcttttgatactaatgacaatgatagtttaaaggaattgatgaataacatggatgtaattagaaacgcacagagatggaatgatgaagtaggtttagctacatttacagaagaagaaatgacagagctaataaaatacgctaaatatattcttagccaaagaaagagtgatgatgaaaaagatgaaaaacaatgaattacttatgggtgaatatcttttgctgacgtccgtatcagactaacgcttatccatttattgaagttatttactacaacaaagaacaagcggatatacaaactaaagacggaatcattaggggtgatatagaaattgaaatcatcctaaaataattatgtacccctgtaacatcatgatggttctcattcatgcgtgagagtttctacatcggaactggtttgattgaagttcgcaaagataaacggtgcaccatatacatcaaaagatgtgcaatatccaccggcagccttacccggcttactttccagatccattagtttatgatctaccataaattgaaagaattcgccggtaggaatcgtcgactgcacgatcaaacatcgatcgaagcttctcgatactatatgcagca

SEQ ID NO: 1804 - DNA, 966 bp, unidentified
  source 1..966: mol_type = unassigned DNA; note = Bacteriophage uvig_425758 from the Index of /pub/databases/metagenomics/genome_sets/gut_phage_database (ebi.ac.uk)
aagaaaaaacgcaaggtggagggagctgataagcgcaccgccgatggttccgagttcgaaagccccaagaagaagaggaaagtctagttctgcagagggtgatgccattcgacgaacttgtttattgcagcttataatggttacaaataaagcaatagcatcacaaatttcacaaataaagcatttttttcactgcattctagttgtggtttgtccaaactcatcaatgtatcttagtaccgcattcatttcagtgagagcttactcatcagagttcgaaaccacagaaaaaccaatggtgcgtgaatatcgtatcggcaacacggtttaccatgtgaaagccatatcaaacggtcagacacaggaagaaccaaaagatacgataaagcgtctgattcagcgaaatgcaagacgtaaaggacatatttaagacggatttataaaaaagatgcagacaaaagacagttgttgtgctatcttgtaggtatacaagcattgcctgtgtgactgtcggaacaggaggaatacatgcagaaaaacatacagtcagttatcacaggaaatacttttaccacttcgacgtccgtatcagactaacgcttatccattcggagtatttgaccgttcaaaggtcaatgtatatatgggaaaagcggtataacaccgaaatgctataccgctatcctaaatctaaaaagtatccttatgaaatccttactaatacaggctataccggcatataagaacttataaagagatagtcaaaagtatagtttaatctgggaataaaaatcactactaggtacagagttgccaaccttaccaacaacgccatcccaaaaaacaaggcggcgttctacaataggggcacttctgattagtgtggccagaagcaatatgcttcctgcggaatcgtcgactgcacgatcaaacatcgatcgaagctccttcaccaagataccagca

SEQ ID NO: 1805 - DNA, 966 bp, unidentified
  source 1..966: mol_type = unassigned DNA; note = Bacteriophage uvig_158104 from the Index of /pub/databases/metagenomics/genome_sets/gut_phage_database (ebi.ac.uk)
aagaaaaaacgcaaggtggagggagctgataagcgcaccgccgatggttccgagttcgaaagccccaagaagaagaggaaagtctagttctgcagagggtgatgccattcgacgaacttgtttattgcagcttataatggttacaaataaagcaatagcatcacaaatttcacaaataaagcatttttttcactgcattctagttgtggtttgtccaaactcatcaatgtatcttagtaccgcattcatttcagtgagagcttactcatcagagttcggtatcgacaccctggaagaatacaaggaaaataaactgcgtctggctgcggaacgaaagatctgattcgtctttgtataatctgtaaattcctccataaaatggatctcttggacaaatatagaaagtaccagccgttttctggagccttcatgccggttgtaagaacgaaactgcccaatagcctctacggtacagccctgataattttctgtgacatcaaccagacgttctgaaatcataagtggaatcacatccacatgtccgcttaaacggttgacttccagatccaccagataaagacgtccgtatcagactaacgcttatccataatactttgcaaaaaatattcacgcgctcaactattcggaatttccgaacagttggaaaaaacactataaaatgcaaaaccgcccggtattggcgtaccgaacggcttcacatagattttctcttaccagattactctggaatgataaatcagacttcgaacacctgaattatatcatctccggagcatcctggcaaggggtgttctttttatactcatttttcagtaaaattcacaaggagatgatagaatggcaccaaaagcccttgagatcggcgcggcctatatccgcgtcagcacggaatcgtcgactgcacgatcaaacatcgatcgaagcttcaggcctagagtatcagca

SEQ ID NO: 1806 - DNA, 966 bp, unidentified
  source 1..966: mol_type = unassigned DNA; note = Bacteriophage uvig_567103 from the Index of /pub/databases/metagenomics/genome_sets/gut_phage_database (ebi.ac.uk)
aagaaaaaacgcaaggtggagggagctgataagcgcaccgccgatggttccgagttcgaaagccccaagaagaagaggaaagtctagttctgcagagggtgatgccattcgacgaacttgtttattgcagcttataatggttacaaataaagcaatagcatcacaaatttcacaaataaagcatttttttcactgcattctagttgtggtttgtccaaactcatcaatgtatcttagtaccgcattcatttcagtgagagcttactcatcagagttcgagaagcgcctatgtgcagccgctgaatttcatcagggagatcgacggcaccacctacgctgtaagaacctttttcagcgaggatgctagggataacatcaccgaaaaggtgcagcgcatcatcctgaaaagcgatgataatagcaaagagatttgaaactaccgcattaaagcgttaaagtttacagtcggatatggtagaatgggttcacctataaattcgatcatatccggctgtggaaaggagagctatgacaaaacaaccggataaaatcacagccctgtactgccgcctgtcccggacgtccgtatcagactaacgcttatccataagaagccttccagcaccaccttaccgagcgtaacaaagagaaaacggcatagccacaagggttacaccgtttccgagaacttataaaactgtgatacaagagccgccccggggcaccttccttatggagggtgccccgatagggtggtgtttttggagcgggcgacgaggctcgaactcgcttcccggcatcccacgaatggctgtcgccattcgcaggagccctgcctcacctcttgatttgacgcgcttcgcgcaggtcgaggcagcgagttctccggtgctgcggcacattccaaaggaatcgtcgactgcacgatcaaacatcgatcgaagcttggactccaattactcagca

SEQ ID NO: 1807 - DNA, 966 bp, unidentified
  source 1..966: mol_type = unassigned DNA; note = Bacteriophage uvig_58544 from the Index of /pub/databases/metagenomics/genome_sets/gut_phage_database (ebi.ac.uk)
aagaaaaaacgcaaggtggagggagctgataagcgcaccgccgatggttccgagttcgaaagccccaagaagaagaggaaagtctagttctgcagagggtgatgccattcgacgaacttgtttattgcagcttataatggttacaaataaagcaatagcatcacaaatttcacaaataaagcatttttttcactgcattctagttgtggtttgtccaaactcatcaatgtatcttagtaccgcattcatttcagtgagagcttactcatcagagttcgaactcaaagaaatttctaaaaaacaaaaatcaaggagaacaaaaaaatgttaaaaggtttcaaagtaatcagcgtatatggcaacaccagtgaatcgaccgttacggtcaccaacaaatacttcaaattcaatgcggacaccgcagccgaacttggctatcccaagtacatccaaatgctcatcgatgcagacaacaaaaagtttgctatacaggcaacggacaaacaggacgcaaactcgattgatttcaaagtatcggagccgtccgaatcgggcaaaaagtcggtcatcaatgtggcgacgtccgtatcagactaacgcttatccataacccgttgcccggtctttttttatgtctaaaaaaagcgtaatttcacacttgaagtctgtcggacgataagcaccgtccagcaggacttgaataccaaaactgaattaaaaaatcttatttatagcatcttggggcgcgtatcccatagcaaaatactgggcgaaagtttattatatatgtaggctcggataggaggcctattcgctcgtgctgataaggcaaataatgggcgaaagggaggtgagaaaatgatacaacgaagagacaaaaagaggacagcctctgccaagcggatacaggaatcgtcgactgcacgatcaaacatcgatcgaagctgacgagtacgtatgatagca

SEQ ID NO: 1808 - DNA, 966 bp, unidentified
  source 1..966: mol_type = unassigned DNA; note = Bacteriophage uvig_42250 from the Index of /pub/databases/metagenomics/genome_sets/gut_phage_database (ebi.ac.uk)
aagaaaaaacgcaaggtggagggagctgataagcgcaccgccgatggttccgagttcgaaagccccaagaagaagaggaaagtctagttctgcagagggtgatgccattcgacgaacttgtttattgcagcttataatggttacaaataaagcaatagcatcacaaatttcacaaataaagcatttttttcactgcattctagttgtggtttgtccaaactcatcaatgtatcttagtaccgcattcatttcagtgagagcttactcatcagagttcggaaataaaaggtaaatcgactcaaatttggctaactttttttaacgcatatttgtataagcaaggtctaataactgaaatggaaaggaataaaatggtaaataaaatagcaaatacgcaagcttcattcattaaggttgacaacatcagtaacaaaattgaaaaaatgtcgagtttagtctaatttcttggtttacaaactttatgtatcatgatataataatgatataattgttaattaggaggaaaaaatggatatacatgaaactagacaaaaattaaaattaaaaaatatatttgagacgtccgtatcagactaacgcttatccatcttttaaaacaaattgccggactttcgcaaaaaatttccaagtatcaaattaaaatttagaaccggtgtggaatcttttaacccgaaaatcagacaatttttgaataaaggtattcctcaagccgtaacagcctacgatatcgcgaaagattttgatggagtctgcttgctaattggatttgtcgggcaaactcgcgatgacataataaaagacataaatatggcccgtaaatattttgagtacacaagcgtaaacgtttttgtagaaaattctaccgacataaaaagagacgaaaacctggaatcgtcgactgcacgatcaaacatcgatcgaagctctctcggcgagtaactagca

SEQ ID NO: 1809 - DNA, 966 bp, unidentified
  source 1..966: mol_type = unassigned DNA; note = Bacteriophage uvig_198610 from the Index of /pub/databases/metagenomics/genome_sets/gut_phage_database (ebi.ac.uk)
aagaaaaaacgcaaggtggagggagctgataagcgcaccgccgatggttccgagttcgaaagccccaagaagaagaggaaagtctagttctgcagagggtgatgccattcgacgaacttgtttattgcagcttataatggttacaaataaagcaatagcatcacaaatttcacaaataaagcatttttttcactgcattctagttgtggtttgtccaaactcatcaatgtatcttagtaccgcattcatttcagtgagagcttactcatcagagttcgaatatatcgaacttaattcccacagcaggacaacggtttgtgagttttcctaataaatatggcccatatgctcaaaagaagcatttttttcgtggtcaagcttaaaatcgggattgataagcgaaaagaaacggtataaatacgaaatcaccgaaaaatcgttgccgtttgcggaatatatcggcagcaattcatccatcatagccgaaacattttcttcaagcgaaaaactgaatatcgggaatcgggcgcttaaattgcggaaagaaagagcggaaaccgagtcagtgccgtcaaagcgacgtccgtatcagactaacgcttatccatttgcagactgtcaaaaatccatactgcttttgcatcggtggtgttggcgtgaaaattgaatttgctgaaagcgggccatctctccaagataagctgacggatttcctgctgcggcaaagaagcgggctgtaacttcggttacagctcgttttgcttcttcgagacaaagtgtcccgaagtggaggcatccttgttgtcctccccggacagagttataatataagtgtaatgtgatagggaaggaggaacaatggcacgagcaaaaaacagagggtatcagcagagtttctctccctcttaggaatcgtcgactgcacgatcaaacatcgatcgaagctcttacgtcctctgattagca

SEQ ID NO: 1810 - DNA, 966 bp, unidentified
  source 1..966: mol_type = unassigned DNA; note = Bacteriophage uvig_507007 from the Index of /pub/databases/metagenomics/genome_sets/gut_phage_database (ebi.ac.uk)
aagaaaaaacgcaaggtggagggagctgataagcgcaccgccgatggttccgagttcgaaagccccaagaagaagaggaaagtctagttctgcagagggtgatgccattcgacgaacttgtttattgcagcttataatggttacaaataaagcaatagcatcacaaatttcacaaataaagcatttttttcactgcattctagttgtggtttgtccaaactcatcaatgtatcttagtaccgcattcatttcagtgagagcttactcatcagagttcgcctttcccggcggttggatgaagcggttcagcggaaggtaaaatttgctgaggcaatgtccgaggacaacaagtggctcacgctgatgaaatccgtcagcggtacaacgatgctctctcaggagttggttgacgagtccgtagagcttgtgaaagtccatgaggacggctcaatcgagctggtcatgaaatacggcgatatttacgctctgaccgttcatagtatcaaggaagttcaggaggcgatgtaaatgagcaaggaatacaacatcggcatctacatccgcctctcaatggctgagacgtccgtatcagactaacgcttatccattcgtctggaagttcaaggacttcctcactacatcagaaggagaagccaaatgaaagtatttctttatatccgcgttgcctgtgcggatcagcttgcggcagcagatcagcgggaagagctggaacgctatgcgaaggacaaaggctatgaggtggctgctgctgtggcggcagacggcatctccggcgtccatacggaaggtatcatgaacttcctgctgaacgaagccaagcgtcaggacatcggtacgatcctcacccgcgacacctcgcgaatcagccgggacacttcctctttcatggaatcgtcgactgcacgatcaaacatcgatcgaagctgagaacatgtaggtgaggca

SEQ ID NO: 1811 - DNA, 966 bp, unidentified
  source 1..966: mol_type = unassigned DNA; note = Bacteriophage uvig_232060 from the Index of /pub/databases/metagenomics/genome_sets/gut_phage_database (ebi.ac.uk)
aagaaaaaacgcaaggtggagggagctgataagcgcaccgccgatggttccgagttcgaaagccccaagaagaagaggaaagtctagttctgcagagggtgatgccattcgacgaacttgtttattgcagcttataatggttacaaataaagcaatagcatcacaaatttcacaaataaagcatttttttcactgcattctagttgtggtttgtccaaactcatcaatgtatcttagtaccgcattcatttcagtgagagcttactcatcagagttcggaaaagcagcggttggaacatgaactgcaaaagcagcgtcagcgcgcattggaactggaaaagagaatcaaaatctgcgatgctcaaatggaacggatgcgcgggattctaaatcaaaatgaatttgatgaagaactggtgcatgaacttatcaagagaatctatgtaggaatggacaattctgtggaggtcgaatttaagtgtagcgacccctatcaggaagtgcttgcaatcatgtcggaggttcagaatgaatgataaaattgcaatctatctccgcttatcattggcagacggagagacgtccgtatcagactaacgcttatccatagttcaactgtgaggatgtgattcggagagcgttggaaaagtatggcacataattggatggaagaagtggtataagaaaaagaatacccgtctgggtgagaggattcagaaaatcttctcgaccaggcgggtatttcattccgcaggaatgactttgaccgcataagccacagacagcaccccggtgtaatccgaagtgcagctgtgtcttatgcgggcttttttgttatatgatcagcgggctacaaaatcagattcccaaaccgtacagtatggctttcatctctcttaccatccgagggaatcgtcgactgcacgatcaaacatcgatcgaagctaggttactgtggagtaggca

SEQ ID NO: 1812 - DNA, 966 bp, unidentified
  source 1..966: mol_type = unassigned DNA; note = Bacteriophage uvig_598290 from the Index of /pub/databases/metagenomics/genome_sets/gut_phage_database (ebi.ac.uk)
aagaaaaaacgcaaggtggagggagctgataagcgcaccgccgatggttccgagttcgaaagccccaagaagaagaggaaagtctagttctgcagagggtgatgccattcgacgaacttgtttattgcagcttataatggttacaaataaagcaatagcatcacaaatttcacaaataaagcatttttttcactgcattctagttgtggtttgtccaaactcatcaatgtatcttagtaccgcattcatttcagtgagagcttactcatcagagttcggttcccgccgcttgtttatgtcggcgaagaacttaacgatatccgtatcctcgggagagctgtcgccttccagagcgacgttaaataattctgccgccgcacggtgcaaacgattattcgcacgcatagaaaaccaacagcgtaaatattgtgtaacagcggctcggcagaacagcaaagcaaccctctccggtgagccgaaattactcccggaagaataatcaaacaatatcagacaaggaggtgccgcatggatgatttattaaaaatcggagcttcttacatcagagtctcagacgagacgtccgtatcagactaacgcttatccattgatatgcgaaaaaaacagagataacctggcaatttatttctatgaattttgattatatcaaaaagccgctcggaggtcctgacggtgagcttggtgcatccatgcgatatctgcaccaacgctacacctgtccgtatgataaagtaaccggtattctcacagacgtcggaacagaagaatctgcacacctgtgatggaattaatcaaaccaaagatcaactcctctttactgccaatctgatacaaagctcaataggaggatctgtccaattgccgcccacgttcagcggcgatttgcaggaatcgtcgactgcacgatcaaacatcgatcgaagcttatcggagagatgaatggca

SEQ ID NO: 1813 - DNA, 966 bp, unidentified
  source 1..966: mol_type = unassigned DNA; note = Bacteriophage uvig_73872 from the Index of /pub/databases/metagenomics/genome_sets/gut_phage_database (ebi.ac.uk)
aagaaaaaacgcaaggtggagggagctgataagcgcaccgccgatggttccgagttcgaaagccccaagaagaagaggaaagtctagttctgcagagggtgatgccattcgacgaacttgtttattgcagcttataatggttacaaataaagcaatagcatcacaaatttcacaaataaagcatttttttcactgcattctagttgtggtttgtccaaactcatcaatgtatcttagtaccgcattcatttcagtgagagcttactcatcagagttcgcaagggagcaatcccaagcagcccaaaaagaaaagaaaaccggcgtagcctaaactacgccgattctctcacataaatgttttcttacggaaccacgccttttagccgtcctcttttcctatatagcaccgccttcgtgttgtccattgcaattgctgatcgtaccacctctcatcgtgaatacgcagtcctttccaatatccacagcaccgccatcaccatcgtcatctctgcaattcgcaatgatactgctctccaagatcagtgtgccgctagacacagaaaaaccgcagttcttatgacgtccgtatcagactaacgcttatccatccagaccgcccccgttgtacgtcagtacgagatcggaggcgttcgatatattgtgaaagcgaccgtcaaagacggcgcgaaagaaaccgcagtcaagaaaatccgtcggctgctccaaaacgatttgaacaaggcagccacttaaaaattaaagattttttcatttcctacaagcagacggatggggcatgatatggtataatatacttgtatcatgcctcgttttccggctgcggaataggaggaacttatgagcaaacagccggaaatggtgattgcacggaacccccgtgcgacacgggaatcgtcgactgcacgatcaaacatcgatcgaagctgcagaaccaaggatatggca

SEQ ID NO: 1814 - DNA, 966 bp, unidentified
  source 1..966: mol_type = unassigned DNA; note = Bacteriophage uvig_41106 from the Index of /pub/databases/metagenomics/genome_sets/gut_phage_database (ebi.ac.uk)
aagaaaaaacgcaaggtggagggagctgataagcgcaccgccgatggttccgagttcgaaagccccaagaagaagaggaaagtctagttctgcagagggtgatgccattcgacgaacttgtttattgcagcttataatggttacaaataaagcaatagcatcacaaatttcacaaataaagcatttttttcactgcattctagttgtggtttgtccaaactcatcaatgtatcttagtaccgcattcatttcagtgagagcttactcatcagagttcgaatgttatataaatgataaaaggaataaatctcatggatagatctgcaattgaaagttattattcctcactagcagtaattaaatccatgctaaaaataaatcttatagatattgatgaatataaaaaatctgaagcattaattgcaaaaagacattgtatcaaagatgactcgatttaccgcactaattacttgataaatcctgggttcagagcgattaatgtaacgaaccataaggaggtaaaaaataatggaaatgaagataacgaaaataagcacgttaccacaattagatagaaagacgtccgtatcagactaacgcttatccatataacaaaaataaaaagagaggagcaaatggaaaatggcaaaagtcagagtaatacctagcacactaaatccacttactcaatctccaattagtgaaacaaagaaaaagaaagttgctgcctatgctcgtgtttcaactgactcagatgagcaatatacttcatacgaaatgcaagttaaatattataaaaaattcattcaagaacatgatggatggatttatgtaaatgtttatgctgatgaaggtataactggtacaaatacaaagaaaagagatagcttcaatcaaatgataaatgaggaatcgtcgactgcacgatcaaacatcgatcgaagctgaacaagtgtccatatggca

SEQ ID NO: 1815 - DNA, 966 bp, unidentified
  source 1..966: mol_type = unassigned DNA; note = Bacteriophage uvig_53580 from the Index of /pub/databases/metagenomics/genome_sets/gut_phage_database (ebi.ac.uk)
aagaaaaaacgcaaggtggagggagctgataagcgcaccgccgatggttccgagttcgaaagccccaagaagaagaggaaagtctagttctgcagagggtgatgccattcgacgaacttgtttattgcagcttataatggttacaaataaagcaatagcatcacaaatttcacaaataaagcatttttttcactgcattctagttgtggtttgtccaaactcatcaatgtatcttagtaccgcattcatttcagtgagagcttactcatcagagttcgcaaagttctatgaatatcgtgatttgttcaagcactttgatttgacaaagtatcagtattgattaattctgctgcttctctttagcttctatagctgctttcagtgctgctagctgtacttcgttcattccctctatttgggctgttagcttcttagcttcatcagccttcttctccacatctacagcatcacccagaacctttaagttagctaggtacaagttatattccttctccagctccttaaccttattggctacagcatctatattaataggcttttctgctacatacttgccagacgtccgtatcagactaacgcttatccatgaattgttagtttgtaaatatgtcgcaaaagtaacgaaaatattactactatagaaatgctagccaattatttaagcttctttaaacatgtcgggcttatttataaggtgaaatagggtagttcatgcctaatattgactggaaatagaactatgaagtacgttacgttagtattaattaacagaatatacttcatagttccaaatattttttgtatctttgcacccagaaattttaaagtgtattgattatgaaggtaataggttatactcgtgtttcgacgaacaatcaagatttgaaggaatcgtcgactgcacgatcaaacatcgatcgaagctgaatgcctacatggttggca

SEQ ID NO: 1816 - DNA, 966 bp, unidentified
  source 1..966: mol_type = unassigned DNA; note = Bacteriophage uvig_504803 from the Index of /pub/databases/metagenomics/genome_sets/gut_phage_database (ebi.ac.uk)
aagaaaaaacgcaaggtggagggagctgataagcgcaccgccgatggttccgagttcgaaagccccaagaagaagaggaaagtctagttctgcagagggtgatgccattcgacgaacttgtttattgcagcttataatggttacaaataaagcaatagcatcacaaatttcacaaataaagcatttttttcactgcattctagttgtggtttgtccaaactcatcaatgtatcttagtaccgcattcatttcagtgagagcttactcatcagagttcgggtttttaagaaaaaaccaatggcgagatttgactgtacatgtttttgtgtgaaagaaaggggacggggtaaccgtcccctttaggttaattctgcttgcaattttagtattgatatggtattatattaccaacaaagtaatatgtcggcaagggcgaacatcgcacatccgaggggcaactaatagtgttgtaatattaacacaactactatatatagtatatagcagctcgttttgctataatatgagttgcaattcttcggaaaaatgaactgtttgcaagaaggtaaaaaaggctggacgtccgtatcagactaacgcttatccatgttttcgatggaacagaacaatatgaaatgcacaggaaacattggtgcaaaacagtgcggcagacttatgcggtatagcatgcagttgattatgttgcaaaaattattgcgttacaagttgttgagcgaaagagagtatatcgctgttaaagaaaggctggtgaaagattacgggattgtttccgactttacagcttagaaaacttgaccgtataaaaatataatggctgcacagcaaaggagtaagaacatggaaatttctggtactaacaaactaatattgcccaaagatattattttggaatcgtcgactgcacgatcaaacatcgatcgaagctctgtctgatgacaaggcgca

SEQ ID NO: 1817 - DNA, 966 bp, unidentified
  source 1..966: mol_type = unassigned DNA; note = Bacteriophage uvig_198801 from the Index of /pub/databases/metagenomics/genome_sets/gut_phage_database (ebi.ac.uk)
aagaaaaaacgcaaggtggagggagctgataagcgcaccgccgatggttccgagttcgaaagccccaagaagaagaggaaagtctagttctgcagagggtgatgccattcgacgaacttgtttattgcagcttataatggttacaaataaagcaatagcatcacaaatttcacaaataaagcatttttttcactgcattctagttgtggtttgtccaaactcatcaatgtatcttagtaccgcattcatttcagtgagagcttactcatcagagttcgcaaagataagaagtgaatcggacctaaaactcgatatatatcctaaattctaattattttatactcttttgtgtaagcattgaggtttatatccatctaatacgccagcaagaaaagctcctatagcgccaagaacaatacctatagaggactagttcttcatctttcattaattacatttaggccttaaataaccatctaaaccataatgtttacacaaaaaaagaactaacccatatttgagttagtcttttttaaatttctagtataattttatattatcccaacgagtagtaccatgacgtccgtatcagactaacgcttatccatttaaacattttattataccaataattaccaataattaagtcaaaatgccttgaaatgttaatttatgtgcttgaaatgttaatttttaactaaaaaatgtttaaaagtgcaattttaaacaaaaaaagtccccgttggtgcaacaacgaggaccgagtacagaaaataaaattacctaccacagcaattctttttctgtactctcattataccatattgcaagaaaatatgctagaaagagagtgaatttatggaagaattttacgatgtaattgactataacacaatattagaaaaaatggaatcgtcgactgcacgatcaaacatcgatcgaagctgcaacgaacctctacgcgca

SEQ ID NO: 1818 - DNA, 966 bp, unidentified
  source 1..966: mol_type = unassigned DNA; note = Bacteriophage ivig_3837 from the Index of /pub/databases/metagenomics/genome_sets/gut_phage_database (ebi.ac.uk)
aagaaaaaacgcaaggtggagggagctgataagcgcaccgccgatggttccgagttcgaaagccccaagaagaagaggaaagtctagttctgcagagggtgatgccattcgacgaacttgtttattgcagcttataatggttacaaataaagcaatagcatcacaaatttcacaaataaagcatttttttcactgcattctagttgtggtttgtccaaactcatcaatgtatcttagtaccgcattcatttcagtgagagcttactcatcagagttcgggctgtatgtggtggagttctgggcgttgccggactctacacaatgccggactttccagccggtgatgtgatcaatgcagttgcggtcggaatggccagcggattagcggcgacaggagtaaatcagttgtataagcagcagtgtaagtagagggcaaataatcgtcctctaacatattatatagtgtgtgcgacgtcgcaccatagatgcccggtcacagaggtatggatacctcggaaaggagattttatgaagagaccggacaacaacaaaataacagcactttacgagagactgtcgacgtccgtatcagactaacgcttatccataagcagctttagaagctgcaactgatactgacaaatctaaaaagggagcataggcaactgccggaaactcccattacataagggtttcaagcccacttctaaaaatatccctatgaaagtgaaacatgagtatgacgcagaacatgagttgtaatctcgacgtctttgttcagcacccggtgggcggtctccttcagacatttattgtatgcccagtaatgcacatgatctccggatatatccgggataaagagtggactgcgaacgccggtgagcaactgctcttttttaatgaagaacggaatcgtcgactgcacgatcaaacatcgatcgaagctacaagtaaggctactccgca

SEQ ID NO: 1819 - DNA, 966 bp, unidentified
  source 1..966: mol_type = unassigned DNA; note = Bacteriophage uvig_58201 from the Index of /pub/databases/metagenomics/genome_sets/gut_phage_database (ebi.ac.uk)
aagaaaaaacgcaaggtggagggagctgataagcgcaccgccgatggttccgagttcgaaagccccaagaagaagaggaaagtctagttctgcagagggtgatgccattcgacgaacttgtttattgcagcttataatggttacaaataaagcaatagcatcacaaatttcacaaataaagcatttttttcactgcattctagttgtggtttgtccaaactcatcaatgtatcttagtaccgcattcatttcagtgagagcttactcatcagagttcgtttgcaaaaccctttttatgctggaaaattcagccacaatggtgaaatctatgagcactgttatgaacagttgacggaaaaagacatttggcaaaaatgccaaacctccctgaagcattgccaaaataacgggcaataaggctcacaaaactttcaaatgaaggctggataacaaatccggccttcattgactttaacaacctgacaaaccattaatataaaaaactgacagattaaaaggataaaaaatatgccaagacaaacaaagaaacttcaaactaaagcaacaaaaggtgtcatgacgtccgtatcagactaacgcttatccatggcggcaggattcgaacccgcgacattcggttttggagaccgaaaaccaatagagataacatactgtttttatatattatttttctttcattctgacttttaaattttcttattctgactcttgctacgtgagaaagaacattgtaagaacaaaattagttgtggcacacttccaattcttgtcgaagtttatcaatcctgactttcactagctagtatatcacaagttttgtaaaatctattcaggaaatctaatgtatgtggacatgtcaaatcattgcaaaaaagttctaattcatcggaatcgtcgactgcacgatcaaacatcgatcgaagctccttcgcaacctcagtcgca

SEQ ID NO: 1820 - DNA, 966 bp, unidentified
  source 1..966: mol_type = unassigned DNA; note = Bacteriophage uvig_312745 from the Index of /pub/databases/metagenomics/genome_sets/gut_phage_database (ebi.ac.uk)
aagaaaaaacgcaaggtggagggagctgataagcgcaccgccgatggttccgagttcgaaagccccaagaagaagaggaaagtctagttctgcagagggtgatgccattcgacgaacttgtttattgcagcttataatggttacaaataaagcaatagcatcacaaatttcacaaataaagcatttttttcactgcattctagttgtggtttgtccaaactcatcaatgtatcttagtaccgcattcatttcagtgagagcttactcatcagagttcggaaatcaaaaaagatgcagtaagggggctgtaaaaagacctctgagcatttcgtttagtgtaagaatcttttttacttcttacacgaaccttgaaaacgaaacagcctgcccgtagtgataccagaactgaataggcattcagcgtgtcttttttggttaatacgtcccggaaacatcagaacccggtacaggaacggatatgggatgagaacaggcaattaataaacaaaggaaggaggacatctgactatgacagagaaacagggattcatgacagcgttgtatgaacgtcttagtcggacgtccgtatcagactaacgcttatccatcgctatcactgcttcccccagcagaaccgaagaaaggagttgcatcagcatgagcaaattagaaagaatcattcacgataacagtaatggtctggattatatccttgtcggggaaatctatctgccactgatcgcagtacccgaagagaaaagagagattggtttttatggaagtcttcacagaaactatctgaaagattacaagagtggcttgtattcctatctgacattgagtggtaagctctggacgtatctcgcagatctgaatgagcagtgtttggaacgcagggatttcctcatggaatcgtcgactgcacgatcaaacatcgatcgaagctcgttcaaggctgtagatgca

SEQ ID NO: 1821 - DNA, 966 bp, unidentified
  source 1..966: mol_type = unassigned DNA; note = Bacteriophage uvig_287346 from the Index of /pub/databases/metagenomics/genome_sets/gut_phage_database (ebi.ac.uk)
aagaaaaaacgcaaggtggagggagctgataagcgcaccgccgatggttccgagttcgaaagccccaagaagaagaggaaagtctagttctgcagagggtgatgccattcgacgaacttgtttattgcagcttataatggttacaaataaagcaatagcatcacaaatttcacaaataaagcatttttttcactgcattctagttgtggtttgtccaaactcatcaatgtatcttagtaccgcattcatttcagtgagagcttactcatcagagttcgcgcagccgcacattgcgccgcccctaagcgaggtattcgagcttcccgcataataaaaaacagagaaaaaacgcaagaaagcggacagcaaccgctgtccgcctccttgcaagatatggtgtcaacttgtgtccttatgaacattacccgaacggttacagggttttgtcatgccctttgcacctttattgagctttacgccaaccagactgtttcgccggtcatgttccataagaccggcagccgtaggcggcgctacgaagccttaccggttggctgtccccgatgatatagctgtcggacgtccgtatcagactaacgcttatccatgcacagccaaatgggagggcgatgacctcacccgtcaacgggcgatgctggtcggtgggaagtgctttcttgtgacctccgtattccccggcagcgcatcggcaacgcccacagacaagctcctgcaactcatcgacacgaagttagagcgggagcatcatgagcagtaaaattccggtagacttgcgagagccggtgcggtatacttcgtgttaccgtaccggcctgccccaacgaaaaggaggtaactatggcaggtcaagaaaatcagcaatacaccgtactctacgggcggctcagggaatcgtcgactgcacgatcaaacatcgatcgaagctattgctaacatgctcatgca

SEQ ID NO: 1822 - DNA, 966 bp, unidentified
  source 1..966: mol_type = unassigned DNA; note = Bacteriophage uvig_569915 from the Index of /pub/databases/metagenomics/genome_sets/gut_phage_database (ebi.ac.uk)
aagaaaaaacgcaaggtggagggagctgataagcgcaccgccgatggttccgagttcgaaagccccaagaagaagaggaaagtctagttctgcagagggtgatgccattcgacgaacttgtttattgcagcttataatggttacaaataaagcaatagcatcacaaatttcacaaataaagcatttttttcactgcattctagttgtggtttgtccaaactcatcaatgtatcttagtaccgcattcatttcagtgagagcttactcatcagagttcgagggagtaagatatcactcaaaagtcaaattagatgtttattttaaattttaagcgaggtgtttcagatgcaagaaaatgaaacttatgtaatctatttgagaaagtctcgtgcagatagcgaaaaatttagtttagaagaagtatttgcaaaacatgaatcagaactccagtcactcgcagaacgtactttgggtaatcgtattcctgtggataaaatctttcgagaggtcgtatctggcgaaacaatcacagatagacctgttatatctcatatattaaaagtgatggagtcaaaaaagacgtccgtatcagactaacgcttatccattcaataatgtttgcaccggtacgctggtatttcttatatgcaaaagggcagttcatccgctgctcttttctcttgcacatatgttctatctatcgtataattattttacaaataaaaaatccggtactggcaataccggattcgtaacttatcaaccaggatgattgataataaacacagataaattatatcatacatcctgccgtttgcatagggtgtattttttataccctttttagggaggcaatcaatgtataatgattcaaaaggcatttatttaatgtatctcagaaaatcacgggaatcgtcgactgcacgatcaaacatcgatcgaagctgtcatggtagctcaggtgca

SEQ ID NO: 1823 - DNA, 966 bp, unidentified
  source 1..966: mol_type = unassigned DNA; note = Bacteriophage uvig_380944 from the Index of /pub/databases/metagenomics/genome_sets/gut_phage_database (ebi.ac.uk)
aagaaaaaacgcaaggtggagggagctgataagcgcaccgccgatggttccgagttcgaaagccccaagaagaagaggaaagtctagttctgcagagggtgatgccattcgacgaacttgtttattgcagcttataatggttacaaataaagcaatagcatcacaaatttcacaaataaagcatttttttcactgcattctagttgtggtttgtccaaactcatcaatgtatcttagtaccgcattcatttcagtgagagcttactcatcagagttcggtggacttgatcatcacgcaaaaggtatctaatgtttcgaaaaagcactatgagattacgatcctgactcgtatgcttgctgctcttgaaaaaccggtcgggatctactttgtttcggagaacatcttcacgcttgcctcctattaccagcatgacaatcatgacagggagttctttccctcaggagattgggaagtgctgccggaggatgaggcggaagaacttccgctcttaatgggaggtgtagaagatgcttgataccgagagcaagcgtcggaaagaacagcagaagcagaaggtgacgtccgtatcagactaacgcttatccatacgaattaggcggcgttatgccacaggaggtaagcaatggaaacttggaatgatgaataccgtatgggcgagcctgctgcggtgtatcaggttgcggaggtcaaggaacgggtgaatcccgaggctcctctgttggaaaagggcgacgagatcatcgacatgggcgctgatttcgattttgacggcttccaggtagtgcgaagagagttcttcgctcacttagcggagcccgcggtcacttttaataactgcaggttctacgtaaacagcgcttgtctgaataagttccctgacaccaacggaatcgtcgactgcacgatcaaacatcgatcgaagctttgcactagcataggctgca

SEQ ID NO: 1824 - DNA, 966 bp, unidentified
  source 1..966: mol_type = unassigned DNA; note = Bacteriophage uvig_585281 from the Index of /pub/databases/metagenomics/genome_sets/gut_phage_database (ebi.ac.uk)
aagaaaaaacgcaaggtggagggagctgataagcgcaccgccgatggttccgagttcgaaagccccaagaagaagaggaaagtctagttctgcagagggtgatgccattcgacgaacttgtttattgcagcttataatggttacaaataaagcaatagcatcacaaatttcacaaataaagcatttttttcactgcattctagttgtggtttgtccaaactcatcaatgtatcttagtaccgcattcatttcagtgagagcttactcatcagagttcggcaatcaatttgagctggaagtatacccgcgcctggcttcgcaggatgaatgaatttctttttgcgtgcatgggcgatttatggcggcatatgtatatgccgccataaatcacccatgcaaaagccccgcttttcagcggggccattttcattttctggcaatatatttgtagtagcgctccaccttatccggctccgcatccgcatcgtggatgaagtcccgggccagctccgcgtaaaactccgggctgctgatgccgtaccgcttcgccgtggcggcgtaatcgctgtacatggcatgacgtccgtatcagactaacgcttatccatgccagcgcccacgccgtggaatcgctgcaagagtcccaccagatggaaaacgccgcgcgggatcggcatttggaatccgtaaatcgtgataaaatgatttggcgcgttgtggccctttcgttgattgggctgctttgtgtgtggttcatttgggatgttaccggcggcaatcgcgggcttatccgctatggccaatcgtccttccaccccgtcagccgcctttttcatcttggaaaaggaggcgctttccatgcctgaaaaatacgccatctatttgagaaaaagccgggccgatatggaggaatcgtcgactgcacgatcaaacatcgatcgaagctcaagcgcattctcatctgca

SEQ ID NO: 1825 - DNA, 966 bp, unidentified
  source 1..966: mol_type = unassigned DNA; note = Bacteriophage uvig_85227 from the Index of /pub/databases/metagenomics/genome_sets/gut_phage_database (ebi.ac.uk)
aagaaaaaacgcaaggtggagggagctgataagcgcaccgccgatggttccgagttcgaaagccccaagaagaagaggaaagtctagttctgcagagggtgatgccattcgacgaacttgtttattgcagcttataatggttacaaataaagcaatagcatcacaaatttcacaaataaagcatttttttcactgcattctagttgtggtttgtccaaactcatcaatgtatcttagtaccgcattcatttcagtgagagcttactcatcagagttcgttgactatgacaggctgggtgcggcgatctacggcgattattatgcggggtaggtgataacaggtgcgggtatggctctatgcgcggctttctaacgatgatgaccgtgagatgaactccctgctaaatcagcgggaaatctgccaggcgtttgccgagcagcatgggtacatcatcgtaggacagtccttcgacgacaacataagcggcatgagttttgaccgccgtgggctggacgagctcacggcagctgtggacgctgataaaattgacgctgtcatcgtaaaagacctatcccgggacgtccgtatcagactaacgcttatccataaagaaaaaagaatctaacatcgcaagcgtcatgtattcctatgtgggtacggacgatcagttcgatgatttcctgaaaatgatgatccacgactatctgtccgtggatcatccatatacaaatcgaactgccgattttgttgctaaagtagaaacggaagtcgcctgatttgttttgatagctattcaaaaaattgtgtgctatggtgtgtcgtgcatgatcggcacaccatagcggaaaggaacgattatgaaagtctggctctattatcggctgtccagagatgaggatgaagaactggaatcgtcgactgcacgatcaaacatcgatcgaagctattcgaacgttggcgttgca

SEQ ID NO: 1826 - DNA, 966 bp, unidentified
  source 1..966: mol_type = unassigned DNA; note = Bacteriophage ivig_3177 from the Index of /pub/databases/metagenomics/genome_sets/gut_phage_database (ebi.ac.uk)
aagaaaaaacgcaaggtggagggagctgataagcgcaccgccgatggttccgagttcgaaagccccaagaagaagaggaaagtctagttctgcagagggtgatgccattcgacgaacttgtttattgcagcttataatggttacaaataaagcaatagcatcacaaatttcacaaataaagcatttttttcactgcattctagttgtggtttgtccaaactcatcaatgtatcttagtaccgcattcatttcagtgagagcttactcatcagagttcgcaagattgtcttgacggcaaggtagatttaatcattacgcagaaggtttccaatgtaacgaagaaaccgcaggagattacaatcatgtcccgctatcttgcaacactgccgcatccggtcggaatctactttatctccgaagatattttcacccttgcttcttattatcaagaagatatgcgggacacagacttcttccccgatggatgggtgagcctgccggacgatgattccgagaggaggctgctgcatgattgacaaaacgaaacgcttagaaaaagagcaagccaaggcaaagacgacgtccgtatcagactaacgcttatccatttgaagaactcaaaagttttatcacgcaagaattgcagggcgtagatatttaggaggtagtttatgaatgatattactgagcaaaggactatgacagagacctttgctccccaagcggactcagaactgcataaaattccggtattaaaagacgaggaagaattgattgaaatgagcacggacttcaacctggaggaattccaggttgtccgcagagagttctttgctcatattcgtgagcctgcggttacatttaataaccgcaaattctatgtgaattcagcttgcctgaccaagtttggaatcgtcgactgcacgatcaaacatcgatcgaagctggcgtgaataccgacttgca

SEQ ID NO: 1827 - DNA, 966 bp, unidentified
  source 1..966: mol_type = unassigned DNA; note = Bacteriophage uvig_83127 from the Index of /pub/databases/metagenomics/genome_sets/gut_phage_database (ebi.ac.uk)
aagaaaaaacgcaaggtggagggagctgataagcgcaccgccgatggttccgagttcgaaagccccaagaagaagaggaaagtctagttctgcagagggtgatgccattcgacgaacttgtttattgcagcttataatggttacaaataaagcaatagcatcacaaatttcacaaataaagcatttttttcactgcattctagttgtggtttgtccaaactcatcaatgtatcttagtaccgcattcatttcagtgagagcttactcatcagagttcgagcggctcgtgcagaccgtcgcgggctttctcggacggcagatggagagctgaacaagcaggcagggattcggttccctgcctgtttttgcgggtgcgcaaatgtcaagtatttaatgcgaaaaaagtagaaatatttttatgatacctttttacctcggcaaaaaggcgttgtcaaggtgcatttcaggggctatgcagcggcggcgaacgcggcgctgaacatctgcgcggatgactggaagccgagtatttcgcgtgggtagttgtttatccaatcttccacacgggcaacatctgcgacgtccgtatcagactaacgcttatccatgtggaaaaagcgcggcggcaatgtcgcgggtgtggcgagaaaagcgctggaagccgaaacaggcaagcctgtcgttaccgcgcagaacgccgagagcttccgccagcttgtcacggatattgtaacggacgcggcgcagctgccggagcagatggaggagaatgcaaatgggaaatgagccgaaaagcaactaccgaggaatcctcggcagctggcggcagacggaatagtatctcaagggtgaatgcgaatgatagaacgctttgacattgcggggtatgcccgcatttcggtcgatgaggaatcgtcgactgcacgatcaaacatcgatcgaagctgcagttgcagtgtccttgca

SEQ ID NO: 1828 - DNA, 966 bp, unidentified
  source 1..966: mol_type = unassigned DNA; note = Bacteriophage uvig_205904 from the Index of /pub/databases/metagenomics/genome_sets/gut_phage_database (ebi.ac.uk)
aagaaaaaacgcaaggtggagggagctgataagcgcaccgccgatggttccgagttcgaaagccccaagaagaagaggaaagtctagttctgcagagggtgatgccattcgacgaacttgtttattgcagcttataatggttacaaataaagcaatagcatcacaaatttcacaaataaagcatttttttcactgcattctagttgtggtttgtccaaactcatcaatgtatcttagtaccgcattcatttcagtgagagcttactcatcagagttcgaacttcgggcgcagactttggcacatcaagttaaattaaaactactgcgcccgcctactcccgatgctcgtttgcagcgtcttaaccttttgttaggttttaaacttgaactttaaataaagagcgtttatgagtcttgaaaaacaaataacagatctagccgattcgcctaaagaaaacattgaatttggtgttttctgtttcgttggcgcaataaaaggttggtgtgaattgtggaaaggacttaaaaatgaaggctgttattttgacaagggtgtcatcaaaggagcaagaggacaggacgtccgtatcagactaacgcttatccattccctttcaataaactatcatcttttgatgatactagtaactggtggagctgaggggaatcgaacccctgacctcttgaatgccattcaagcgctctcccaactgagctacaaccccgttatgagaacagatgaccttatagcggcatattttttaaattgcaagcaaaatttttgccttttgttaaaaaaaaggaaggctgttaaagaagaggggccaacagttaaggaagagggggcagttgttaaagatgaggggcgactgttggagaaggtgccggctgttaaaaaacaagcgccgggaatcgtcgactgcacgatcaaacatcgatcgaagctcagtagtccggacagaacca

SEQ ID NO: 1829 - DNA, 966 bp, unidentified
  source 1..966: mol_type = unassigned DNA; note = Bacteriophage uvig_239031 from the Index of /pub/databases/metagenomics/genome_sets/gut_phage_database (ebi.ac.uk)
aagaaaaaacgcaaggtggagggagctgataagcgcaccgccgatggttccgagttcgaaagccccaagaagaagaggaaagtctagttctgcagagggtgatgccattcgacgaacttgtttattgcagcttataatggttacaaataaagcaatagcatcacaaatttcacaaataaagcatttttttcactgcattctagttgtggtttgtccaaactcatcaatgtatcttagtaccgcattcatttcagtgagagcttactcatcagagttcgtgatcttcgcatcggaagaaacggcccgtcagccgctgagagaggcggtgtaagcgatggcgagaaagtcacgcaaggacctgatccgcgcggaaaacagcgggcagaccgctgcggccgtacagtccaagccgtgccctgagcctgctccaacttatttggctgtagggtatgcccgactgtccatctttgaaacaagggaccgcgccgacagcgaggcgctgcagaaccaaaaggagctgctccggcagtacatagcgaacgctccaggattgcagctcgtaggcatttttgaagatagacgtccgtatcagactaacgcttatccatgtgtgtgctgggccgcctgttctgctatgagcggtcaaaactgacgccggagcagtggcgggaacgatacggcacggtggaggagaacgctgtgcagccattctaaaggacaacgccgccaaaactcgcgctttacatggagcggaaaagatgatatagtaaatgcggactaaatcagaataaggatttttgcttcatgatcttttctggcttatgaccgcatttgcggaatcagtcaggaggtattttcatggagcttttttattgctatgcctacggccggctctcgaaagaggacggggaatcgtcgactgcacgatcaaacatcgatcgaagctaagtcactccagtagaacca

SEQ ID NO: 1830 - DNA, 966 bp, unidentified
  source 1..966: mol_type = unassigned DNA; note = Bacteriophage uvig_160559 from the Index of /pub/databases/metagenomics/genome_sets/gut_phage_database (ebi.ac.uk)
aagaaaaaacgcaaggtggagggagctgataagcgcaccgccgatggttccgagttcgaaagccccaagaagaagaggaaagtctagttctgcagagggtgatgccattcgacgaacttgtttattgcagcttataatggttacaaataaagcaatagcatcacaaatttcacaaataaagcatttttttcactgcattctagttgtggtttgtccaaactcatcaatgtatcttagtaccgcattcatttcagtgagagcttactcatcagagttcgacaattgagaacgccaaagtgtcggataaaaaagaaaaaatatcagaagccattataacgccagtttctgatagcaatatgataaaattgaaaattccgagccttatctacggaaaggttacaaaatttgaacccgtccgagaaatttgaacccgtttttctgtaaaaataaaattgtatcagagacggcttttagatagatgagggaataacaggtactcgtgaggacaagcgtgacgagtttcagcgaatgataagcgactgccggaaaggcaagatagacaggatatatacaaagtcgacgtccgtatcagactaacgcttatccatatgagctggaatttcacttgatcggtggattagaacttgcggaggaaatatgatcttggtgtcttgtataccaaattgcagggcattttatgttggtattgatactggatttttgcaaagctttgtggtatcattgtcggttgaaaggagtgagtttatgcctaaaaacagaataatcccattcggttactgtatgaaaaacggtgagataataaccgagcccaacgagctctataccgttgttacaatatttaatgagtatttaaaaggcaaaagcttgtcagaaatagcggctttgatggaatcgtcgactgcacgatcaaacatcgatcgaagcttgatggtactcgtataacca

SEQ ID NO: 1831 - DNA, 966 bp, unidentified
  source 1..966: mol_type = unassigned DNA; note = Bacteriophage uvig_135439 from the Index of /pub/databases/metagenomics/genome_sets/gut_phage_database (ebi.ac.uk)
aagaaaaaacgcaaggtggagggagctgataagcgcaccgccgatggttccgagttcgaaagccccaagaagaagaggaaagtctagttctgcagagggtgatgccattcgacgaacttgtttattgcagcttataatggttacaaataaagcaatagcatcacaaatttcacaaataaagcatttttttcactgcattctagttgtggtttgtccaaactcatcaatgtatcttagtaccgcattcatttcagtgagagcttactcatcagagttcgaaaacatcaaatccatgatagatggaatgagacaggaggcaaataatgaatgatgagatacaactcaaggaagctgtagattatgtggaggacgaggcttttacctttgaaggttatcaggttgtacgaggagaatttttttctcacgtatttgaaccctccttcacatttaataactataaagtccaggtcaatactgcctgtattaagagattaccggattttgactatgttcaaatattggtgaacccagacacgaaaaagctggcgatccgcccttgccaggaagatgagcgagacgacgtccgtatcagactaacgcttatccattccaaaaataaaaacaattcatgatagaccgtaggttgatgacgaaacctgtggtctattttctttactgcaactgccttctataatggcagcatgtctttaagttcaccaattcaattctacaagaaagtataaaattccctcaaattttgactgtaggtttatagcttaacctgtggtcgattttatactgctctcattccttttataatgatagggacaatattttattaaaggaatgatatttgatatgaaagaaacggaaaaactgggaaatgctcagtcccaaaaagaaaaaatggaatcgtcgactgcacgatcaaacatcgatcgaagctggagcgcacatctcagacca

SEQ ID NO: 1832 - DNA, 966 bp, unidentified
  source 1..966: mol_type = unassigned DNA; note = Bacteriophage ivig_116 from the Index of /pub/databases/metagenomics/genome_sets/gut_phage_database (ebi.ac.uk)
aagaaaaaacgcaaggtggagggagctgataagcgcaccgccgatggttccgagttcgaaagccccaagaagaagaggaaagtctagttctgcagagggtgatgccattcgacgaacttgtttattgcagcttataatggttacaaataaagcaatagcatcacaaatttcacaaataaagcatttttttcactgcattctagttgtggtttgtccaaactcatcaatgtatcttagtaccgcattcatttcagtgagagcttactcatcagagttcgtccgccgtattcaagagtttatcgaggtcaatacccataacgaggcggtttaatcgaaaccgcatttttacagacagtcacctttcctaaataaagcgccccggtggggcctgcaggtcctgttggcccagctggaccctgtggtccctgtgctcctgtagcaccctttgcgcctgctgcccctgcgtcacctttaggacccttaacgctgcataaataaatccatttagcggcacttgctgctcccgcaacggtacatttgtatacataacccgtacttgtgttaagatataaatcattgacgtccgtatcagactaacgcttatccatggcctatatgctgaaagaaatgggcaacccgtattgtttccgtgtgggcgatctcggtgtaaaagtggagtttctggacaacgccccgcccttgcaggatgccctttctgatttcttccagcgcaaaaaaagcgggctgtgatcctctcccctatcttctggacactttgtccagaggtggagtcatccttgatgggggctccgaacagagttacaatatatatgtaatgtgatagggaaggaggctatcatggcacggagaagccgggctattgttgaaactgcaagaccaaaatacagggaatcgtcgactgcacgatcaaacatcgatcgaagctccagtagccacaatagacca

SEQ ID NO: 1833 - DNA, 966 bp, unidentified
  source 1..966: mol_type = unassigned DNA; note = Bacteriophage uvig_354027 from the Index of /pub/databases/metagenomics/genome_sets/gut_phage_database (ebi.ac.uk)
aagaaaaaacgcaaggtggagggagctgataagcgcaccgccgatggttccgagttcgaaagccccaagaagaagaggaaagtctagttctgcagagggtgatgccattcgacgaacttgtttattgcagcttataatggttacaaataaagcaatagcatcacaaatttcacaaataaagcatttttttcactgcattctagttgtggtttgtccaaactcatcaatgtatcttagtaccgcattcatttcagtgagagcttactcatcagagttcggtgtttccgttcactggccagaacaatatctcatgcgaaggattccagcatgacggagaaggcaaaacagaccccctgttttcagataattatgataatgcgtaagtagttgattttcaacggtcttgctttttccgacacaacttttcgcttatattcgttctatatataaaaagaaaaaacctgtcatattgtgaaggcagttaaaaaaaaggagaaaacaaaaatgctgaaaagacacgttgatggagaacccgaagaattcgcacggttgcgaggcaaaatcgtcgcggcctgtgagacgtccgtatcagactaacgcttatccatcgccttgccaaggagtatgcgggaaatttcgctaatgcgatgtgggaactggaagaagaaatgggagaagaatacattgaaaacgagtgtaattggtacctcaacgatgacccttttactggagggtcttgggaggaaggcgcagaagacttcatttgtggagaaatcgaagccgagctgaagaagtagtaacaaacaacaacaacaacacaacaacaaggagaacaagaacaaggagagcaactaattaatgccaacaatgaacaccaaaacattctgcgtcatctacgcccgccagtcggaatcgtcgactgcacgatcaaacatcgatcgaagctggacagcatccacacgacca

SEQ ID NO: 1834 - DNA, 966 bp, unidentified
  source 1..966: mol_type = unassigned DNA; note = Bacteriophage uvig_305800 from the Index of /pub/databases/metagenomics/genome_sets/gut_phage_database (ebi.ac.uk)
aagaaaaaacgcaaggtggagggagctgataagcgcaccgccgatggttccgagttcgaaagccccaagaagaagaggaaagtctagttctgcagagggtgatgccattcgacgaacttgtttattgcagcttataatggttacaaataaagcaatagcatcacaaatttcacaaataaagcatttttttcactgcattctagttgtggtttgtccaaactcatcaatgtatcttagtaccgcattcatttcagtgagagcttactcatcagagttcgatctaccgggatacatcttatcacgaaacagagcatggtatggaactgcgccgtgagataattgtgggcggacgaaaattctttgtccgctccatcttctctaccgcagagaaagcaaaaacgcctacggagcagatgctccaaatcatcgacagtgatttagaaaaaggttcgatttgaggatagacattgggcaggagatacggtatgtttgttgttaccgtatcggcttgcccggaaaggagtagcaatggcaagcaataaaaaatatgccgtcctctatggccggctgagtcaggagacgtccgtatcagactaacgcttatccatctcagagtatggcggattccgtggcagaagcaatccaaaatgaggttgcatgagcagaaaagagaggctgtgccgaaacacagcctccctccacaggaacaaatattaagttatatgggtaggttcataaattgtccctatggaacgccggagaacgggcggcagttttttattgcagtgcgtcaatgtaagcgttcagcgcggcaaaatcgccgcggggataggcgtttaggtcgcggtttttcgcgttgatgagacagtcggtcaaaagaaagacatccatcccgacctcgcgtgcagggaatcgtcgactgcacgatcaaacatcgatcgaagctctggaatacaatccacacca

SEQ ID NO: 1835 - DNA, 966 bp, unidentified
  source 1..966: mol_type = unassigned DNA; note = Bacteriophage uvig_45 from the Index of /pub/databases/metagenomics/genome_sets/gut_phage_database (ebi.ac.uk)
aagaaaaaacgcaaggtggagggagctgataagcgcaccgccgatggttccgagttcgaaagccccaagaagaagaggaaagtctagttctgcagagggtgatgccattcgacgaacttgtttattgcagcttataatggttacaaataaagcaatagcatcacaaatttcacaaataaagcatttttttcactgcattctagttgtggtttgtccaaactcatcaatgtatcttagtaccgcattcatttcagtgagagcttactcatcagagttcgaaataacatattaatagtgattaatagaggaaatgaacatggaaacataaagattattcctctgttaagagacggaaagttgattgactgaatatgctaattattgagcagtatgtaagaggaataatcttatggtcgaaaatgagaacagaattatattaaaattagcagaattattactgcaggagaaattaataacacctgaagaaaaaagtaaactgtacatattggtaaagaaggaaggcaatatatgatacgagctgttatctattgccggtgtagtacagaagaagaaagccagacgtccgtatcagactaacgcttatccatgaattcgttttaatggtgccggtggcaagggctgctgggaaattctggaatagccggaaaataggcaaaaaatgagtattacgatatcagttcgtatccgtatgcctgcacagttaaaggtctgggaaccgtagatgatcagatatccaagcccctgccttgcaccaatgaattcaccgatgatcacgccgaccaggcacaacccaatattgactttcatcacacttaagatgaggggcacagaagacggaaggacaatctttgtcagttcgtctttttttgtgccgccgagggtgcggaggaatcgtcgactgcacgatcaaacatcgatcgaagctcacggtcacacgatacacca

SEQ ID NO: 1836 - DNA, 966 bp, unidentified
  source 1..966: mol_type = unassigned DNA; note = Bacteriophage uvig_151078 from the Index of /pub/databases/metagenomics/genome_sets/gut_phage_database (ebi.ac.uk)
aagaaaaaacgcaaggtggagggagctgataagcgcaccgccgatggttccgagttcgaaagccccaagaagaagaggaaagtctagttctgcagagggtgatgccattcgacgaacttgtttattgcagcttataatggttacaaataaagcaatagcatcacaaatttcacaaataaagcatttttttcactgcattctagttgtggtttgtccaaactcatcaatgtatcttagtaccgcattcatttcagtgagagcttactcatcagagttcggaacgaaaacgctttctattaagccgaaactttgaaatctcgaattgcaatagcaatctaaaaaagtgcaacaaggttctgcgagagacaggtaaaattgctgattttaatgatgagttgtttgagatttttattcagagaatattggttattaaccgtaataacctggtttacgaattgacgagtggtcataaaatcaatgtcgaggtactcgataattataaggtcagggatgagataaggagggtttatgttagcgagtaatgtaaaagtaattcaaccaagaaaattattcaatatgacgtccgtatcagactaacgcttatccattcacattcaaatttaccgattttctggaacgtgaagtgcctttaattgaataaaaagagccataaaatttgagccgattgggtagccagtcggctcttgttttgtttctaaattagtggagattttttgcgtattaccgaaagaggactttgtctattgacactgatttgtctaatggtagtcgggtagtctttgaggcctttttgtcagacttttttgactatcgaaacaactcgacaccgccatcaacccgctgctcgcaaaaatacagagatcgacggcggacgtgtggggcaaagaggaatcgtcgactgcacgatcaaacatcgatcgaagctgtaggtcaaggtcggcacca

SEQ ID NO: 1837 - DNA, 966 bp, unidentified
  source 1..966: mol_type = unassigned DNA; note = Bacteriophage uvig_369437 from the Index of /pub/databases/metagenomics/genome_sets/gut_phage_database (ebi.ac.uk)
aagaaaaaacgcaaggtggagggagctgataagcgcaccgccgatggttccgagttcgaaagccccaagaagaagaggaaagtctagttctgcagagggtgatgccattcgacgaacttgtttattgcagcttataatggttacaaataaagcaatagcatcacaaatttcacaaataaagcatttttttcactgcattctagttgtggtttgtccaaactcatcaatgtatcttagtaccgcattcatttcagtgagagcttactcatcagagttcggggacatgcatcggggaggagaaatgaatggaactattcaaccagtggaatagaaaggacccggtttccagcgcattgcagggcagatctgttagcattcccgtggaaccttcatttgattatgctgcaccgcttcaggccccggcgcaggagccaatcgagaagaaagatgagcctgtcacggcagccgcccctgaagcgcaaagcgcacctcttgcggagtcggagatcgttgaaatggaggatttctcttacgagggatatcaggttgtccgcggcgagttctttgcacacgtttatgacgtccgtatcagactaacgcttatccataacatgcttaaagagatgaaatccgcgttccacaatgtcaaaagggcaacctcagagctgtaactgaataatggttttcaaatgagagcttccttcctgggggctcttttctcattgctttagcaaactttttcaaaaaaatatcgtttttcaataaccagagggatgcttgtatacctctggttattttcattttgatcggcggctcaatatactaaatgcaacatcatctatcattggagcacagtatatgaaccagaacgaagcgaagctctcaaaggaagagcagaaagcgaaaatggaatcgtcgactgcacgatcaaacatcgatcgaagctacgcgcttgtagacgcacca

SEQ ID NO: 1838 - DNA, 966 bp, unidentified
  source 1..966: mol_type = unassigned DNA; note = Bacteriophage uvig_319734 from the Index of /pub/databases/metagenomics/genome_sets/gut_phage_database (ebi.ac.uk)
aagaaaaaacgcaaggtggagggagctgataagcgcaccgccgatggttccgagttcgaaagccccaagaagaagaggaaagtctagttctgcagagggtgatgccattcgacgaacttgtttattgcagcttataatggttacaaataaagcaatagcatcacaaatttcacaaataaagcatttttttcactgcattctagttgtggtttgtccaaactcatcaatgtatcttagtaccgcattcatttcagtgagagcttactcatcagagttcgtaataccgcaagagcgattgagaaattattttcttcaatcgctttctttttaactttaggtatcacaataagacagatctaagtctgtctaaaattggttttttactagaacttcaataagcaaaagagctcggacattctccgggctctttttaacagaacgtccagtgaatctcaatatcttcattcaggacaacgatcttatcgatcagcaagcgaatgatactatttgtatattcgggatcaccagattcaagagcaatctgaaaagctgaggcatagctcatgatcttcagatgagacgtccgtatcagactaacgcttatccattatacaaggaaacaaatcagttttaggagcttttcatagaaaagttaagaaacttagagttgcagcatattgtagagtcagcacagatgatgaagatcagattaaaagttataattctatgattaaatattatactgatttaattcagaagaatgaagaataggaatttgttggaatttatgctgataaggctattacaggaacaagtgtaagacctagagaagattttcaacgactcatagaagattgtatggatggaaaaattgatatgatcattacaaagagtattccaaggtttgcggaatcgtcgactgcacgatcaaacatcgatcgaagctacgttcagcaggccttacca

SEQ ID NO: 1839 - DNA, 966 bp, unidentified
  source 1..966: mol_type = unassigned DNA; note = Bacteriophage uvig_183862 from the Index of /pub/databases/metagenomics/genome_sets/gut_phage_database (ebi.ac.uk)
aagaaaaaacgcaaggtggagggagctgataagcgcaccgccgatggttccgagttcgaaagccccaagaagaagaggaaagtctagttctgcagagggtgatgccattcgacgaacttgtttattgcagcttataatggttacaaataaagcaatagcatcacaaatttcacaaataaagcatttttttcactgcattctagttgtggtttgtccaaactcatcaatgtatcttagtaccgcattcatttcagtgagagcttactcatcagagttcgatgatgggagtttggtgtttctattccgagatgggacggagataaaagtgtgagataattacagccctgttggagaaatccggcagggctgtttttttttcataactcaagtccataattgtaaaatcctggccttgccggaagctttccaacaccttggaaacaatccaacaaggctgctttttcactcctttttcctctccaaaacccacttaattttattaagtccaatcgacacccctcaaaaaacgccaactatcgtttgctttttgaaaaaacgctgagctatcgtttgcacttgacgtccgtatcagactaacgcttatccataattgcactgtcctacggcaaagcaaatttccgaacggattctctatgaaaagatttgctctgttttgcaaatcaaagaatttgacgttggaattgttaaaagcaaagttgaaaacattctggtttcgccgaatcgtctgacttttcttttcaaagataatacagagaaaaccatttcttgggagaaccattccagaagcgaaagctggacaccggaaatgcgacaggctgccgcagaaaggagcagaaaatgccaaaagtaaccgtcattccgccgagtatcaatcgggcaactcgacaggaatcgtcgactgcacgatcaaacatcgatcgaagctgcgttagcgtatgcaagcca

SEQ ID NO: 1840 - DNA, 966 bp, unidentified
  source 1..966: mol_type = unassigned DNA; note = Bacteriophage uvig_250794 from the Index of /pub/databases/metagenomics/genome_sets/gut_phage_database (ebi.ac.uk)
aagaaaaaacgcaaggtggagggagctgataagcgcaccgccgatggttccgagttcgaaagccccaagaagaagaggaaagtctagttctgcagagggtgatgccattcgacgaacttgtttattgcagcttataatggttacaaataaagcaatagcatcacaaatttcacaaataaagcatttttttcactgcattctagttgtggtttgtccaaactcatcaatgtatcttagtaccgcattcatttcagtgagagcttactcatcagagttcgagaaaaaaggaaccgatagcagttccagagctcaatgaaaagaattatccatatttcaaaaaattgtattgtaaagaatgtggtagccgcttagttcgttacattgaaagcagacaacatgtcaaatggatatgcaatggaaacaagcggaaaggaacagggttttgtaaaggcgttagagtgctggattcgactgtccggggctgggaaattgacacagatgttttagttgaaggaaaggttggtaaagatggcgaaaaaagttacagttatacctgcaaaacaggtcagagcaaataggacgtccgtatcagactaacgcttatccataacattttacggtgagctttttggatggaacggaaaaagaaatattagtataatgtaaataatatgccacatagcctttgggggttgtgtgacgtttttttgtagaaaaatggacacataatttgctagtgtttgatatgtgaggtaacaagatgaattattatatggtttcgctgcgacaatcaaattttcagcaattgctggagcatgatttcgaagtgataggttttccagaatattcaaagcaaatagaaatggtaaagccaggagataaatttgttttgtatattggttcaggtaggaatcgtcgactgcacgatcaaacatcgatcgaagctgactattactacgacggcca

SEQ ID NO: 1841 - DNA, 966 bp, unidentified
  source 1..966: mol_type = unassigned DNA; note = Bacteriophage uvig_195543 from the Index of /pub/databases/metagenomics/genome_sets/gut_phage_database (ebi.ac.uk)
aagaaaaaacgcaaggtggagggagctgataagcgcaccgccgatggttccgagttcgaaagccccaagaagaagaggaaagtctagttctgcagagggtgatgccattcgacgaacttgtttattgcagcttataatggttacaaataaagcaatagcatcacaaatttcacaaataaagcatttttttcactgcattctagttgtggtttgtccaaactcatcaatgtatcttagtaccgcattcatttcagtgagagcttactcatcagagttcgagtccaagcagataccggaagatattctgtatgacaaatgctgtgaagtcctgaatcttgacgagtttgacaatgaagtatttcaggacgagatcgaatatatctctgtaccaaaaccgaatgtgttaacctttatcttcaaaactggtgagaagcgcacagtccactggcttgaccactcacgcacagaagcgtggacacctgaaatgcggaaaaaagccgctgagcatagcaagaaaagaggtaagaaatgtcaagagtaacagttattccggcaaaacttgatagggctacattcatgacgtccgtatcagactaacgcttatccatttgagggtgagctgacattcacactgcgtaacggcatggagatcgaagtataatataattataatggggctgttgctgagatatgatgtgtctcggctgcagcaattggaagagccgaacggtgacgaactcggagacgcaggaacagacacaggaaagaaccctgttcctgaacgggaccatcgccgaggaaagctggtttgacgatgatgtcaccccgcagcttttcaaggacgagctcatgtccggcagcggaaatattaccgtgtggatcaactctcccggcggcgactgcgtggcggaatcgtcgactgcacgatcaaacatcgatcgaagctacgtatattgacaccggcca

SEQ ID NO: 1842 - DNA, 966 bp, unidentified
  source 1..966: mol_type = unassigned DNA; note = Bacteriophage uvig_557325 from the Index of /pub/databases/metagenomics/genome_sets/gut_phage_database (ebi.ac.uk)
aagaaaaaacgcaaggtggagggagctgataagcgcaccgccgatggttccgagttcgaaagccccaagaagaagaggaaagtctagttctgcagagggtgatgccattcgacgaacttgtttattgcagcttataatggttacaaataaagcaatagcatcacaaatttcacaaataaagcatttttttcactgcattctagttgtggtttgtccaaactcatcaatgtatcttagtaccgcattcatttcagtgagagcttactcatcagagttcgagtgcatcaaggtacataacgatggaaagctgacgatcattttccgggtatgagatcgaggaaacactatagaaagccagatcgcaagacacagaaaaaactggaggtatgcgcacacttttgcaaacgtttcctatggaagcttagtgttaaaatgtgataccaacctcctggagaggattgtatgtcaattgaaattgatgggttgcatcaaagtttacctcggtggtaacccgaaaaatcacctttagcggcggttcccctgcgaaagaacatcccaaacgcagaaggttgcggggtgacgtccgtatcagactaacgcttatccatcgtccaagtgaggaccggatcgctacgttgctctgcgaaattgcaggtcagctttacaaagaaacaaacgccaaaacgcagatcgccgcacagatcgctagaaagcgtgtctctttgatgaagccgcaggatgcgttcaatgctgcatatttttccgaactgatcgacgccgtctcccttcatgtgggaggcggcgtcgttctgcatacaaaaacagaaaccgatatttgcgaaagcgaggataaaccgaatggaagtccagagaattccgaaacggacagtttccgtaattgaaccccaggaatcgtcgactgcacgatcaaacatcgatcgaagctattaccggacggtgtggcca

SEQ ID NO: 1843 - DNA, 966 bp, unidentified
  source 1..966: mol_type = unassigned DNA; note = Bacteriophage uvig_13945 from the Index of /pub/databases/metagenomics/genome_sets/gut_phage_database (ebi.ac.uk)
aagaaaaaacgcaaggtggagggagctgataagcgcaccgccgatggttccgagttcgaaagccccaagaagaagaggaaagtctagttctgcagagggtgatgccattcgacgaacttgtttattgcagcttataatggttacaaataaagcaatagcatcacaaatttcacaaataaagcatttttttcactgcattctagttgtggtttgtccaaactcatcaatgtatcttagtaccgcattcatttcagtgagagcttactcatcagagttcgtacagacaccacctgtagatgcggacaccgcgcggcaaaaagccttggaggtcgcatccctaaagctggcgagtgtcaaaacggaggaatatgaatcacaccggctccgccgcatccttggttcgcaggcaaagctgtgggagctggacgcaaacctcctgcggcagagcatccgaaaaatcacctatgacagtaagacagtcaaagtcctgctgaaaaacaatcaagtcttagaggagtgtgatgatacatgacgcagtcccgccctgaaccgaaggtcatcgtgattcccgcaaaggagacgtccgtatcagactaacgcttatccatgtgtagaaatcgaacagaccgtagaccaacctaagaggaggaaattcatatgatttatgtaactggcgattgccacggaaacttccggcgtttccaatcggattgtttcccggagcaagctaacatgacgaaggatgacacggtcatcatcaccggagactgcggcggcgtgtggtttggcgacagccgcgacgatgaaacgctggactggctggaacgcctgcccttcacgctcgccttcgtctgcggcaaccatgaaaactatgacgcgctggcgagataccccgtggcagagtggcaggaatcgtcgactgcacgatcaaacatcgatcgaagctatcaacaccaataatcgcca

SEQ ID NO: 1844 - DNA, 966 bp, unidentified
  source 1..966: mol_type = unassigned DNA; note = Bacteriophage uvig_114897 from the Index of /pub/databases/metagenomics/genome_sets/gut_phage_database (ebi.ac.uk)
aagaaaaaacgcaaggtggagggagctgataagcgcaccgccgatggttccgagttcgaaagccccaagaagaagaggaaagtctagttctgcagagggtgatgccattcgacgaacttgtttattgcagcttataatggttacaaataaagcaatagcatcacaaatttcacaaataaagcatttttttcactgcattctagttgtggtttgtccaaactcatcaatgtatcttagtaccgcattcatttcagtgagagcttactcatcagagttcgggcaggcttctaagaaatgaagtgtatttgggagatgagtattacccgcagctgattgatgaggagcttttcaataaggtgcaggagctacgaaacagtaatgccagatctcaaaaccgtattcgtgattatataaagcaggcgcctgttgcagaaaacattcaatatcgcattggaaaagttcagcagcgctatgaaaacccataccaacaagcagaatacgcctatgggttaatcaaggaggaaaaatatgaatgagaatgtaaccttaattccggccagaaaaaggcccggtaataggacgtccgtatcagactaacgcttatccatataaatttacagtttgctttaaagctggtgtggatttggatatagaacgataagaatacaaaaatagcggcaggggtttggggttgccgcctttgtcgtttttaattctcttattattggttgtatcgtgtgaagtttggtatccctgccacaaatcttgcgactaagggtgacagtatcaccttttctacacctaccatcgagggtactgtacttactcgtaacaaggtagatgccagcggtagacatccttggaaggcagaagtaacagagggtgaaaatagcgtatctaatgaaactggaatcgtcgactgcacgatcaaacatcgatcgaagcttgcgccacactaccatgcca

SEQ ID NO: 1845 - DNA, 966 bp, unidentified
  source 1..966: mol_type = unassigned DNA; note = Bacteriophage uvig_505551 from the Index of /pub/databases/metagenomics/genome_sets/gut_phage_database (ebi.ac.uk)
aagaaaaaacgcaaggtggagggagctgataagcgcaccgccgatggttccgagttcgaaagccccaagaagaagaggaaagtctagttctgcagagggtgatgccattcgacgaacttgtttattgcagcttataatggttacaaataaagcaatagcatcacaaatttcacaaataaagcatttttttcactgcattctagttgtggtttgtccaaactcatcaatgtatcttagtaccgcattcatttcagtgagagcttactcatcagagttcgccgcaccaacactgtcacatgtaccgcccactgtgcctggtcgtctcacagatatctcaattgcacgcatggaaaaccagatcaatcaggagctatccagaccggtgctggaaccggagcgcctccaggacatgatcttccaactggccataaagaaatatgaagcgatacggagcaataattccatacagagcaatcaagtggacgcggacagcgtccattttgatatttgaaaaaggagcgaacgaaaatggcaaaaccagtacgagtcattcccgccaagcccaaagcggagcttgagacgtccgtatcagactaacgcttatccataggtagtattcaaaaacgggacagagatttgggcgaggtgggactgtgagtaggcattttgcagttagcggctggtatctatccataaagatatcgagttttcatcatctttttcaaataggcatatgaagagatgatgtgatagcgttataacacatatcctgtgttacagtagtcatgagggatttgcacttccgttcggtctttgtcgttacatcaaacttacaataattgatttggccgggtccattcatcctttttcttctcgctgtccaagatgtattgtaatcctacatgaccggaatcgtcgactgcacgatcaaacatcgatcgaagctgatcagtactgtatatgcca

SEQ ID NO: 1846 - DNA, 966 bp, unidentified
  source 1..966: mol_type = unassigned DNA; note = Bacteriophage uvig_331196 from the Index of /pub/databases/metagenomics/genome_sets/gut_phage_database (ebi.ac.uk)
aagaaaaaacgcaaggtggagggagctgataagcgcaccgccgatggttccgagttcgaaagccccaagaagaagaggaaagtctagttctgcagagggtgatgccattcgacgaacttgtttattgcagcttataatggttacaaataaagcaatagcatcacaaatttcacaaataaagcatttttttcactgcattctagttgtggtttgtccaaactcatcaatgtatcttagtaccgcattcatttcagtgagagcttactcatcagagttcgaggccatggagaacagctccgggaacatcgagtggattgaacagttcaagaagtaccggcatctgacggagctggacagggagtgcatcgttcacctgattgaaaaaatcctgatctatgacggcaagcgcatcgaggtgtgcttccgttacagagatgagctggaaaacgcattgcagtatatagaacggtttgaggatgtccttcccgctgaggaaggtgtaacgatacctgagaggaggaacgcataatggcaagaaagaaaagacagtatttacagccggagcaggcgcaggaaccgacgtccgtatcagactaacgcttatccatgggacgcattggaaacggcttatcacgaattggaaggaggtgaagcccggtgaagaaactgtacctgtacatccgcctgtcggatgccgatgatgacctgaaattcaaaaccgagagcgagagtatcgccaatcagcgcacgctgctgtatcggttcatccgcgcccgccgggagtttgacggctatgaagtggttgagttcatcgatgacggctactccggcaccaacggcaaccgtccgtcttttgagcggatgattgaaagtctgaaaaatggcgaggcaaacgtggtgatctgcaaggaatcgtcgactgcacgatcaaacatcgatcgaagcttaccacgtggaatagtgcca

SEQ ID NO: 1847 - DNA, 966 bp, unidentified
  source 1..966: mol_type = unassigned DNA; note = Bacteriophage uvig_80069 from the Index of /pub/databases/metagenomics/genome_sets/gut_phage_database (ebi.ac.uk)
aagaaaaaacgcaaggtggagggagctgataagcgcaccgccgatggttccgagttcgaaagccccaagaagaagaggaaagtctagttctgcagagggtgatgccattcgacgaacttgtttattgcagcttataatggttacaaataaagcaatagcatcacaaatttcacaaataaagcatttttttcactgcattctagttgtggtttgtccaaactcatcaatgtatcttagtaccgcattcatttcagtgagagcttactcatcagagttcggattgaaaggcggtttggaaattaaaaaggcccttgatggagaaagagattaaattgaaagtgtatatcttaaagaggctcaccctaaaatgtagggcgagcctcctttgcggtttagctaactatgaggagaagtaagtgccttttgcagcctgcttatctccatgtctaccattcgttttctgttgtaaagcaacaggccttttgtcgctttcaccaaatcttttgttccggaatgaaataccgcaaccaaatagcgtttctctttccactttctatacaagtgctttaatgactcttgacgtccgtatcagactaacgcttatccatacaatacagcatttgacgaatcgcaggccagacaagcagctatccttctcgctgcagcccgctatgacgtcctcggatcggaagagtatgaaaccttacggattcgcgacctcttaacgaagaccgaaaagtctgaagaacttgataccacagtcctacggagtatagctacagagatagtcattcaccccgatggcaaaatcggattaaagatgaaaaacggacaaatcattgaaaggaatgaaagcacatgagccgagcatcccctaaagtcataacgatccctgcaaatccgaacctggaatcgtcgactgcacgatcaaacatcgatcgaagctatcgctctcctacgctgcca

SEQ ID NO: 1848 - DNA, 966 bp, unidentified
  source 1..966: mol_type = unassigned DNA; note = Bacteriophage uvig_9192 from the Index of /pub/databases/metagenomics/genome_sets/gut_phage_database (ebi.ac.uk)
aagaaaaaacgcaaggtggagggagctgataagcgcaccgccgatggttccgagttcgaaagccccaagaagaagaggaaagtctagttctgcagagggtgatgccattcgacgaacttgtttattgcagcttataatggttacaaataaagcaatagcatcacaaatttcacaaataaagcatttttttcactgcattctagttgtggtttgtccaaactcatcaatgtatcttagtaccgcattcatttcagtgagagcttactcatcagagttcgcaaaacaaattcctgaaagtacgctgatctctgtttgctgtgagatactgagcattactgaatttgatgcaaatatctttgaaaatcaagttgaaaaaattcttgttcccgtaccaaacaaattgatttttcaattaacaaacgggaaatgcataaataccacatggaaagaccgttcccgttctgaaagctggacagaggaaaaacgtgctgccgctgctgaatcatcaaaaacaaggagatggagaaaatgccaaaagtaacaaaaattccgccaagattaaatcctgccacttttgcgacgtccgtatcagactaacgcttatccatcagatggcaaaatgatctttgcttttaaagatggttcaaaaatcaaggtttaatgcatataaatttgaaagtctgctgtcgggtatattccgattggcagacttttttctgtaaagaaacgcttttttgaccaaagaaacggcaaatctaaaaaaatgcaaccatagcaaaaaaatgcaaccttttgacatccgtttcgttgctctcactcattcgtttctttgcttattttctgctctccaaagaaacggaaatccatttttcagatgcttcttttcatagcaaaaagtacgtattttcggaatcgtcgactgcacgatcaaacatcgatcgaagcttcgcttgacctctcctgcca

SEQ ID NO: 1849 - DNA, 966 bp, unidentified
  source 1..966: mol_type = unassigned DNA; note = Bacteriophage uvig_507971 from the Index of /pub/databases/metagenomics/genome_sets/gut_phage_database (ebi.ac.uk)
aagaaaaaacgcaaggtggagggagctgataagcgcaccgccgatggttccgagttcgaaagccccaagaagaagaggaaagtctagttctgcagagggtgatgccattcgacgaacttgtttattgcagcttataatggttacaaataaagcaatagcatcacaaatttcacaaataaagcatttttttcactgcattctagttgtggtttgtccaaactcatcaatgtatcttagtaccgcattcatttcagtgagagcttactcatcagagttcgatcaactaacgttcaacttcaaggtgggaattgtaaaaactgcgacgatataaaaacagggtcggtggatgataagtccatcggccttttttgttgtgaaaaaacactcgaattgacaaagtgcaacatttgtggtataatcctatatatgaataagtataaaaaagagttacttcacctttggggtaaagtcggtttaatagtcaatctatcgcaaatgatagaatacacgctggcaaatgtgttggcttttgatgaaatactgcgtgagtttgaagatagggattctatgtttgtttagacgtccgtatcagactaacgcttatccataacaacggatattattagaacagcaaataaatgaatataggcagtctcatatcaagaacttggaattgaaaccgataactgaatttaatgaagaattagtcggtagagtattaaaacaagtgacgatacaagattggataataacgttcgagttttataacggtgtaaaaataagtcggcaatatacaaacggaccgagcggaaaccaaaaaggttggaaagaaaagattaaaggaggcttaagagcaaaatggaaacgataatcaataatcaacccaaagtggtgagggttgtaaggaaggaatcgtcgactgcacgatcaaacatcgatcgaagctctatctccttgtgcttgcca

SEQ ID NO: 1850 - DNA, 966 bp, unidentified
  source 1..966: mol_type = unassigned DNA; note = Bacteriophage uvig_80003 from the Index of /pub/databases/metagenomics/genome_sets/gut_phage_database (ebi.ac.uk)
aagaaaaaacgcaaggtggagggagctgataagcgcaccgccgatggttccgagttcgaaagccccaagaagaagaggaaagtctagttctgcagagggtgatgccattcgacgaacttgtttattgcagcttataatggttacaaataaagcaatagcatcacaaatttcacaaataaagcatttttttcactgcattctagttgtggtttgtccaaactcatcaatgtatcttagtaccgcattcatttcagtgagagcttactcatcagagttcgatttcagatgtcaaatacaaagctgaaagcacaaagatattggatgaaatcaaaactcgagaacaaacgattcaaaccttacaatcaaataaaatggttgaaaaacaatttaccaaatccgctgtgtttacaaaagacatggcggattttcttatacaagcgacagtaaaagattggaaaataacattcgaatttgctaacggcatcaaaataactaaatcatatacaaacgggagggcaggaaacgtaaatggaaaactctgcaagcgtaaagcctaaaatcaggctgataccagcgaagacgtccgtatcagactaacgcttatccataagaaatagaaatagagttcgaatgtgggattaaggtaaccgaaaaactgtaaattatattataataaaataagaccgactgtggcaatcatgccgtggtcggtctatttttttatgaattacgctacttatcgttcaatgagtacaaaaatcctttttgttgcgtttaagtctgatttttaggacggtgcaggaaaattgaaatcaagtcctaccaagaaaggcgaatgaatgaacaaaaagggtaatcaatgaaaaaaatgcccgattagggaatttttgcatagaaaaagacacacgggaatcgtcgactgcacgatcaaacatcgatcgaagcttggaagaatcctaacatcca

SEQ ID NO: 1851 - DNA, 966 bp, unidentified
  source 1..966: mol_type = unassigned DNA; note = Bacteriophage uvig_176185 from the Index of /pub/databases/metagenomics/genome_sets/gut_phage_database (ebi.ac.uk)
aagaaaaaacgcaaggtggagggagctgataagcgcaccgccgatggttccgagttcgaaagccccaagaagaagaggaaagtctagttctgcagagggtgatgccattcgacgaacttgtttattgcagcttataatggttacaaataaagcaatagcatcacaaatttcacaaataaagcatttttttcactgcattctagttgtggtttgtccaaactcatcaatgtatcttagtaccgcattcatttcagtgagagcttactcatcagagttcgctttgttctgttccttttttcaggtcttttgtatgtgccggaaccacaacccgcttgtttgtttctttgttttcatagaaatgatgggatccattgacgcgaataagcttaaaccccttggattccaaaagctgcatcatttctttgggcttcatcggcatctcttgatctccccctctctgtgtttacattgtagcacgtattatacgtattgtcaataggcttttaaaaaataaataaggaggaaacgatgaaacgcgcgaaagcatatatgcgtatgtcaacagacaagcaggaacagacgtccgtatcagactaacgcttatccataaatcataataaacgggccggacaaatctataacaccctgcttttattattgatcgccgtcttgatgttgttcattccagttgtgccagacgttctggacgtcgtcgttatcctcgagcatttccagcagcttctccattttcgccacctggtcgggatcgtcgatcgcagtataaacatccggcacctgctcgatttccgccgaaacgaacgaatagcccttggcctccagatcatcgcgcacgccggaaaaatcatccggttcggtggtgatctcgaatacgtcgccgtcggtggagaggaatcgtcgactgcacgatcaaacatcgatcgaagctcttctctctcactctatcca

SEQ ID NO: 1852 - DNA, 966 bp, unidentified
  source 1..966: mol_type = unassigned DNA; note = Bacteriophage uvig_280693 from the Index of /pub/databases/metagenomics/genome_sets/gut_phage_database (ebi.ac.uk)
aagaaaaaacgcaaggtggagggagctgataagcgcaccgccgatggttccgagttcgaaagccccaagaagaagaggaaagtctagttctgcagagggtgatgccattcgacgaacttgtttattgcagcttataatggttacaaataaagcaatagcatcacaaatttcacaaataaagcatttttttcactgcattctagttgtggtttgtccaaactcatcaatgtatcttagtaccgcattcatttcagtgagagcttactcatcagagttcgataaatgctactgtggcacctgcgtcgggaaatgtgagcgtgatacttatcctaaaggttataaggtatggcgctgctcaaaacctaaagagaaatgtcagatgaagtatctgcgggaaacggagctgtttgaagcatcgaaggaaatcttaggccaaaactatcagggcgaggtagtagagaatatagctaaaattgtaatcaacgatgataccatagactttgtattcaaagatgggagggagcagatatggcaacggcagtaagaacgattccggctacattaaacaagttcaattcgacgtccgtatcagactaacgcttatccataggagttgctcgacattccaaatgataggaaacctcgtgttaaatctgaataaaaatagttgtcacgctttagcgcttgccctattgggggggcgctttttgcgttttaataacataatagacatagaaaaagactcggccagcttcttcacaacatgctaccgagtctttttaatttttagtctagttttttcaatagggtttgggtcttatcaccagtgcgatatcgcagcacctcttgcccttggtcagttatatgaacaagctccagcctgtttctgttgtagtgggcatcaaactggaatcgtcgactgcacgatcaaacatcgatcgaagcttatgaagccgaacgtgtcca

SEQ ID NO: 1853 - DNA, 966 bp, unidentified
  source 1..966: mol_type = unassigned DNA; note = Bacteriophage uvig_81612 from the Index of /pub/databases/metagenomics/genome_sets/gut_phage_database (ebi.ac.uk)
aagaaaaaacgcaaggtggagggagctgataagcgcaccgccgatggttccgagttcgaaagccccaagaagaagaggaaagtctagttctgcagagggtgatgccattcgacgaacttgtttattgcagcttataatggttacaaataaagcaatagcatcacaaatttcacaaataaagcatttttttcactgcattctagttgtggtttgtccaaactcatcaatgtatcttagtaccgcattcatttcagtgagagcttactcatcagagttcgcaagggaggtatcacgatgctggaaattgacgaaaaggcgatggcctattgtctgatggaagctctctttgcagcaggggtaatcaacctgcctacctatcagaacttccttcggatgaagcgtgagcaggaggaagaaccgcctgcaaaggcttcgtaaacaacagagaaaggctctggtggaggggattctgccagagcctttctttttgccgcagaaaagagtcagagacagtggaggttaaattttatgagagtagccgtgtacgctcgtgtttcaaccgaacatgaagcgcaaatgacgtccgtatcagactaacgcttatccataaaatgagtggcatgacctcacggtagccgtgggtatccgcacaaaagcttgaccgtaaagtactgtgtcagttgtgccggatgtgtcagaattttcgagaaacctttattatatattatctattctcttttatcctatcgctttatctaagagaaaaaatagagtagaagggataaaaataaagaaatatatagagagtttcataaaaacctgacacatttgacacacccgacacaagacgaagcgtatctgaaaaaattacagttatatattatctttgtagaaagacctgtgagcagggaatcgtcgactgcacgatcaaacatcgatcgaagctatcagcgaataggctctcca

SEQ ID NO: 1854 - DNA, 966 bp, unidentified
  source 1..966: mol_type = unassigned DNA; note = Bacteriophage uvig_296980 from the Index of /pub/databases/metagenomics/genome_sets/gut_phage_database (ebi.ac.uk)
aagaaaaaacgcaaggtggagggagctgataagcgcaccgccgatggttccgagttcgaaagccccaagaagaagaggaaagtctagttctgcagagggtgatgccattcgacgaacttgtttattgcagcttataatggttacaaataaagcaatagcatcacaaatttcacaaataaagcatttttttcactgcattctagttgtggtttgtccaaactcatcaatgtatcttagtaccgcattcatttcagtgagagcttactcatcagagttcgttgagtatgaccgcaaaaatgaccgtatggacgtgcattattacatatcctgaacaccattatgagaagttgacatttggcggacccgacggggagatgggggcctccatgcgctatctctcccagcgctacgccatgccctacaaggaatgtaagggcgcgctgaccgacatcggcactgaggaactgggccacctggaaattgtggctgccattatccaccagctgaccagaggtttaagcgcccaggagctggcagaccaaggcttcggcccctactatattgaccacactaccggcgacgtccgtatcagactaacgcttatccattcgccgtcaacttgaatcttccaccgaaataatagatgaacttcctaagctacctaaaaagtaaaaaaccggcccctgcgccaacaggaaccggccttcacacagattatctcttaccggaaactccaggaaagatataatcagctcgaacacctgaattatatcacccctggagcaccccggtcaagagggtgtattttttatacccatttttcgtaccatataccaatacataccaggagatgataaaatgaccaacctagacatcggagccgcctacattcgcgtcagcactgatgaggaatcgtcgactgcacgatcaaacatcgatcgaagctagctcttaccgcaagttcca

SEQ ID NO: 1855 - DNA, 966 bp, unidentified
  source 1..966: mol_type = unassigned DNA; note = Bacteriophage uvig_517692 from the Index of /pub/databases/metagenomics/genome_sets/gut_phage_database (ebi.ac.uk)
aagaaaaaacgcaaggtggagggagctgataagcgcaccgccgatggttccgagttcgaaagccccaagaagaagaggaaagtctagttctgcagagggtgatgccattcgacgaacttgtttattgcagcttataatggttacaaataaagcaatagcatcacaaatttcacaaataaagcatttttttcactgcattctagttgtggtttgtccaaactcatcaatgtatcttagtaccgcattcatttcagtgagagcttactcatcagagttcgcattacagttatacctgcaaagaagagaagccacagcgcaaagagtacagcgccggcggcagagaagattagactggcagcgtattgtcgagtatcaacagatcatgaggaacaggccagctcatttgagaatcaaaaggaatattacagcaagtatgtagataagcataaagaatatgagctggcaggtatttatgcagatgaaggtattacagcgacaaacacaaagaaacgtgatggatttaaccagatgattgcggattgtgaagaaggaaagattgataaggtgattacaaagtcgacgtccgtatcagactaacgcttatccattcgaagtaagatttttggatggaacaatgaagcgaatagcgataagtgaataagatttcaaattgagccggctggagcagagatgttctggtcggtcttttttctgtcgacattttctcatggaatattaaagatttttaggaggaaatgttatggtagagcaaattatcaatgaaattaagcatgagctggagtctgagttaactcctaagcagttgaacaaggtgacagaggtactttcacagaaattgttgcaagttccggaacttaatgcagaaaatacagatgagcaggatttttggaatcgtcgactgcacgatcaaacatcgatcgaagcttggtctaatctcaccgatca

SEQ ID NO: 1856 - DNA, 966 bp, unidentified
  source 1..966: mol_type = unassigned DNA; note = Bacteriophage uvig_170697 from the Index of /pub/databases/metagenomics/genome_sets/gut_phage_database (ebi.ac.uk)
aagaaaaaacgcaaggtggagggagctgataagcgcaccgccgatggttccgagttcgaaagccccaagaagaagaggaaagtctagttctgcagagggtgatgccattcgacgaacttgtttattgcagcttataatggttacaaataaagcaatagcatcacaaatttcacaaataaagcatttttttcactgcattctagttgtggtttgtccaaactcatcaatgtatcttagtaccgcattcatttcagtgagagcttactcatcagagttcgtcatatgaacgtgaaagcataggcaataaactttttttccgtctacttgtgcttattaggctatccccagatagattgggcatttcaaatacaataattaacgatatttgcaatttaaaagagaaatatcctttcgtcgatttgaaacattatggattcactaaaaattggaaaaatataatagaccatttagtttatgaatatgaaaataataaatgaggtcttttgtgttatttaaggaggttccatcatgaaaacagcagccgcctacatacgtgtatctacagatgaacaaacagagacgtccgtatcagactaacgcttatccatgtatcgtattttcacggcctaatactgctataaaaatttatttccgcctctaattatacgcatttgaagtatggaggtcctcacggcgagctcggagcttcgctgcgctacctttctcagcgctgttccatgccgtacagagaagtagccggaatactcaacgacgtgggtagtgaagcccctaaaatgttccttttaggggctaatgctttttttgacgctttcgccaccgtataactccatttcaaagggagtaagttcaagtacacatcaatgttatctctatcattgataaccattggaatcgtcgactgcacgatcaaacatcgatcgaagctcgcgctcgcacctagtatca

SEQ ID NO: 1857 - DNA, 966 bp, unidentified
  source 1..966: mol_type = unassigned DNA; note = Bacteriophage uvig_55768 from the Index of /pub/databases/metagenomics/genome_sets/gut_phage_database (ebi.ac.uk)
aagaaaaaacgcaaggtggagggagctgataagcgcaccgccgatggttccgagttcgaaagccccaagaagaagaggaaagtctagttctgcagagggtgatgccattcgacgaacttgtttattgcagcttataatggttacaaataaagcaatagcatcacaaatttcacaaataaagcatttttttcactgcattctagttgtggtttgtccaaactcatcaatgtatcttagtaccgcattcatttcagtgagagcttactcatcagagttcgtatgggattccacagaacactttacgtcttgtaacctcgttctaaattaaccgtcttgcatctccacttgcctgcggtatctaactaattaacaaactcgtaaagggctgtggttggagcctccttgcaaccgtcacgcggtaggtgaaaataccaacccacagcatcctatacagtatagcagatttgtcttcgttcttggagaggaacgctaaaaactactacttttatattatacgaggtgttccgtatgaaaaagacgatacgggttattgaacccaccataccgcttctcaaaaagacgtccgtatcagactaacgcttatccataaaccgcacggcaaagaacactgcaacgctacgcatcgaaagaggtggaatgatggcaagagaagtaagagtaatccctgcaagtgtacacaaatttacgaccgttcctttcggctctactgtaaggaaaaaggtcgcaggctacgctcgtgtgtctacagaccttgaagaacagctcaccagctacgaggcgcaggtggattactacaccaagtacattcagaataatcccgattgggactttgttgaggtgtatacggatgagggtatttcagccacctctaccaaacgcagagacggggaatcgtcgactgcacgatcaaacatcgatcgaagctaacgacacgcattactatca

SEQ ID NO: 1858 - DNA, 966 bp, unidentified
  source 1..966: mol_type = unassigned DNA; note = Bacteriophage uvig_178167 from the Index of /pub/databases/metagenomics/genome_sets/gut_phage_database (ebi.ac.uk)
aagaaaaaacgcaaggtggagggagctgataagcgcaccgccgatggttccgagttcgaaagccccaagaagaagaggaaagtctagttctgcagagggtgatgccattcgacgaacttgtttattgcagcttataatggttacaaataaagcaatagcatcacaaatttcacaaataaagcatttttttcactgcattctagttgtggtttgtccaaactcatcaatgtatcttagtaccgcattcatttcagtgagagcttactcatcagagttcgataccggagctggagcagaaggtcagagcgcagcttgaaaaccggcaggacgcaaaccgctggatggaggtcatccgccgctacaccgagatcacggtgctggacgagagcatcctctttgagctggtggaccgcatcgaggtgggcgaggcgcggaaggtcaacggacagcgcatctgcgacgtcaaggtggtctatcgctacgtcggcagcgtggacgacgcgctggcacaggagaggcaggaagcgtatgaaaaagctatataaggtcggcatctactgccggttgagcgtggacgagacgtccgtatcagactaacgcttatccatggaaaaacgtccgggacatcaaaatctattaccgctttgtcggcaatatctgaatggaggtcaaatcatggatagcaacaaaagcaagcgtgtggtagtatattgccgggtagcaacgcaggcgcagcttgacggcgaccacacgctggaagcacaaagcgcccggctgcatgagcaggccgagcggctgggttatgaaatcgtgggagaagtcagcgagtatgaaaaaggaactacgctcgaccgcgacggctggaaaagggcttgtcaggaggcggtggagcaaaaggcggacatcctggaatcgtcgactgcacgatcaaacatcgatcgaagctcgacttaacaactcctatca

SEQ ID NO: 1859 - DNA, 966 bp, unidentified
  source 1..966: mol_type = unassigned DNA; note = Bacteriophage uvig_66023 from the Index of /pub/databases/metagenomics/genome_sets/gut_phage_database (ebi.ac.uk)
aagaaaaaacgcaaggtggagggagctgataagcgcaccgccgatggttccgagttcgaaagccccaagaagaagaggaaagtctagttctgcagagggtgatgccattcgacgaacttgtttattgcagcttataatggttacaaataaagcaatagcatcacaaatttcacaaataaagcatttttttcactgcattctagttgtggtttgtccaaactcatcaatgtatcttagtaccgcattcatttcagtgagagcttactcatcagagttcgccattaccataggaagatttgtttatcataatctactactctatggaataaagttagttaggaggttatatatggacaagaatacatcacaaagtattattgataagattagtaattttaaaatacagctaatcttgaacaagaacttatatattgatgaagtaataacaaaggaatactatgaagttgtagaaaataacctattagaaaagatacatactctatctaatgaattggagttgtatgtataatgatgactctatttgaaataagaaatgctttagctgatggtacttctatgacgtccgtatcagactaacgcttatccatcttttggtacgaactatacatatgataaaagtagaagtagaaagcacatttgaacctataataggtagtgaactccaaagtaaagaattaatagatcatctaaccaaaagtgacgacaatgaaaatatatggaaaagcgaaatatttggtcgcagtctagatgtaatagttcaagaaggaatacaagcaaaattatcaatgatgccagataatgtaagatttaaattatgtcaaaccctaacaaaaataataaataaaggttcttcaaacatgatagctatagtattataaaaagcctaaggaatcgtcgactgcacgatcaaacatcgatcgaagctggtccaatcaacgcaagtca

SEQ ID NO: 1860 - DNA, 966 bp, unidentified
  source 1..966: mol_type = unassigned DNA; note = Bacteriophage uvig_380785 from the Index of /pub/databases/metagenomics/genome_sets/gut_phage_database (ebi.ac.uk)
aagaaaaaacgcaaggtggagggagctgataagcgcaccgccgatggttccgagttcgaaagccccaagaagaagaggaaagtctagttctgcagagggtgatgccattcgacgaacttgtttattgcagcttataatggttacaaataaagcaatagcatcacaaatttcacaaataaagcatttttttcactgcattctagttgtggtttgtccaaactcatcaatgtatcttagtaccgcattcatttcagtgagagcttactcatcagagttcgggggttcgtgtaagtcgcaactggcggaggaggagggattcgaaccctcgtgaccttatacaggccaaacggttttgggacttaaaagaaaaaagcccccgatctgggagctttctcaaccaaaatggcggggtacgtgcgagttagcacgaacacctacgcttacggcatacgcaggggcttcgcgctcctggtcaccgatgtggcgctgtgactatcctatcacgagctgttggcctgggtagatgcgattggggtctgcgattccgttcgctgccgcgatttcctgataggtcgtgcgacgtccgtatcagactaacgcttatccatgtaagcatcaggaacgcctcgggcggtctccgcataaccggcgggcaggtgaccatcatggagacgggcgaggtgtacgccctctttcccggggaggttccagaggaacgcgacgaggcggttgaggttctggaaaaggaggtctcgtcggcgtttagacggtgagacgaaaaagccccgcgcatatgggcggcaaccctgcgcgaggctctgcaaaacaccgaccccgaagggagggtgagcccattatatggcaagcgcggttatctacgcacggtactcctcgtcaggacagcgcgaggaatcgtcgactgcacgatcaaacatcgatcgaagctgcgaatactgtactgagtca

SEQ ID NO: 1861 - DNA, 966 bp, unidentified
  source 1..966: mol_type = unassigned DNA; note = Bacteriophage uvig_388771 from the Index of /pub/databases/metagenomics/genome_sets/gut_phage_database (ebi.ac.uk)
aagaaaaaacgcaaggtggagggagctgataagcgcaccgccgatggttccgagttcgaaagccccaagaagaagaggaaagtctagttctgcagagggtgatgccattcgacgaacttgtttattgcagcttataatggttacaaataaagcaatagcatcacaaatttcacaaataaagcatttttttcactgcattctagttgtggtttgtccaaactcatcaatgtatcttagtaccgcattcatttcagtgagagcttactcatcagagttcgtaagacgagaaaatatacaagggaaagaagccgctaatcaaactcattatgatgtgggcaaaaaggtcagagagactatccaagaacttggtggtacaatgcctgagaaccttcctacgcctaaaaaaggtatcaagcaattggaacgacttgagcaaaaaaaattaaaagacaagtagccatccctgaaaggcttcaaggtattttacacccgaacttccataatctatacagaaaggacaccgatgcaatgaaagtgggagctgcatacataagagtttcatccgacgaccaaactgagacgtccgtatcagactaacgcttatccataagtaatatattccaagcctgaagagtcagtgaaaatatttttttatctgtaatcatacgcatttgacatatggaggtccgcatggtaaatgcgtatgaaaaaagcagggttaattgccctgcttacttatgccaattttatacttttcttttaagcaattcagttttgaattgtgctcaaccttagtgtcattttgtagccttcctacaactattcccggaggcctatctatttctttcgcaaaggttttaatcgcctgctcatcaaaaatatgcattttgagaaagtctctatattttggaatcgtcgactgcacgatcaaacatcgatcgaagctatcaatgatggttcacgtca

SEQ ID NO: 1862 - DNA, 966 bp, unidentified
  source 1..966: mol_type = unassigned DNA; note = Bacteriophage uvig_520747 from the Index of /pub/databases/metagenomics/genome_sets/gut_phage_database (ebi.ac.uk)
aagaaaaaacgcaaggtggagggagctgataagcgcaccgccgatggttccgagttcgaaagccccaagaagaagaggaaagtctagttctgcagagggtgatgccattcgacgaacttgtttattgcagcttataatggttacaaataaagcaatagcatcacaaatttcacaaataaagcatttttttcactgcattctagttgtggtttgtccaaactcatcaatgtatcttagtaccgcattcatttcagtgagagcttactcatcagagttcgtgagagaggaagacttgcatgctgcggtcctcacagcgattaacgatgcctagtctagaaaagcggatatcataccagctctgaaggagaatatcaaagccgttcttgatggcggagttgcggatgccatcgcagaaatcgacgagaagataaaggagaagcagaaggaactcctcgaagccggacatgatgatgccttgattgatagcattggcgcagagatcatcgacctcagagaagaacatcaggatttgatgactaccgcagccaagcatcaggaactccaggagcgtctcgaaggacgtccgtatcagactaacgcttatccataggttctctttggaacagggacagataccgctggcaccgcatctgatgttcccacttttcatgaatgatgacaatttggctgagcgagagcttgcaatattcatggatgtaatccttctcggtaaatgtgacgagctctgggtatttggagatagcatttcagaacgcatggcggttgagattgaagttgcaaagaagcgtagacagccaattcgctattttaattctgctatgcaggaggtgaccgatcatgaatgagattagagcgattcaaacggaatacagaggttaccttttccgggaatcgtcgactgcacgatcaaacatcgatcgaagcttgccacactcttactcgtca

SEQ ID NO: 1863 - DNA, 966 bp, unidentified
  source 1..966: mol_type = unassigned DNA; note = Bacteriophage uvig_380944 from the Index of /pub/databases/metagenomics/genome_sets/gut_phage_database (ebi.ac.uk)
aagaaaaaacgcaaggtggagggagctgataagcgcaccgccgatggttccgagttcgaaagccccaagaagaagaggaaagtctagttctgcagagggtgatgccattcgacgaacttgtttattgcagcttataatggttacaaataaagcaatagcatcacaaatttcacaaataaagcatttttttcactgcattctagttgtggtttgtccaaactcatcaatgtatcttagtaccgcattcatttcagtgagagcttactcatcagagttcgacgaaatgaccgtcactttccttggcggcctgaaattcactgagctgatataggagcaagccatgaagaagacacgctttataccatacggatacaccatgcgaaacggacgaaccgtcattgagcacggcgaagctgacattatccgatatatcttcgacgagtacatcaaaggagcctctctcaaagatctggccgaagaactgacagctcgcaaagtgccttatacggagaagacggaagtatgggataaagcgagaatcgcaagaatcatcgacaacgccaaatacaccggctcgggacgtccgtatcagactaacgcttatccattatctccgcatcatcgctgtccttaaagccctgcgagagcgaggatacattaacgacaaggaatatgccagggcaaagaaatactatcgcaagctcacaggcgccgatattgtgatcgcggattaaaaagatatttcttccgattttcgctggacttgtcaagttccgtagatataatctgtgttgccgacaaaaagaggtttgccccaaaatgtagggcaaacctccctaaaggaaaggaggaagacacatggctcaagcaaagctgatttcgccggtatccaggcaagcatatgagcgggaatcgtcgactgcacgatcaaacatcgatcgaagctcgactgacgataatatgtca

SEQ ID NO: 1864 - DNA, 966 bp, unidentified
  source 1..966: mol_type = unassigned DNA; note = Bacteriophage uvig_148875 from the Index of /pub/databases/metagenomics/genome_sets/gut_phage_database (ebi.ac.uk)
aagaaaaaacgcaaggtggagggagctgataagcgcaccgccgatggttccgagttcgaaagccccaagaagaagaggaaagtctagttctgcagagggtgatgccattcgacgaacttgtttattgcagcttataatggttacaaataaagcaatagcatcacaaatttcacaaataaagcatttttttcactgcattctagttgtggtttgtccaaactcatcaatgtatcttagtaccgcattcatttcagtgagagcttactcatcagagttcgcctgtactggaagatagaaaaatcggataggacaaaaccggaggggcatagagtattagaaaacgcatgttgggaaaaatatgacctctcctaaaattaattttcaagatcatgaaaggataattgcaatgtttaatgaaaaagtactgatgataaagatggcagatatactacagcaagagaatctcatatcatatgatgaacagcagaaaatgaaggcattgattcgtgaaagcgaggaaatttagtcatgcttcgagctgtaatttactgccgatgctcaacagaagaagagtctcagacgtccgtatcagactaacgcttatccatgtattcgcttttgtgggggaggcggtgtgggttattgggagattttagaataaggaggtaaggcacatcagacgtaaaatggtgataactttattgtgagatggggggtattgtgttaaaatataattagagaaaatgtagaggagaatagggagtgatattaaaaaatctgcatattacgaattttaaattgtttgaagagatagaattcgagtttgagtctggatttaatctcatacttggagataatggaacaggtaaaaccacagtgcttgaagctgcaacagttgcagtttcaggggaatcgtcgactgcacgatcaaacatcgatcgaagctcaggaactcctctgctgtca

SEQ ID NO: 1865 - DNA, 966 bp, unidentified
  source 1..966: mol_type = unassigned DNA; note = Bacteriophage uvig_143975 from the Index of /pub/databases/metagenomics/genome_sets/gut_phage_database (ebi.ac.uk)
aagaaaaaacgcaaggtggagggagctgataagcgcaccgccgatggttccgagttcgaaagccccaagaagaagaggaaagtctagttctgcagagggtgatgccattcgacgaacttgtttattgcagcttataatggttacaaataaagcaatagcatcacaaatttcacaaataaagcatttttttcactgcattctagttgtggtttgtccaaactcatcaatgtatcttagtaccgcattcatttcagtgagagcttactcatcagagttcgtggcagaacccatgatcgcagaatctacccttggacgcaaaaaaacggcgtgaccttcacggtcacaccgttctcttccccaaccgcaagacttatagttccttacgactgttaagccttgtcacaacaggctctttcggtgttttgcagttcctctgcacagtagtggtcaaaatggagataatctaaaatgatttcagaaagctcatcactaagtctatcatagaaatcgatgatagacgttgttcaattgaaattactcacttcctagctatcgagccagcaaatctttggtttgccgacgtccgtatcagactaacgcttatccataagacgatttggtctttgagctttgcaaggtctttgaccatgagagctactttgatccgatctttgacccgccggagtcctttttgcaggagtgcgaggcctattggaacagacgaagccccttctgcaaaaccgtggagcgcaagattggaaacacgtggtacaccattgaaaccgtctgtgacggaaccgagccacttaccgccaaggtaaaacggctcattttttctgaccgggaggtggcttgttaatgacagtgacacaaaactatgataatataattccaagcacaccgattctggaatcgtcgactgcacgatcaaacatcgatcgaagcttatccggttatagcctgtca

SEQ ID NO: 1866 - DNA, 966 bp, unidentified
  source 1..966: mol_type = unassigned DNA; note = Bacteriophage uvig_59951 from the Index of /pub/databases/metagenomics/genome_sets/gut_phage_database (ebi.ac.uk)
aagaaaaaacgcaaggtggagggagctgataagcgcaccgccgatggttccgagttcgaaagccccaagaagaagaggaaagtctagttctgcagagggtgatgccattcgacgaacttgtttattgcagcttataatggttacaaataaagcaatagcatcacaaatttcacaaataaagcatttttttcactgcattctagttgtggtttgtccaaactcatcaatgtatcttagtaccgcattcatttcagtgagagcttactcatcagagttcgtttttatcttgccttgcctgccaggtattaacttgcacgcctgccctctcctttatatatatgtatatattatatccgagagccaagaaattatacaatataataaaaggttgtcgcctgtgggtagcaagcaacaacctttgtgtccttgtagagtaaacaaggaatatgaacaccttgttattatagcacttttctttagtttactctactgttttaacaattaaataagaaaggaaactaaagtgttatgtctattatgtcttttaataatattattatctacttaagaaagtccaggacgtccgtatcagactaacgcttatccatatagtggacgcactaaaaatccatttaatttggaagtcttctttaaactatagaccacaaacgccctaaatttgggcgtttgtatctgctaccaacatagtttacatactccattattccatatattagtataatttctgtatataccaacaagtgtataagtctttgtgtttcttttctctttgttgcctatgctgttattgtcacaatatttaagattaatgctctcaccaatctcaccgttataaccgagtgtcagaagggtgttccagtccattgctatctcaccactattttctgggaatcgtcgactgcacgatcaaacatcgatcgaagctacgacacgatcattgactca

SEQ ID NO: 1867 - DNA, 966 bp, unidentified
  source 1..966: mol_type = unassigned DNA; note = Bacteriophage uvig_368726 from the Index of /pub/databases/metagenomics/genome_sets/gut_phage_database (ebi.ac.uk)
aagaaaaaacgcaaggtggagggagctgataagcgcaccgccgatggttccgagttcgaaagccccaagaagaagaggaaagtctagttctgcagagggtgatgccattcgacgaacttgtttattgcagcttataatggttacaaataaagcaatagcatcacaaatttcacaaataaagcatttttttcactgcattctagttgtggtttgtccaaactcatcaatgtatcttagtaccgcattcatttcagtgagagcttactcatcagagttcgtcacaaataagatacaagagctttcggggcttgtaagggataaagagcggttatccgaaatgaagcccgcaaatgaatttttggaaaaggtttcacgatataaccctgaaaatgaaatcagtaaagggcttattgccgatttggttgaacggattgagtttgatgacaacaaaaatataaccgttaaaatgaagtatagagatatattccaagaccttataagctctgcggaaaattcggaggtgtaaaaatgtcagtaataaatactcttcaaaatatccttgcctattatataagaatgacgtccgtatcagactaacgcttatccatcgtattatacatttttagatgagaacttatataatgaggtgaaaggaatatgaaaaaaaacagcttaataatacttttgattttatgtgcgacggtgctttgctcctgcaaaacgcggcaaagcgaaaaagcaatgaacagcagtttggaaactgcttcaaaaactgaggatgtaagcaccgccgcaatgtctgaagcttcggagaataaagaaacgaacgaaacgcagaaaatgccgtcgcagccacaggaaataaccgaaaacatcagcaaaaattcaaagcccgaaaacacaagagcggaatcgtcgactgcacgatcaaacatcgatcgaagctactctgccgtaacacactca

SEQ ID NO: 1868 - DNA, 966 bp, unidentified
  source 1..966: mol_type = unassigned DNA; note = Bacteriophage uvig_355166 from the Index of /pub/databases/metagenomics/genome_sets/gut_phage_database (ebi.ac.uk)
aagaaaaaacgcaaggtggagggagctgataagcgcaccgccgatggttccgagttcgaaagccccaagaagaagaggaaagtctagttctgcagagggtgatgccattcgacgaacttgtttattgcagcttataatggttacaaataaagcaatagcatcacaaatttcacaaataaagcatttttttcactgcattctagttgtggtttgtccaaactcatcaatgtatcttagtaccgcattcatttcagtgagagcttactcatcagagttcgacctgctgctttacaatcgacgtcgtatggcggaaaaggaagtgcaagccgagcgcatcgcacgtagtgcggtgtaggtgtaaagcgaccggagaaggcaataattgccttctccggctttcttttccgtgttgttttttcacagcacatgatgtacaatattgtctgtaaatagttttatacgagagaatgtgattgaaaacggaggaatatatgggaatttacttcaatcgagaggtggtgagttgggatgactgaacacattgatattgccggttactgccgcatttcagtagacgagacgtccgtatcagactaacgcttatccatcgtatcctccggcggcgtgtgctcctgcgtctgagtggaggcgtcctccgtgatggtggggataaacgccttggccagccgccccttgccacgctgcttgatatagaagtacccgatggtgctgaacaccaccgcgccgatgaaattgacgaacagatccgccatggtgtcgtacaggccgatatccagatacccatcgaagcccaagtcctgcccgttgacggccacggaatggatgccgtcgatggtgacgggaatgttgcggttggtgggatccagcatgacggaggtgatggactgggaatcgtcgactgcacgatcaaacatcgatcgaagctgattcgtatacgtacgctca

SEQ ID NO: 1869 - DNA, 966 bp, unidentified
  source 1..966: mol_type = unassigned DNA; note = Bacteriophage uvig_345767 from the Index of /pub/databases/metagenomics/genome_sets/gut_phage_database (ebi.ac.uk)
aagaaaaaacgcaaggtggagggagctgataagcgcaccgccgatggttccgagttcgaaagccccaagaagaagaggaaagtctagttctgcagagggtgatgccattcgacgaacttgtttattgcagcttataatggttacaaataaagcaatagcatcacaaatttcacaaataaagcatttttttcactgcattctagttgtggtttgtccaaactcatcaatgtatcttagtaccgcattcatttcagtgagagcttactcatcagagttcgataaggaagcaataaatcagtttgagttagcggttgaaacctatgatttctaatgttctaaccgttgtgtaaatcacatacactaagttaggaacatactcgtctgtatatttttaatataaatgataaagacaacaaaaaaaagactaccaattaaggtagtcttttattattttatttctaacacttgtcctactttgattatgtaagggaatttaatattattcttttttgctaagtcagtccattttactccatactttttagctatcttaattagataatcgcctttttgtacaggacgtccgtatcagactaacgcttatccatttagagccatatatttgttttatctttctttaattcttttacttgctccttagtgtaaaaatatttttcttccttgaatattttgttgcaagtatcataaatctgttttaatttttctttcgttaaaggttttttgttaaatgtaatattcattttgtaccccctttaatgaattgtatgtattttataagttttcaattacttaaattaagtttactatctgaaacataattataggagtggtaaattaatgcaatcctcagaagaagctataaaatttttagatgaataccttatataggaatcgtcgactgcacgatcaaacatcgatcgaagcttcatgagcttaacgtgctca

SEQ ID NO: 1870 - DNA, 966 bp, unidentified
  source 1..966: mol_type = unassigned DNA; note = Bacteriophage uvig_585265 from the Index of /pub/databases/metagenomics/genome_sets/gut_phage_database (ebi.ac.uk)
aagaaaaaacgcaaggtggagggagctgataagcgcaccgccgatggttccgagttcgaaagccccaagaagaagaggaaagtctagttctgcagagggtgatgccattcgacgaacttgtttattgcagcttataatggttacaaataaagcaatagcatcacaaatttcacaaataaagcatttttttcactgcattctagttgtggtttgtccaaactcatcaatgtatcttagtaccgcattcatttcagtgagagcttactcatcagagttcggtactatatcttgctgcatgcctttaccagtatgcggtagataacgtccagtatagatagattgtcgcatttttctaacaattcgatgattttgtctgtgtattctgcccggctcatactgcgcttccttcctgatcgaacacgatcaaaaatatccttaacgcattatatcaaaataatttatgtatttcgagagaaaaatgtcgaatataaataattttttagagaattatagaaatggggatttggaatgttaaaaagtgatattatgacagacgaaaaatggctcatgtatttgcggacgtccgtatcagactaacgcttatccatacctcggaaagaataagattgacattcagttggatatatacttgaagctataatttttatggcttcaatccatatgatgtgtatgcaggttcatacgaatacacatcatatagacattgagaaacgcatgaataaagggactgaccgatttccggcagtcccttattccatgtcataccagcgaatttacctttgcctgtacttccgcgtagtcgtacccggctgcggcaagccgctttttacgatcggctccgtttccccattttccggcgaggacttctttcgcgatctcgtccagcgggaatcgtcgactgcacgatcaaacatcgatcgaagctcacgaagaagtctccgttca

SEQ ID NO: 1871 - DNA, 966 bp, unidentified
  source 1..966: mol_type = unassigned DNA; note = Bacteriophage ivig_2445 from the Index of /pub/databases/metagenomics/genome_sets/gut_phage_database (ebi.ac.uk)
aagaaaaaacgcaaggtggagggagctgataagcgcaccgccgatggttccgagttcgaaagccccaagaagaagaggaaagtctagttctgcagagggtgatgccattcgacgaacttgtttattgcagcttataatggttacaaataaagcaatagcatcacaaatttcacaaataaagcatttttttcactgcattctagttgtggtttgtccaaactcatcaatgtatcttagtaccgcattcatttcagtgagagcttactcatcagagttcgcatattctattgatgatgaagatgatgaagaatagtaactgttgctttttcatatgtagaacattagcaaatagggtaatataataaaagcccctgtgctaccaacacaagagctttaccgatatctaccaagccggagcctgatacaatacccaaacacattgcatattgtatcatataatgcgcccggcttgcaagtaggcgtattttttatacccttttttcatacttttaagaaggaggatgcaatatgaacagttatgatatctcattcaggccggaagaggttatacagtatctgacgtccgtatcagactaacgcttatccatgaggtggatggtattctcctccgttcaggcttgagattaagttcagattctgaaatcaggtaaaaaaaggccttcaatcccagcagcagagccacagttatcaaatctgtgacatacggttttttgcctgttcttacctgtttttggtgtctttataacggcttattcatgtactcatctttgaactgctcatagtcttctgcgaacctctcagccataagcgctttattgacttcgtatcttaatgaatactgagcgtaccaccagtctatctctgactgctccggtatacgtccaagtggaatcgtcgactgcacgatcaaacatcgatcgaagctttacagcgcaggtgacttca

SEQ ID NO: 1872 - DNA, 966 bp, unidentified
  source 1..966: mol_type = unassigned DNA; note = Bacteriophage uvig_136571 from the Index of /pub/databases/metagenomics/genome_sets/gut_phage_database (ebi.ac.uk)
aagaaaaaacgcaaggtggagggagctgataagcgcaccgccgatggttccgagttcgaaagccccaagaagaagaggaaagtctagttctgcagagggtgatgccattcgacgaacttgtttattgcagcttataatggttacaaataaagcaatagcatcacaaatttcacaaataaagcatttttttcactgcattctagttgtggtttgtccaaactcatcaatgtatcttagtaccgcattcatttcagtgagagcttactcatcagagttcgtcaacaatatcaaattattcggtggtggagagggaacatattacgtggcttgtttcgcacctgatgatgtgacaacgttcacgcaatatcactacggcaaagcattagaaaagttctggattaaatataacatctaaataaaacaaaatcgcccctaacggagcgattttgagtggttggattgaaaaacaatacaataatggtcaaatgtattgtaccatatccagccactttttgcaaggagacaattatggtactaatgtatttacgaaaatcccgtgctgacaatccgtatgagacgacgtccgtatcagactaacgcttatccatgtactcgtttcgggcaacatcaatataggttagatatttttttgaaagattaacctatatcatttaggtactgacgaacgtgtaccatgatgatatacgtaaatggcaaataaaaaaacagggctgattgccttgcttttttattgttgatacttcattaaaaattgtttcaactcacaacaccatataacgtgacttggcttctgccatttttttcaacaatacacaatacattgattacgtttcaactcacaatgccgtaaggcatgactatctgtttaccacgctgtatggtgtggcggaatcgtcgactgcacgatcaaacatcgatcgaagctttgtactgttcacagcttca

SEQ ID NO: 1873 - DNA, 966 bp, unidentified
  source 1..966: mol_type = unassigned DNA; note = Bacteriophage uvig_469171 from the Index of /pub/databases/metagenomics/genome_sets/gut_phage_database (ebi.ac.uk)
aagaaaaaacgcaaggtggagggagctgataagcgcaccgccgatggttccgagttcgaaagccccaagaagaagaggaaagtctagttctgcagagggtgatgccattcgacgaacttgtttattgcagcttataatggttacaaataaagcaatagcatcacaaatttcacaaataaagcatttttttcactgcattctagttgtggtttgtccaaactcatcaatgtatcttagtaccgcattcatttcagtgagagcttactcatcagagttcgaccggcagcggaacggtgtagactttgatctggctgtattcatgcggctttgattttctcatgccgcatatgtacaccatgggtatgtaggttcacacacctacccatcatgtacatatgccaagagccgttacagggcctgcttttgcggtcattatagcgcctggatgcagcagcgtcaaggcgcaaaaagaggggcacccggctgggtgcccctctttcgtctgcatcattttcgtgaggtcacgaaaatggtctatacaaggtcgtccatgctacagcccaatgcctgggccatctgacgtccgtatcagactaacgcttatccatgccgggcaggcagaggcagacacccatctgatggaggagctgcggaccaggattgcaaagcaggaatccctgatgaagtggaaaaagcagatcattgcctttttggctgtgatcgtctgcgtcctgctggccgtgctcctggcggcctttatcgtggatgagttgaacgacaatgtaggatttataaatataagcagataaacagagtgtgaaaaagctgtggaaaaccacagccaagggggaagatggaatgatagagagaagcggaacatggttaatgtatttgagaaagtcaaggcaggaatcgtcgactgcacgatcaaacatcgatcgaagctcgagcacgtgcataggaata

SEQ ID NO: 1874 - DNA, 966 bp, unidentified
  source 1..966: mol_type = unassigned DNA; note = Bacteriophage uvig_155463 from the Index of /pub/databases/metagenomics/genome_sets/gut_phage_database (ebi.ac.uk)
aagaaaaaacgcaaggtggagggagctgataagcgcaccgccgatggttccgagttcgaaagccccaagaagaagaggaaagtctagttctgcagagggtgatgccattcgacgaacttgtttattgcagcttataatggttacaaataaagcaatagcatcacaaatttcacaaataaagcatttttttcactgcattctagttgtggtttgtccaaactcatcaatgtatcttagtaccgcattcatttcagtgagagcttactcatcagagttcggctggaagaaaggcgaaaactcttataatatcagtgtgcagctgcggttgtgatcccttacgccgcacatgcacatgaagggtgtgttagctcgtccgcctcagctcatctacacacccatgatatacacattattatggaggtgtgaagcaatgaaaaaacccaggaatgacaaggaaaagcggccgctcaggcggttgactatccgggagaagctggagctgatgaaacagatggagcagcggaaccgggaacgggtggaggcgtacaagaagaatcggaaatgaaaaatggccgggggacgtccgtatcagactaacgcttatccatgcctcgcgcgggtgtacgcgcacgcgctcccgcgctcgcctatgtacaattttctctattcaattagttaggtgaatttttgtagtcatttgtagtcaagccgaaaacccgttgattttcctcgctttttctgttaacagacttgactacaaaacgggattttgactacaggattttgttacccagttattaccagagaaggaaaaacctgtaaataaggccccgcgaagggcctggaaaggggaacgagatgccacaacatcacatcatgtatcaacgtaaatcaagacaagacgatccggaatcgtcgactgcacgatcaaacatcgatcgaagcttcttgtccggaccgcgaata

SEQ ID NO: 1875 - DNA, 966 bp, unidentified
  source 1..966: mol_type = unassigned DNA; note = Bacteriophage uvig_597316 from the Index of /pub/databases/metagenomics/genome_sets/gut_phage_database (ebi.ac.uk)
aagaaaaaacgcaaggtggagggagctgataagcgcaccgccgatggttccgagttcgaaagccccaagaagaagaggaaagtctagttctgcagagggtgatgccattcgacgaacttgtttattgcagcttataatggttacaaataaagcaatagcatcacaaatttcacaaataaagcatttttttcactgcattctagttgtggtttgtccaaactcatcaatgtatcttagtaccgcattcatttcagtgagagcttactcatcagagttcgcggacggaggagcggaattcctgttcaggaacggagcggtaataacggaataactgtaaaaaagcaaggcccggaaaggaaaaatccgggtcttttcttgcatctttattcacgaagagctgccgttcgcgcgtaaaaaatgcccgttacacgatagcccctgcgtccacacgatagccccattctacacgatagcttttcgggatttcgctccaaaacggcaaaacgagccatttgcaaaccgatttgaggcttcaaccggaaaacaaaaatgcaccctctgttttcaaaaagccaatagacgtccgtatcagactaacgcttatccattagtatgcgaacgacacagggataaaaaagttcaggtacactatatcaatattcgcagcgacgtcgcttatgattgtgatatggatggcgaaaagattgtagaaaacaaccctcttagatatagaacaaaggaaaaaagcgcagggtcgcaggttacgcgagggtatcgaccgacagcgacgagcagctgacctcgtatgaggcacaggtcgattactacactaactatatcagcaggaaccccgactggatgttcgctggcgtctataccgacgaaggcatctccggcctcaacacccgggaatcgtcgactgcacgatcaaacatcgatcgaagctacgctgaggcttaagcaata

SEQ ID NO: 1876 - DNA, 966 bp, unidentified
  source 1..966: mol_type = unassigned DNA; note = Bacteriophage uvig_181332 from the Index of /pub/databases/metagenomics/genome_sets/gut_phage_database (ebi.ac.uk)
aagaaaaaacgcaaggtggagggagctgataagcgcaccgccgatggttccgagttcgaaagccccaagaagaagaggaaagtctagttctgcagagggtgatgccattcgacgaacttgtttattgcagcttataatggttacaaataaagcaatagcatcacaaatttcacaaataaagcatttttttcactgcattctagttgtggtttgtccaaactcatcaatgtatcttagtaccgcattcatttcagtgagagcttactcatcagagttcgattatatctccgaaacaagacagggcgtggccgtggaatatatccccgcataacaaaggagagcaggcaaaatgcctgctctccaaaagaagcataaaaaatcgagtggtcataacatcaaatccgttatgaacactcgatatggttgcgggggaaagtaacacagattaccaacgatatttcccggagatccttttcaggttcatatcaggctgatttttgacattgcacaaacggaaaattcattcccgttttatacagggaagatgtcttttgcctgatccagcgaaaagcctaaacgacgtccgtatcagactaacgcttatccatactgaccgaacagcttgccgccagccgggaaacggagtcctccgtggacgcatggctggacatgatgcaggactacgcccagcttgaggaattagaccgtcccacgctggttcgtctgattcagaaaattgagatcagcgaacgctataccgtggacgatcacgaggaacgcgacattcacatctactacaattttgtcggatatatcgaagcataaagcgtcattctttattcgaggttgactaacgagatgtacgcccgggacatcagccgcaaggtgcggtctgcccatcgtatccgggaatcgtcgactgcacgatcaaacatcgatcgaagctgccgaggttggccagcaata

SEQ ID NO: 1877 - DNA, 966 bp, unidentified
  source 1..966: mol_type = unassigned DNA; note = Bacteriophage uvig_222038 from the Index of /pub/databases/metagenomics/genome_sets/gut_phage_database (ebi.ac.uk)
aagaaaaaacgcaaggtggagggagctgataagcgcaccgccgatggttccgagttcgaaagccccaagaagaagaggaaagtctagttctgcagagggtgatgccattcgacgaacttgtttattgcagcttataatggttacaaataaagcaatagcatcacaaatttcacaaataaagcatttttttcactgcattctagttgtggtttgtccaaactcatcaatgtatcttagtaccgcattcatttcagtgagagcttactcatcagagttcgttgaggatatgaaggaaatctgtagtattaataattatgtgatagaatactaaaacaaaagaaggtgtgcattttgacacaccttcataattatatttagttagattttttacttttgttataaatagtgattccccaatatattaagtatggcattaacaatgtatataatataaattcagagccatcataatctcttaaatctgtggatacaaatgggaatagccaatcacttgcatctctatttttatcataaaatattaaacatatcatattaataacaaaccaaaccatatagtggacgtccgtatcagactaacgcttatccattgagcaggaagatactgctgtatattctatagaggttgataaggaagatataaaggctgtattcttatctaggaatgaatttgaagctatatgttttggcggtgatgaagccactttggttacagatgaaccaacagaactatatactaattatatggaacgaaagaagcaggaactagatgaatttatgaataagtaatgaatgaaggggaatggggtaatattttaagctgatagtgctttaaaccataaattcactatatttgctgcaaatgtaaccaataaatttgaacgagcaatggaatcgtcgactgcacgatcaaacatcgatcgaagctgctctatgcatccgtcaata

SEQ ID NO: 1878 - DNA, 966 bp, unidentified
  source 1..966: mol_type = unassigned DNA; note = Bacteriophage uvig_211114 from the Index of /pub/databases/metagenomics/genome_sets/gut_phage_database (ebi.ac.uk)
aagaaaaaacgcaaggtggagggagctgataagcgcaccgccgatggttccgagttcgaaagccccaagaagaagaggaaagtctagttctgcagagggtgatgccattcgacgaacttgtttattgcagcttataatggttacaaataaagcaatagcatcacaaatttcacaaataaagcatttttttcactgcattctagttgtggtttgtccaaactcatcaatgtatcttagtaccgcattcatttcagtgagagcttactcatcagagttcgtaaataagaagagagaaatggtgagaaagattcggaaagaaaaatcaaaataatatagaaaaagtcgttcttgcctttgatagactggaacgactaaatactatgttattatgattgcagtatatttttccaatcttcaattttgtttactattttatatctattatttcctgaagttgattctgctgtatatgttgaaatatcaatggtggagaatttttctttaaatactttggctgcggcttgaccgttgaatataatctttttaatatttggatggtcatttaataattcatctaagacgtccgtatcagactaacgcttatccattatgactgcctttttggagattcggatgcacaggcttatgtagcttcaaatagttttgctcaaagtaagatatgttttgacatcattagaaattcattgaaagcacttgaccctaagttgtcacatttccgattgaatagggaaataatctataatttaatgccgaataggacttcattcgtaagatgtttgtctacgagtgctgacaggttagatggtcttaatgcttcaatggtaattttagatgaatcaagcaattgaagctgatgacagcataaactgtgtctatgcttgggagatggaatcgtcgactgcacgatcaaacatcgatcgaagctccgcacagagtacctcaata

SEQ ID NO: 1879 - DNA, 966 bp, unidentified
  source 1..966: mol_type = unassigned DNA; note = Bacteriophage uvig_473863 from the Index of /pub/databases/metagenomics/genome_sets/gut_phage_database (ebi.ac.uk)
aagaaaaaacgcaaggtggagggagctgataagcgcaccgccgatggttccgagttcgaaagccccaagaagaagaggaaagtctagttctgcagagggtgatgccattcgacgaacttgtttattgcagcttataatggttacaaataaagcaatagcatcacaaatttcacaaataaagcatttttttcactgcattctagttgtggtttgtccaaactcatcaatgtatcttagtaccgcattcatttcagtgagagcttactcatcagagttcgaataaaactattaatatggtagtaactaaagacttatctagactcggaagagattatattaaaacaggacattacatagaaaattactttccacagaacaatatcaggtatgttgcaataacagatggaatagatacttatattgatagcaccaataacgatataacgccttttaaagcaataatgaacgattattatgctaaggatatatcaaagaaaattagaagtgtttataaggaaaaacaaaagaatggcgaatatctatgtagtattccagcatatcggatataaaagacatccgacgtccgtatcagactaacgcttatccatttaatgaaaacttagatgaatttatcaaagttgaagaattaataaataagtaaaattaaaaaaacaaagttgtatgaagctctttaaaaactcaatagatacaaaatgaaagaataaaatttgattctttatataagatatggtaaaatgataatagaactatttttgaaaaagcctatacaattaaggaggatgcatttatgattaaaaaattttttaaggctttggtaaatggagtacggaattgtgattgtcttagatgtcttggtatagtatttctaatgtttggctggtcgccaaggaatcgtcgactgcacgatcaaacatcgatcgaagctgcacataccagtcggtaata

SEQ ID NO: 1880 - DNA, 966 bp, unidentified
  source 1..966: mol_type = unassigned DNA; note = Bacteriophage uvig_73839 from the Index of /pub/databases/metagenomics/genome_sets/gut_phage_database (ebi.ac.uk)
aagaaaaaacgcaaggtggagggagctgataagcgcaccgccgatggttccgagttcgaaagccccaagaagaagaggaaagtctagttctgcagagggtgatgccattcgacgaacttgtttattgcagcttataatggttacaaataaagcaatagcatcacaaatttcacaaataaagcatttttttcactgcattctagttgtggtttgtccaaactcatcaatgtatcttagtaccgcattcatttcagtgagagcttactcatcagagttcgagatttggaagggtagccgcaggaatagatgattatatagaagaatattttcaaataaaaggaataaggtttatagcagtaaatgaaaatttggattctaaaacatcagctaatttccaagatgatgtaaaaattagagctttttttaatgaatggtttttaagagattgttctaagaaaacgagagacggcaaacattctaaagcagtagatggaatggtaatggcaacatatccaaagtatcggatacatgaaagatcctgcaaacaaaaatcattatataccaaatgaggaaactgcgacgtccgtatcagactaacgcttatccatatgaaagcagtaatagtcaaaaaaataatgttgttactatgataacggcataattttttgaatttttaaaatttatcataacggacaatgatgacggtaattattttgcttattttggcaacaatttcaatacaaacactaacaaatacaggattatttggaaaggcaaaagaagcaacaaaaaaatatagtgaagcagaagaaaaagaaaaaattcaaatggagttatattatgctcaaataaataaaagcacaaacggaacatcaacaaatcaaataggagaacaattatatgataaaggaatcgtcgactgcacgatcaaacatcgatcgaagctagtcctagcggtacaggata

SEQ ID NO: 1881 - DNA, 966 bp, unidentified
  source 1..966: mol_type = unassigned DNA; note = Bacteriophage uvig_154548 from the Index of /pub/databases/metagenomics/genome_sets/gut_phage_database (ebi.ac.uk)
aagaaaaaacgcaaggtggagggagctgataagcgcaccgccgatggttccgagttcgaaagccccaagaagaagaggaaagtctagttctgcagagggtgatgccattcgacgaacttgtttattgcagcttataatggttacaaataaagcaatagcatcacaaatttcacaaataaagcatttttttcactgcattctagttgtggtttgtccaaactcatcaatgtatcttagtaccgcattcatttcagtgagagcttactcatcagagttcgcgagcacacgcatggaatgaatctgccactcggtacgggtatcggtgggacgaccatgacaatccagcccaccttcataacagatgccaatcgaacgagcgttatagccgcgcgcatgagctccgatacgttctatttcacgggtagacttgatgtcgccattttttcggatataaacgtatatatataaattaggtacattaaaactttatctttatatttgcatcataatcttaaaaatcaacgagttatggcaaaatgtatattattggtaagagtttcaacagaatctaaaaagcagacgtccgtatcagactaacgcttatccattgataaaacaaaatgttgaagctaaaagaagaagaaagagcaagcccgaataaatttcgggcttttttatgttatgtaaggaaatatttttatctttgtggcgttcgggaaacatcgaacattcgttataagacatttaacgctgatttgtagttaaaaacagccaattttgaactatatgaatcaaagatgcgttgattgtctgcatctgtgtttatacgtatgtattagatataggtgcagacttactgcattttgattcgggtattggctgtaccttaactacaatgcattgtaagtggaatcgtcgactgcacgatcaaacatcgatcgaagcttcctcgtgttcagacggata

SEQ ID NO: 1882 - DNA, 966 bp, unidentified
  source 1..966: mol_type = unassigned DNA; note = Bacteriophage uvig_578394 from the Index of /pub/databases/metagenomics/genome_sets/gut_phage_database (ebi.ac.uk)
aagaaaaaacgcaaggtggagggagctgataagcgcaccgccgatggttccgagttcgaaagccccaagaagaagaggaaagtctagttctgcagagggtgatgccattcgacgaacttgtttattgcagcttataatggttacaaataaagcaatagcatcacaaatttcacaaataaagcatttttttcactgcattctagttgtggtttgtccaaactcatcaatgtatcttagtaccgcattcatttcagtgagagcttactcatcagagttcgaatgggatttcgctgggctttattatgacgaaggtgtcacaggtacaaaaaaagaaaaacggcctgagttgcttcggatgattgccgactgtgaaaacaagaaaatagacttcattgtaacaaagtctatcagcagattcgcccgtaacactaccgactgccttgaactggttagaaaactgcttgacctcggcatttttatttatttcgagaaagagaacctcaaacagggtcaatggaaagcgaactcatgctgtcaatcctaagtggactggctgaaagtgaatcggtttccaacgcgacgtccgtatcagactaacgcttatccatttgggttcgaattaaaatgcggcattacactgaaagaaaggctggtgagataaatgagccacacaccatttggctaccatattaaaaacggaaaggctgttattgatatccaagcagccgagcagataaaaaccttgtttgagtcctatttgtccggagattcgttagcaacagctgcaaagaaggcaggcatcaaagcctttcacgccggtatcggcagaatgcttcgtaatatgcgttatcttggcgacgactattaccccgccataatcgactcggacacgtttacagccgctgaagggaatcgtcgactgcacgatcaaacatcgatcgaagctcaccactctggaatccgata

SEQ ID NO: 1883 - DNA, 966 bp, unidentified
  source 1..966: mol_type = unassigned DNA; note = Bacteriophage uvig_175345 from the Index of /pub/databases/metagenomics/genome_sets/gut_phage_database (ebi.ac.uk)
aagaaaaaacgcaaggtggagggagctgataagcgcaccgccgatggttccgagttcgaaagccccaagaagaagaggaaagtctagttctgcagagggtgatgccattcgacgaacttgtttattgcagcttataatggttacaaataaagcaatagcatcacaaatttcacaaataaagcatttttttcactgcattctagttgtggtttgtccaaactcatcaatgtatcttagtaccgcattcatttcagtgagagcttactcatcagagttcgtattaaattcatagtcataggggttggaacaagcccaactacacctgatattgtcctgtaattaacaggtatgttctcatagtgtatttagggaacaaatatcagcattacatttttattttcggccatcgcctcaccgttttggggtggactcgcagcttggcgttaccggccactccgccctgaatatgtggtccggtattgtcttcagtataatgggttcctaaacacatcattttaggtattgaatatgagacgggcaatcagctacatcagattttcaagtgaacgacaactaaagacgtccgtatcagactaacgcttatccattttctgaagtcactgagaggggtttaatagatgttgatgaggttatcatatagttgagattctatcgtcagtagcgcttgttaggattcacactaaacttccgtaaagcattacccgacttaagcacctttgaagcttgctcattagctgaggctgtgaaggtgctctcaccatttttaacgctaacgctcttagagcacgttacacgggcttttagcgcttcatctgataactcacttgccgaatagctaaaaagctctttacaggtcagcatagggcttccaaggctcgttgtagtgtggaatcgtcgactgcacgatcaaacatcgatcgaagctagcttggagatgtactgata

SEQ ID NO: 1884 - DNA, 666 bp, unidentified
  source 1..666: mol_type = unassigned DNA; note = Bacteriophage uvig_574139 from the Index of /pub/databases/metagenomics/genome_sets/gut_phage_database (ebi.ac.uk)
aagaaaaaacgcaaggtggagggagctgataagcgcaccgccgatggttccgagttcgaaagccccaagaagaagaggaaagtctagttctgcagagggtgatgccattcgacgaacttgtttattgcagcttataatggttacaaataaagcaatagcatcacaaatttcacaaataaagcatttttttcactgcattctagttgtggtttgtccaaactcatcaatgtatcttagtaccgcattcatttcagtgagagcttactcatcagagttcggacgtccgtatcagactaacgcttatccattttcagaggcttctctaccgatgtcggtaagcaggcccttcaactcagcgtagggcatagagtaccgctggctgagatagcgcagagaagcgcccaattcgccgtccgggccaccggatggtaacagactacgattaggggcaaaaattattccagcatgagccggtagtggatggtcaggaggttctgcgccttgtcccatgtgatgcggtcgatgatggatcgggcggcgttgcagcgctgctccagcgaggcgtcctcgttctcgatgactgccagggcgtcgctgatggcggagcgggaatcgtcgactgcacgatcaaacatcgatcgaagctccttacgactgagcttgata

SEQ ID NO: 1885 - DNA, 966 bp, unidentified
  source 1..966: mol_type = unassigned DNA; note = Bacteriophage uvig_189213 from the Index of /pub/databases/metagenomics/genome_sets/gut_phage_database (ebi.ac.uk)
aagaaaaaacgcaaggtggagggagctgataagcgcaccgccgatggttccgagttcgaaagccccaagaagaagaggaaagtctagttctgcagagggtgatgccattcgacgaacttgtttattgcagcttataatggttacaaataaagcaatagcatcacaaatttcacaaataaagcatttttttcactgcattctagttgtggtttgtccaaactcatcaatgtatcttagtaccgcattcatttcagtgagagcttactcatcagagttcgtgtttgagcttaggtgcggtataaaactgagggaggaaattatatggaactgagaacgcttctttacggatataataaacatctatttcggtttttaattaacgaaacggaaagtgcggttgtaagaggtatttttgatgagtacataagcggcggaacattacagaaaatcgccgaccgcttaactgccgaaaacaccgtatattacaaagataaaacagtttggaataagcatatggtgcgacgcatccttgaaaatccgcactatacgggagatgatgagtaccccgctatcgtagagacgtccgtatcagactaacgcttatccatgacaatgctccgaacaaagaagcaatttatataagcgcctacacgattattaaaaaaatgctgtcggacggagttattaacgaaagggtttttatgaggctcaacgagaaaatagcaagcaggcagaattgcccgtcattttctcattaacctaaaatgccggggttccggcattctacataatcgcacatttcacaaatatcggattatgccgtacaattttgaaaagaaacatcagggagtgaaacaaatgcaggaagcaattaaaaaggatgtaaagataattcgtccgacaaagggggaatcgtcgactgcacgatcaaacatcgatcgaagctatgatctcgtagcggacata

SEQ ID NO: 1886 - DNA, 966 bp, unidentified
  source 1..966: mol_type = unassigned DNA; note = Bacteriophage uvig_296776 from the Index of /pub/databases/metagenomics/genome_sets/gut_phage_database (ebi.ac.uk)
aagaaaaaacgcaaggtggagggagctgataagcgcaccgccgatggttccgagttcgaaagccccaagaagaagaggaaagtctagttctgcagagggtgatgccattcgacgaacttgtttattgcagcttataatggttacaaataaagcaatagcatcacaaatttcacaaataaagcatttttttcactgcattctagttgtggtttgtccaaactcatcaatgtatcttagtaccgcattcatttcagtgagagcttactcatcagagttcggacgcagtttaccaatgcgctcgttgggatcgagggaaacgttacccagcgtcggctcaaggtcgccgccgaggatcttcataaaggtggatttaccactaccgttcgcgccaatcaggccgtaacggttgccgccgccaaatttgacggaaatgttttcaaacaacggcttactgccgaactgcatggtgatgttgttgctaaggagcaaaattgatactctctactaagtgattgaaaggattagaatatgcaaaagcaaaacgggttagcttacagttacatacgattttcgagcaagacgtccgtatcagactaacgcttatccatgcaaaaaactactggaatacatgaacgctgagaaagagcaattggataactaactacaaccataaatgtaacaatacgtattgcatttaactaaatgttaaccacgttaatattttacgtagcatccttgacaagctaacataagacaaaatcagagcttcgtgttttaatctattgagtttcttactcattaacttcaaaaggaatcgaaatgaaattaccaattgttgatgtatttgagaacccatacgaatcctggacctgcagaaaggccagtcaggaagaaatgatggctgtctaggaatcgtcgactgcacgatcaaacatcgatcgaagctgtcggcaaggtgctgacata

SEQ ID NO: 1887 - DNA, 966 bp, unidentified
  source 1..966: mol_type = unassigned DNA; note = Bacteriophage uvig_173157 from the Index of /pub/databases/metagenomics/genome_sets/gut_phage_database (ebi.ac.uk)
aagaaaaaacgcaaggtggagggagctgataagcgcaccgccgatggttccgagttcgaaagccccaagaagaagaggaaagtctagttctgcagagggtgatgccattcgacgaacttgtttattgcagcttataatggttacaaataaagcaatagcatcacaaatttcacaaataaagcatttttttcactgcattctagttgtggtttgtccaaactcatcaatgtatcttagtaccgcattcatttcagtgagagcttactcatcagagttcgggatatttgagtgcaaacacacgagagttctgctactggctccatttcatctttaatctgaaagaacgggtagacatcataaccgacgatgacaagttcaacatcaacacgattctcaacgcagacaagcagcgtgaggcactgataaaaatggctgaagactacatttatctgaatccgcctgaccaccagaagtggttgaatggagtggtttctgccatcacaaacttacgggaggacggataaggatatggcaaaggatgaaaacaaggaatcggaaatccgaggcgatgagcaagagacgtccgtatcagactaacgcttatccatctacacacggagagcttgaagatgaattagaacaaatctatgaggcaatgtaaccggaggacgatatggataacgataatttttcctttctcgctgatgcagaaagctcgataacgggagataaaaccgaagggtacacgcccaaggagcaggagctgattcatcaattggttcaagaacgactgggcaagaaaaatgccatcgagtttgaatctctcgatgactatgtcgttccgcccaaaatgttcttctccatgattaagaaaccggctgtgagtattcgtgcgaacagaatggaatggaatcgtcgactgcacgatcaaacatcgatcgaagctcctgtcgcgagtgaagcata

SEQ ID NO: 1888 - DNA, 966 bp, unidentified
  source 1..966: mol_type = unassigned DNA; note = Bacteriophage uvig_393561 from the Index of /pub/databases/metagenomics/genome_sets/gut_phage_database (ebi.ac.uk)
aagaaaaaacgcaaggtggagggagctgataagcgcaccgccgatggttccgagttcgaaagccccaagaagaagaggaaagtctagttctgcagagggtgatgccattcgacgaacttgtttattgcagcttataatggttacaaataaagcaatagcatcacaaatttcacaaataaagcatttttttcactgcattctagttgtggtttgtccaaactcatcaatgtatcttagtaccgcattcatttcagtgagagcttactcatcagagttcgtgatttccttatttattaactatcctttcaatcatagcgtaacgaaccgataatgctgttgctaacgcattgaacgctaaagaaggagagaaagtatgcagttttcaacaacgccaaccctggaaggacaaccgattaccgagtactgcggcgtggtgaccggcgaagcgattctgggcgccaatatcttccgggatatgtttccattattgacataatgatataattgttctctgaccaaggaggacatatggaactcgcttttagttacgcccgattcagtacaaaatctcagtccacgacgtccgtatcagactaacgcttatccataagcacttaaggagttaatagatggattcaacaaagaacggcgagaaagatgagttggatttgttaatggaacgcatgatggacccgtcttttcctgtgtacatcaaggaaaacaatattgtcgttttcccgattgaaccaaatgtatattgtttttcatcggttgaagatgctgaaaaacgaggataccacgtaaaagatatggagcattatgatacgttgagtatcacagaaaagaaaaactttaatctttattgtgctccatctggtgagctgaaatcaagaatatatgactacaagggaatcgtcgactgcacgatcaaacatcgatcgaagctttacactaggtggtagcata

SEQ ID NO: 1889 - DNA, 966 bp, unidentified
  source 1..966: mol_type = unassigned DNA; note = Bacteriophage uvig_296393 from the Index of /pub/databases/metagenomics/genome_sets/gut_phage_database (ebi.ac.uk)
aagaaaaaacgcaaggtggagggagctgataagcgcaccgccgatggttccgagttcgaaagccccaagaagaagaggaaagtctagttctgcagagggtgatgccattcgacgaacttgtttattgcagcttataatggttacaaataaagcaatagcatcacaaatttcacaaataaagcatttttttcactgcattctagttgtggtttgtccaaactcatcaatgtatcttagtaccgcattcatttcagtgagagcttactcatcagagttcgaagacatagaggttgtgtttaagggtgagaactttatccgaaatgcagtgtagtaaacaaaatgagtaatatagaaagccagtagtgaaaaagctgctggcttcttctagtgtgccgagcatggcactaatcttactggtgaaagtccagtcacgggtatttaccgccaagtgtagtgaaccacaagtcggtaccagtaatggtatggatgaaggaagtggtgtaacaaagttcttgagcctacgtacagaaacttgataaggcgattaggtgggtaaggttgctagacaaaccaaagccgacgtccgtatcagactaacgcttatccatagaaattgaagatacaggctgatgaatacaggcaggcggcaagtcagtatgaaagtgctgaaaagaccgttgcccagttaaaagctgaaatgctccgttttaaaggaaaacgcaagttgacgcaggaaatggtcgatttgtttgttgcacaggtacgcatatacaaaaacaagaatcttgagatcgttttgaactatgaagatgaactgaaaaaattcgcagaactgaatatggaaagagaggcaggataatggctgagaaaagaaaattagccttttatatccgtctctcggatgcggaggaatcgtcgactgcacgatcaaacatcgatcgaagctgtgacggatccttcggcata

SEQ ID NO: 1890 - DNA, 966 bp, unidentified
  source 1..966: mol_type = unassigned DNA; note = Bacteriophage uvig_123245 from the Index of /pub/databases/metagenomics/genome_sets/gut_phage_database (ebi.ac.uk)
aagaaaaaacgcaaggtggagggagctgataagcgcaccgccgatggttccgagttcgaaagccccaagaagaagaggaaagtctagttctgcagagggtgatgccattcgacgaacttgtttattgcagcttataatggttacaaataaagcaatagcatcacaaatttcacaaataaagcatttttttcactgcattctagttgtggtttgtccaaactcatcaatgtatcttagtaccgcattcatttcagtgagagcttactcatcagagttcgatgaaattgaaatcgaatggaattttgacgatattttttcagaacagagataacttgagcaggacaagaatgacttatcaaaagataataaaggtgctgggactacctgatggaagcgtcagatagtcttcggcagaaaaaaataaaattttttttgtcctatacttgacacatccacatgtatgcagacacactttttgttccaatatggcgaaatccggaatgaatccaaagacgttgcagtatatcatgggtcattcggacatcagcgtaacgctgaatgtttacacccatgtgcaggacgtccgtatcagactaacgcttatccatacatcaagaaccgcctggatgtagtattggcggcacaggtacggtattccaaggattatcatatcgaggaaggatggggaaaagtgatacatacttatatgtcaaagcgtaagctgacaaaagaaatggcagatgcctttgtggattcaattattatccatggtaagtatgattatgagatcaagctggtatatgacgatcagtttgcagatttacagaaattaaagaaagagaaggaggcgcagtcaagatgacaaatcatagaaaaacagctgtttacatccgtttatccgcagaagaggaatcgtcgactgcacgatcaaacatcgatcgaagctgacaattctgcacatgcata

SEQ ID NO: 1891 - DNA, 966 bp, unidentified
  source 1..966: mol_type = unassigned DNA; note = Bacteriophage uvig_58220 from the Index of /pub/databases/metagenomics/genome_sets/gut_phage_database (ebi.ac.uk)
aagaaaaaacgcaaggtggagggagctgataagcgcaccgccgatggttccgagttcgaaagccccaagaagaagaggaaagtctagttctgcagagggtgatgccattcgacgaacttgtttattgcagcttataatggttacaaataaagcaatagcatcacaaatttcacaaataaagcatttttttcactgcattctagttgtggtttgtccaaactcatcaatgtatcttagtaccgcattcatttcagtgagagcttactcatcagagttcgacacccgcagaggtgtctatgtcagctacgaaccggcgcaaaatgggcaataaaaatgacgagtgttctcaaaggatcaaatcctataagaacactcgtcatggtacgccagaggtagtacccggagttattagcactccttcctcgctccagtcaaaggtgccgtccgggtgcgtgtccagcattgtccagatcgtgatggtatccttggctacctcaacacggcagacgatagccagcagcgcggcattcccggcgggattgtccccggaaatctcgtcaatgatctcccgcagccgggacgtccgtatcagactaacgcttatccatcgggatattccgaagccggatgaagacgaggaggtgaacctcgttcttctggaacgggaggaagccgaaaaaaaagccagggcggcggccctacgcgaatctatttcttggctgcggcggctgttcggctccacctcagcaccaaagaagccctgatgctcacccccggaatgttctcggacttgatggaggtgctgacgcccagtgaaagagagctatctgatcgagagccatctcgccgcaaacccgcatgaatactgcatttttgctgtttgcgcttcaccttcccgaacgacgtatggaatcgtcgactgcacgatcaaacatcgatcgaagctacagagtagatccagccata

SEQ ID NO: 1892 - DNA, 966 bp, unidentified
  source 1..966: mol_type = unassigned DNA; note = Bacteriophage uvig_448547 from the Index of /pub/databases/metagenomics/genome_sets/gut_phage_database (ebi.ac.uk)
aagaaaaaacgcaaggtggagggagctgataagcgcaccgccgatggttccgagttcgaaagccccaagaagaagaggaaagtctagttctgcagagggtgatgccattcgacgaacttgtttattgcagcttataatggttacaaataaagcaatagcatcacaaatttcacaaataaagcatttttttcactgcattctagttgtggtttgtccaaactcatcaatgtatcttagtaccgcattcatttcagtgagagcttactcatcagagttcgagatcaacatctcgtttaacttcgatctcactccttacattgagggggagtgatacgtccgcctgcaaaacagtcgggcatcgaacaagcattttcagaaacaacgaaacagcaagaattgggggttgccgtccatgtgcctgcaaaatcaggcatttggatgattttcagtgcgacctccaagaaagcaaaaagaaaagcaccgtacttcaaacgaagtacagtgcttttttggtggagaatagcgggatcgaaccgctgacctcttgcatgccatgcaagcgctctcccgaaccacgcgacgtccgtatcagactaacgcttatccattgattgagaatatcctgtcgttttcagtttttccaaagaacctaacccggaagcatttgaacgcattcggaacatcctgcttgccaccagctacacgaagaaggtaggttgacatcatggacgaatgcagaatcaaacgctatactgagtgcggtgatgggcggtgccacaaaccgagccattgccggacgttctttgacaacgaaataaagcctgtccccacttttgttatgaaagtgaggaatttacaatgacagaaaacaacaaccgcgtctgctgcttgtaccgcgtttccaccgaggaatcgtcgactgcacgatcaaacatcgatcgaagctcatggtcgttgattgccata

SEQ ID NO: 1893 - DNA, 966 bp, unidentified
  source 1..966: mol_type = unassigned DNA; note = Bacteriophage uvig_400458 from the Index of /pub/databases/metagenomics/genome_sets/gut_phage_database (ebi.ac.uk)
aagaaaaaacgcaaggtggagggagctgataagcgcaccgccgatggttccgagttcgaaagccccaagaagaagaggaaagtctagttctgcagagggtgatgccattcgacgaacttgtttattgcagcttataatggttacaaataaagcaatagcatcacaaatttcacaaataaagcatttttttcactgcattctagttgtggtttgtccaaactcatcaatgtatcttagtaccgcattcatttcagtgagagcttactcatcagagttcgaggatctttattgctgaattggagaaggaaaaggaaaagtactcagtgggatttggcagcaaaatgcagtgggcactgttgattgaaaagtataaggatcaggagtcccttgacgctgagatggcagcagccttcattgagacgcttaccttgtttaacgatggccatgttgaagtggcattccgccatcgtgatgagattgaacaggtcctctatgtcgctgcgacccgaggaaaggaggcggagaggtatgccggataaggtgctggcgttttatattcgtttgtcgagtgaagaccggacgtccgtatcagactaacgcttatccatttgagatagatatgcgtacttcgagcgggtttgcatttgtaacggcaagctaaaacaataagcgcccccactttggaggcggctgaaaaattccgaaaaaactgtatgtctatcttgacacaaccagagggcatcgtcaccggcacggcggtcaagatgttcactgtggccgggccggtgatcgtattcggcaccgctgccagcgtggtgtacgggctggtgctgtatctgatggggtagggcggctgcccgcgtactgtctcctcggcgggaaagcaaaaaaatgagagcaccctggggggaatcgtcgactgcacgatcaaacatcgatcgaagcttgacttgaggttagtccata

SEQ ID NO: 1894 - DNA, 966 bp, unidentified
  source 1..966: mol_type = unassigned DNA; note = Bacteriophage uvig_172639 from the Index of /pub/databases/metagenomics/genome_sets/gut_phage_database (ebi.ac.uk)
aagaaaaaacgcaaggtggagggagctgataagcgcaccgccgatggttccgagttcgaaagccccaagaagaagaggaaagtctagttctgcagagggtgatgccattcgacgaacttgtttattgcagcttataatggttacaaataaagcaatagcatcacaaatttcacaaataaagcatttttttcactgcattctagttgtggtttgtccaaactcatcaatgtatcttagtaccgcattcatttcagtgagagcttactcatcagagttcgcattctggccagttccctttgtgtcagtccaagatattcccgcctgtcgcgtagtttttcattcatcccgaccacatactaccacagattagccccctcgtgtgaaaaatggcctgaattcaggccatcacttgttgagtttttgcgcgtattgcctatttctccgcttgacattgcgcacatatgagtctattctgtgattatacccctgaatgtggagaattattattgtttgtaggaggaacccgaaatgtatcagttaccctccagcatacgccccgaaaacaccctgatctatctgacgtccgtatcagactaacgcttatccatgtggccacgccagtcccacccccatccacctggacatagacatgctcgtttaattttttgcccatcatctgtatcatgtatgctcaaatgagctcgggcacctcgagattattggcaccatcgttcatcagctgacccgaagcatgacgccggaggagatcaagaaggccggatacgaggcgtacttcgtggaccacaccgccggcgtttatccggccgccgcctccggtttcccgtggaacgctgcgtctatggctgtgaagggcgacctgatcgccgatctgacggaggatctggccgggaatcgtcgactgcacgatcaaacatcgatcgaagctggcggatgaacagctccata

SEQ ID NO: 1895 - DNA, 966 bp, unidentified
  source 1..966: mol_type = unassigned DNA; note = Bacteriophage uvig_189626 from the Index of /pub/databases/metagenomics/genome_sets/gut_phage_database (ebi.ac.uk)
aagaaaaaacgcaaggtggagggagctgataagcgcaccgccgatggttccgagttcgaaagccccaagaagaagaggaaagtctagttctgcagagggtgatgccattcgacgaacttgtttattgcagcttataatggttacaaataaagcaatagcatcacaaatttcacaaataaagcatttttttcactgcattctagttgtggtttgtccaaactcatcaatgtatcttagtaccgcattcatttcagtgagagcttactcatcagagttcgtgcagtatcatgtcgctccgtatactatacgagtgaaacttaagtgcgaatagcattggggtcaatttggtccccattcatacggggtcacttcatcccaatggctatatatcaagggttggagaaaaagaaaaggggctgttttacttgcggctgccccttctcctaatacattttgatttttatcgatcaatcagatactcttgcaattcgtctcttctagcggtcagcttgtcgacattattgcccgtaatctcgtgattgagaatagcgtataaacatttcagaatcatctgatttgacgtccgtatcagactaacgcttatccataaatgttatcaacgaaaatatcagatggcgaagaagaagctatatactcatcaatgaatgaagaatatgtgaggcatgttgaaacttggcataaagtattcggcatggatccatttaccgatgaagaacacgaaaaattgatagagtatggaaagttcttaatttctatgcgtaaaggaggtgatgtctaaagttattcgggcagtacacatcttttataaaacacacatcatagaaaggaagaacaccaatgtacaaagaatatccgaagttttattattacgaatcgttagaatatggggaatcgtcgactgcacgatcaaacatcgatcgaagctccgcgcaggcaactatcata

SEQ ID NO: 1896 - DNA, 966 bp, unidentified
  source 1..966: mol_type = unassigned DNA; note = Bacteriophage uvig_170915 from the Index of /pub/databases/metagenomics/genome_sets/gut_phage_database (ebi.ac.uk)
aagaaaaaacgcaaggtggagggagctgataagcgcaccgccgatggttccgagttcgaaagccccaagaagaagaggaaagtctagttctgcagagggtgatgccattcgacgaacttgtttattgcagcttataatggttacaaataaagcaatagcatcacaaatttcacaaataaagcatttttttcactgcattctagttgtggtttgtccaaactcatcaatgtatcttagtaccgcattcatttcagtgagagcttactcatcagagttcgggggtagtttttagctgttgctaattaacgatagctgtttgacattcactcttttttggtaatgtatttgacagtgatacggcttcgtgcttcgtaagtgaggccttagcccaagagctgtcagtgtatgctggcggctctttttgttttaagcaggtagtttatcgagtgaaaaaaagaaagggccccttgctctaaatcttggcggattcgcaagggaccgaagcaccgacccaaaaggagtcgatagatggattctatcatgaattcggcagatcgccgtacatgggcatgctgcgcgacgtccgtatcagactaacgcttatccatctccctacgtactgcccaacaagccgcatttggagatttttctgaagggctagaggttgatagctaagctctaaccatcggcgaaactaacccgaaaacgttacagaaaaacgtatctgttaccttctgggttatacttcctttgcggaagggatttaagatgacaacgcagcaagcactttttgaagagctgaagagtacggcggtatcaccgtacgaagagctcaaagcgtatgaatatatgtactcacgtaaaggcgagacattgcataaactcgccaatgcaactgtgcgctgcaaggaatcgtcgactgcacgatcaaacatcgatcgaagctgatcgcgcacatacgtcata

SEQ ID NO: 1897 - DNA, 966 bp, unidentified
  source 1..966: mol_type = unassigned DNA; note = Bacteriophage uvig_195109 from the Index of /pub/databases/metagenomics/genome_sets/gut_phage_database (ebi.ac.uk)
aagaaaaaacgcaaggtggagggagctgataagcgcaccgccgatggttccgagttcgaaagccccaagaagaagaggaaagtctagttctgcagagggtgatgccattcgacgaacttgtttattgcagcttataatggttacaaataaagcaatagcatcacaaatttcacaaataaagcatttttttcactgcattctagttgtggtttgtccaaactcatcaatgtatcttagtaccgcattcatttcagtgagagcttactcatcagagttcgtcaaggacggaacggagatcacccaggccatgcaaaggaggcagaccgcatgatttatatcactggcgatacccacggtggattccagaggttcggaaacaaatattttccgccgcaaaagcacatgagccgcgaagactatgtcatcatcactggcgatttcggaggactgtgggacggaggcccaaaagactggtattggctggactggctgtccggcaaacccttcaccaccctgtttgtggatggaaaccacgagaatttcgacctgctgaatgccctgccggaaaaagaatggcagacgtccgtatcagactaacgcttatccataataaataggaggttatatgaatggagagatttatcacagatgaacgcacggggctgaagtatgagctggtcggagactatccgaacccctcacatttcataacgataaaagcacagaccatggctttttgggggaagccccgccgcccggttgccgctctggacagcgtgaagtccaagctgctgaaaagcttgtcgtagaacatggcggcactttggggtgtgaacagcgtcacatcctgaatgatttgcccaggcggaaagtgaatccctcagcggcaatgtgaagtgggggcaccgggaatcgtcgactgcacgatcaaacatcgatcgaagctcggccgcttatggtgtcata

SEQ ID NO: 1898 - DNA, 966 bp, unidentified
  source 1..966: mol_type = unassigned DNA; note = Bacteriophage uvig_597743 from the Index of /pub/databases/metagenomics/genome_sets/gut_phage_database (ebi.ac.uk)
aagaaaaaacgcaaggtggagggagctgataagcgcaccgccgatggttccgagttcgaaagccccaagaagaagaggaaagtctagttctgcagagggtgatgccattcgacgaacttgtttattgcagcttataatggttacaaataaagcaatagcatcacaaatttcacaaataaagcatttttttcactgcattctagttgtggtttgtccaaactcatcaatgtatcttagtaccgcattcatttcagtgagagcttactcatcagagttcggcggtgatagtaaaatatcatcgctatttttatacacaataatataaaacagctaaggagagacaaatggcaaaaactataattaaaaaatattctaataatactgtggtagttattacatacaacaatgaaccttctttagaggctatcaagcagtatgcccaaaaattaaagcagacaattgacagcaaaagtattcagagttaacatatatttataaaatcaatagagagggtgatattcgttggaaatgcgaaatgaatacaatccaattattataaaatatgttgcagaatatttgacgtccgtatcagactaacgcttatccatttatatggacaaaacaaggtgacaatattgatattaaagtaaattttctataggctcgtaacagccgaagattctgtgtttcaagtggagcaagttttaaacttgccattggtgccacgtgtagaactttccccatctgaagacacttgttacgagcataaaaaataaaggactatcaaaagatagtcccttaaatatttggaagtacaaaatgtggtgagtgagatatggtatttatattattgccgttatcgaccaatttattacacataatcccctattggcatttttattttttttggaatcgtcgactgcacgatcaaacatcgatcgaagcttgataggtacctggctcata

SEQ ID NO: 1899 - DNA, 966 bp, unidentified
  source 1..966: mol_type = unassigned DNA; note = Bacteriophage uvig_595313 from the Index of /pub/databases/metagenomics/genome_sets/gut_phage_database (ebi.ac.uk)
aagaaaaaacgcaaggtggagggagctgataagcgcaccgccgatggttccgagttcgaaagccccaagaagaagaggaaagtctagttctgcagagggtgatgccattcgacgaacttgtttattgcagcttataatggttacaaataaagcaatagcatcacaaatttcacaaataaagcatttttttcactgcattctagttgtggtttgtccaaactcatcaatgtatcttagtaccgcattcatttcagtgagagcttactcatcagagttcgagccccactcggattcgaaccgggattctcgccttgaaagggcggtgtcctaaccattagacgatggggccaaaacttatattcgcaacgttgcgttctgaccaggctgttgtcattcctgcgcaggcagggacgatggggccaaaactttattgccgccagattataactggtgcataacattttgtcaagtggaaataaaaaccaggacgcaatcattgcgtcctggggatttttgtgttgttttttatttggttgccaccggtgcgtcaacaacaactgtttcggtttcttctgtgagacgtccgtatcagactaacgcttatccatacggttgtgatgtcagtatgaaacaaaaagatgttatacaatgaccgattttgatttattaaaacaagaaattaaacaagcattcccaggtgaacatatatcagacaaagaactgtcgtcaatgacatgggaactggttgatttttttacaatggctgcaaaagcatataaaaccagcaaaattgaaaaataattgcgtcttttcaatttaatacacgatacaatttttaatatacaaaggagtaaaactatggaaaatttatttactacaaacaacttgtttgcacaaccaagcggtccggaatcgtcgactgcacgatcaaacatcgatcgaagcttggcatcgaggatattcata

SEQ ID NO: 1900 - DNA, 966 bp, unidentified
  source 1..966: mol_type = unassigned DNA; note = Bacteriophage uvig_244256 from the Index of /pub/databases/metagenomics/genome_sets/gut_phage_database (ebi.ac.uk)
aagaaaaaacgcaaggtggagggagctgataagcgcaccgccgatggttccgagttcgaaagccccaagaagaagaggaaagtctagttctgcagagggtgatgccattcgacgaacttgtttattgcagcttataatggttacaaataaagcaatagcatcacaaatttcacaaataaagcatttttttcactgcattctagttgtggtttgtccaaactcatcaatgtatcttagtaccgcattcatttcagtgagagcttactcatcagagttcgggtgccgtccttttgtttttcggcgttcgccgtcacaaacgttttaaggctgaaaagaacgccagcgttaaaaatcaataaagaaaaagagcagtcaccctgctaaatgactgcccctttttgtttcaccgtgttgtcgtggtctcaacatgtaaaacggattgctctgttattatatcacagacctacgattttgcataggtctattttttatacccttttttattttttgagggagaaagaaggtaatatggctagtaatttctttgcaccgcagccggagctgtttggccggcgtgtgacgtccgtatcagactaacgcttatccattgcattccgtcgtggtttatgatgatgagcacatggatatttcatttttgtaaattatttttttgcaaaaatccaccatactaattaatactaaccgttattctgatttacatacttctcccaggcctttgctgcccgctcggcagccgtacttccctcaccggtattcagcgcctggattgcataataattgatcggaatatcgacctctttttcatccagctgcccttccacgatattagctgctgtcacgctcgtaaataaaggatccgtcgctttgccagctgcgagcacttcattggaatcgtcgactgcacgatcaaacatcgatcgaagctaatacgcggagctacatata

SEQ ID NO: 1901 - DNA, 966 bp, unidentified
  source 1..966: mol_type = unassigned DNA; note = Bacteriophage uvig_555240 from the Index of /pub/databases/metagenomics/genome_sets/gut_phage_database (ebi.ac.uk)
aagaaaaaacgcaaggtggagggagctgataagcgcaccgccgatggttccgagttcgaaagccccaagaagaagaggaaagtctagttctgcagagggtgatgccattcgacgaacttgtttattgcagcttataatggttacaaataaagcaatagcatcacaaatttcacaaataaagcatttttttcactgcattctagttgtggtttgtccaaactcatcaatgtatcttagtaccgcattcatttcagtgagagcttactcatcagagttcgtagcaaacgtaaggtggtgggctctgatgaaacttaaaaatgaaatagcatatcaaatcacaatgagacatttaaaagatatgttagataagaagattatttcaatcgaagaatacaatcaaatgatggctgaatttaaagagaaatatacaccaaaaataagcagtttattctttgaaataacccaataagacttgatatatacatcatttagagtgatatatagtaatgataaaaatggaggtgtaagatgcgaaaaataacaaaattagaaacaaaaaacatagaacttcctaaactgacgtccgtatcagactaacgcttatccatggaggatgaaaaatgacaaaaaaagtaacaacgataccagcattactaaataagcaatctacaaatcaggttggaatagtaaaaaagagaagagttgctgcatatgccagagtttcaacagaccaagaagaacaattaacaagttatgaggcacaggtcgattattataccaattatataaaatcaagagatgattgggaatttgtagatgtttatactgatgaaggaataagtggaacttcaaccaaacatcgtgaagggtttaataaaatggttaaatcggcattagatggtaacattggaatcgtcgactgcacgatcaaacatcgatcgaagcttagacacggtcgactatata

SEQ ID NO: 1902 - DNA, 966 bp, unidentified
  source 1..966: mol_type = unassigned DNA; note = Bacteriophage uvig_336926 from the Index of /pub/databases/metagenomics/genome_sets/gut_phage_database (ebi.ac.uk)
aagaaaaaacgcaaggtggagggagctgataagcgcaccgccgatggttccgagttcgaaagccccaagaagaagaggaaagtctagttctgcagagggtgatgccattcgacgaacttgtttattgcagcttataatggttacaaataaagcaatagcatcacaaatttcacaaataaagcatttttttcactgcattctagttgtggtttgtccaaactcatcaatgtatcttagtaccgcattcatttcagtgagagcttactcatcagagttcgaaatcgatggcattgcggcatccgcagcatccgtcatcgctatggcaggcacgaaggtgctggtatctcccgtgtccatgcttatgcccgtgtctccacagacagcgaggagcagctcaccagctacgaggcccaggtagactattacaccaagtatatccggtcgaagccggaatgggagtttgtaaaggtctacacggacgagggcatctcggccgtcaacacaaaaaagcgtgacggcttcaacgccatggtggcggatgccctggctgggaagattgacctcatcgtgaccaaatcgacgtccgtatcagactaacgcttatccatgggacggcagcattacattacgcttcgttagcggcgcagagataaccgtataaaaacagcaatgcccacaggttttgacggtctgtgggctttttcccgttgtgggaacttattacgagtgatttcgacaaacgggctatgttaccacaccgttaggctgaacgccaaatacatttcaccaagcgtggaaaaaggagtcaaattatgtcgaactacaaaaacaacaaacaggtcatggaagcaggcagacgcgccattcgtgaggttgcccggcgtgagggtatctcggaagcagaggttggaatcgtcgactgcacgatcaaacatcgatcgaagctttgaggatcctacgagtata

SEQ ID NO: 1903 - DNA, 966 bp, unidentified
  source 1..966: mol_type = unassigned DNA; note = Bacteriophage uvig_239031 from the Index of /pub/databases/metagenomics/genome_sets/gut_phage_database (ebi.ac.uk)
aagaaaaaacgcaaggtggagggagctgataagcgcaccgccgatggttccgagttcgaaagccccaagaagaagaggaaagtctagttctgcagagggtgatgccattcgacgaacttgtttattgcagcttataatggttacaaataaagcaatagcatcacaaatttcacaaataaagcatttttttcactgcattctagttgtggtttgtccaaactcatcaatgtatcttagtaccgcattcatttcagtgagagcttactcatcagagttcggtgatagttatatgaagctgcttactggggaggaacaaaatcatgagggataagaaaaatagactccgtgtagcaatctatatgagggtggcgcagaaggaacaatgcgaagaagccgtgacggctatgaaaagccaggaggcggtacttgagcagatcacgcagaatagcggcaatgtaattgttgggcgctttgaggattacggaagcgggatagattacagaaggcctgggctttgcgccgcactggaaatggtaaagagcggacaagccgacgcccttttgatgaaaaacgagaacgacgtccgtatcagactaacgcttatccatcggaggaattgaagaagcagatatttgacctgcgggagcagcagcggtaccggtcggaaaccctgacggagaaaaatccgtggctcgccgcgtttggagggctgggccgccccttccatctgacaaaggagctggccgcttccctgattgagcgcgtcaccatctatgggaataaccgggtggaaatccttctccgctttcatgatgaacgtgaacaactgctggccgcagtgggagaggaggatgctgtatgatgattgcgaaatacatccggctgtcctctgccgatgaggacgcccgggaatcgtcgactgcacgatcaaacatcgatcgaagctcatgtcgtagccggtgtata

SEQ ID NO: 1904 - DNA, 966 bp, unidentified
  source 1..966: mol_type = unassigned DNA; note = Bacteriophage uvig_146316 from the Index of /pub/databases/metagenomics/genome_sets/gut_phage_database (ebi.ac.uk)
aagaaaaaacgcaaggtggagggagctgataagcgcaccgccgatggttccgagttcgaaagccccaagaagaagaggaaagtctagttctgcagagggtgatgccattcgacgaacttgtttattgcagcttataatggttacaaataaagcaatagcatcacaaatttcacaaataaagcatttttttcactgcattctagttgtggtttgtccaaactcatcaatgtatcttagtaccgcattcatttcagtgagagcttactcatcagagttcgtgatgctggctgatttggagccggtataaaacttcatgcgtcggaggcacacccatttttgaattgtgttcgtgcatgaagtttttgtgcatcattttcggttgccccaacggggcgagaaaatggcacattacggattgctatgccagcatagcaatccccatcgacatccttaacatgggcggtcaggcgaggtataatatagtcaggatgaatgacctcttgcttgactgccagagaggaggtttatatgaaacagtcaagcaaaaaacacgaactcggcacagccgctctctactggacgtccgtatcagactaacgcttatccataaacgagaaaaggcgtagcactcagctacgccccagaacaggttgcggtataggaggtacgacacgatgaaagcctatttctattgccgcgtcgctcacgatgatagcttttctttggaacggcaggccgaggagcttcgccgctatgcggaacaagccgggtacaccatcgttggtgctgccgccgagcatggctctggaatgacccttgaccgtccggctctgcaagaggtgatggaggccgtccttgccggagaggtggatgtggtgctgataagcagccttgaccgtatagggcggggaatcgtcgactgcacgatcaaacatcgatcgaagcttcgcttgactctgatctata

SEQ ID NO: 1905 - DNA, 966 bp, unidentified
  source 1..966: mol_type = unassigned DNA; note = Bacteriophage uvig_390637 from the Index of /pub/databases/metagenomics/genome_sets/gut_phage_database (ebi.ac.uk)
aagaaaaaacgcaaggtggagggagctgataagcgcaccgccgatggttccgagttcgaaagccccaagaagaagaggaaagtctagttctgcagagggtgatgccattcgacgaacttgtttattgcagcttataatggttacaaataaagcaatagcatcacaaatttcacaaataaagcatttttttcactgcattctagttgtggtttgtccaaactcatcaatgtatcttagtaccgcattcatttcagtgagagcttactcatcagagttcgtagcagagaacgcacgagtggcacaagaccaggatgattacaataaacgctaacaatgccttggcagaacgctatgacagactgaaagcgcaatacgatgaagtcagcaccgcaatttctgacaatgaagcaaggtatgaacagatgggcagattcatcacagtcctgaaagaccaggaaggcgttatcacagaatttgacgatgccctttggagcagtctagtggagaaaattgtagtaaagagcaaggaagatgtgacggtggtgttcaaagacggcaccgaaatgaaagcagaataagacgtccgtatcagactaacgcttatccatgatgactacggttttacttttgctgacggcacggaaatcagattataaaagcacaccctgcattggcatgaacgctgacgcagggtgtttctctgtctgtgggaaatgcacccacccctagtgtaatcctcaaaaagtatagtggaaaatcaaaaagtatggggcaaattcagattgtatcaaagacggctattacatagactaagacatcagcgccaccaacaccaaacatcgcgccggtttcaatcagatgattgccgatgccctggcgggaaaggttgaccttatcattacaaaatcggaatcgtcgactgcacgatcaaacatcgatcgaagctctaccggtgccgctcttata

SEQ ID NO: 1906 - DNA, 966 bp, unidentified
  source 1..966: mol_type = unassigned DNA; note = Bacteriophage uvig_383825 from the Index of /pub/databases/metagenomics/genome_sets/gut_phage_database (ebi.ac.uk)
aagaaaaaacgcaaggtggagggagctgataagcgcaccgccgatggttccgagttcgaaagccccaagaagaagaggaaagtctagttctgcagagggtgatgccattcgacgaacttgtttattgcagcttataatggttacaaataaagcaatagcatcacaaatttcacaaataaagcatttttttcactgcattctagttgtggtttgtccaaactcatcaatgtatcttagtaccgcattcatttcagtgagagcttactcatcagagttcgaaggtatcgggattttggaaatgtccaaagtatttgatagcaggcaaaaatgaaagaaacggcatagccgaagctataccgtttctctctcgccttagaatgttttcttaactggacacccctaaacgtgtggtgtttttctttttatacagacgcagaaaaaggcgggagcttcccacaaaagggaaagccaccgcctttgttgatcatcggatgagccagccgtaatcctgtctgcaatctaccacatgatctgcataaaccgtatgatctacgatctggaagataagcatatagcgtgacgtccgtatcagactaacgcttatccatcctttgaaaacaaattcgccccgccagtacggagcgaaaagaaaattggaaatacaaccttcaccgtcaattcgttcttcctggaacaaacaaaagacggtgtggtttctaaaatagagcggcttatcaaggatgatgtccgaaaaaaagccgctacaatttgacctccataggcagacaaaaccaacaaagcgcggtagaatgaagatagaacttcataccgtgtttgactgccagattggaggttattatgtttcatcagtcaaacaccgctgccgcacttcaattcccttacaacgcggaatcgtcgactgcacgatcaaacatcgatcgaagctgacgttctgctgtagaagta

SEQ ID NO: 1907 - DNA, 966 bp, unidentified
  source 1..966: mol_type = unassigned DNA; note = Bacteriophage ivig_4414 from the Index of /pub/databases/metagenomics/genome_sets/gut_phage_database (ebi.ac.uk)
aagaaaaaacgcaaggtggagggagctgataagcgcaccgccgatggttccgagttcgaaagccccaagaagaagaggaaagtctagttctgcagagggtgatgccattcgacgaacttgtttattgcagcttataatggttacaaataaagcaatagcatcacaaatttcacaaataaagcatttttttcactgcattctagttgtggtttgtccaaactcatcaatgtatcttagtaccgcattcatttcagtgagagcttactcatcagagttcgaaattagagtaatttccttttatccattaaaaatttcaattttattctattaaaaagcaacttttatagagttgcttttttttgttagtatgttatacttttctaattctgcttttacccaatggaaaaaattaacttaatttaacccaagcagtccaagttgtttcatcttgtgcagactggttaattcttgtatatactcctattgctgatatataaaattgtactttcctaccaatgttaaatgttattaaagtccccattactgaattatcttgcaaaggcttatttcttaacaaagacgtccgtatcagactaacgcttatccatgcagatgagctttcagatgaaataaatgaatttgttattaaaaaatcagaagctacaaccatagagcttagttatgaacaacaagaagatttttcttgcaaatattggagataaaaggaaaggagctaagtataatatggaaactaataaaccagtaaaaaacgaagaaataaatataataaaaagagcagtagtagagcaaattgaagaactttacaataaattaattttaaagaaaaaggcttcataaatggaaaaagttgccatttatattagagtatcaaaaaaagaacaaactagggaatcgtcgactgcacgatcaaacatcgatcgaagctgacaagagcaggtacaagta

SEQ ID NO: 1908 - DNA, 966 bp, unidentified
  source 1..966: mol_type = unassigned DNA; note = Bacteriophage uvig_80069 from the Index of /pub/databases/metagenomics/genome_sets/gut_phage_database (ebi.ac.uk)
aagaaaaaacgcaaggtggagggagctgataagcgcaccgccgatggttccgagttcgaaagccccaagaagaagaggaaagtctagttctgcagagggtgatgccattcgacgaacttgtttattgcagcttataatggttacaaataaagcaatagcatcacaaatttcacaaataaagcatttttttcactgcattctagttgtggtttgtccaaactcatcaatgtatcttagtaccgcattcatttcagtgagagcttactcatcagagttcgtgtatggatgggaaagttgaccttatcattacgcaaaaggtgtccaacgtttccaagaagacttatgaggtcgtgctctgtgccaggttgttggcagctcataagcctcctattgggatctatttcatttctgaggatctgtttaccctggcaagctactatcgtgaagacttatttgatacttacttccttccgagccctgactgggaggtgcttccggatgatgatgatgaaagacgaggttatttgaatgattgatctggacaagcgccgccttaaagaacagcagaaagcaagacagacgtccgtatcagactaacgcttatccatatatcaagcaggaactaagcgtgttaactagaccggaggtaaatcatgaatgatttgacagttgggaatattttgactccaagaggatcggacagtgttccgtctgatgtatccagtacacccatagattcgatcatggctgctgaaattgaagacgatattttggaaatgaacgaaagcttcgaccttgatgaatttcaggtagtgcgaagggagtttttcgctcatcttcatgagccgtcgatctgttttaataaccgaaagttctatgtaaattctgcctgcctgcagaggttctccggaatcgtcgactgcacgatcaaacatcgatcgaagctgaccatgaggccggtaagta

SEQ ID NO: 1909 - DNA, 966 bp, unidentified
  source 1..966: mol_type = unassigned DNA; note = Bacteriophage uvig_395426 from the Index of /pub/databases/metagenomics/genome_sets/gut_phage_database (ebi.ac.uk)
aagaaaaaacgcaaggtggagggagctgataagcgcaccgccgatggttccgagttcgaaagccccaagaagaagaggaaagtctagttctgcagagggtgatgccattcgacgaacttgtttattgcagcttataatggttacaaataaagcaatagcatcacaaatttcacaaataaagcatttttttcactgcattctagttgtggtttgtccaaactcatcaatgtatcttagtaccgcattcatttcagtgagagcttactcatcagagttcgtatatatttcaataagttatgctaaaaagagactataccgatactgtatagaatctgtgtagaattgcttagatatttgaagaaataccgttaaattgcatagtcattcacctgtttatgtcctgtaattaacaggtatgttctaggaatcatcctcatagtgcatttagaccttgatgatttttattagacacgtttaaatacaccatcttaagcgatacaatctaggggttattaggtgaggtgaacaatgaaacgtgtaatcagctacatcagattcagttctgagcgacaagccaagacgtccgtatcagactaacgcttatccattttctgaggtcactgagaggggtttaatagatgttgatgaggttatcatatagttgagattctatcgtcagtagcgcttgttggggttcacagaaagcttcttcaaagtactacctgtaccagcattactaagcacctttgaagcttgctcattagcggcatctgagaaggtgctttttccattctcaactttgacacttttaccacaattgatacgggcttgaagttgctcattagtgagttcactcgtagagcgattatataactcctgacacagcaacataccattacctaaacttgggaatcgtcgactgcacgatcaaacatcgatcgaagctcatccggccgctcaagagta

SEQ ID NO: 1910 - DNA, 966 bp, unidentified
  source 1..966: mol_type = unassigned DNA; note = Bacteriophage uvig_434714 from the Index of /pub/databases/metagenomics/genome_sets/gut_phage_database (ebi.ac.uk)
aagaaaaaacgcaaggtggagggagctgataagcgcaccgccgatggttccgagttcgaaagccccaagaagaagaggaaagtctagttctgcagagggtgatgccattcgacgaacttgtttattgcagcttataatggttacaaataaagcaatagcatcacaaatttcacaaataaagcatttttttcactgcattctagttgtggtttgtccaaactcatcaatgtatcttagtaccgcattcatttcagtgagagcttactcatcagagttcgaagctcgaggagctgtacgcgggaaggccggagattctcaagaagatgtacgaatcagctcttcacgaggccacgaaagaagccgcaaatacaccagacattgattggcgcgatgttgagctgatcgagaacggcgcgatgattattccgaaagacgcaccaaaatagcaattaagccccgcgcatcacagggttgccgccctagcgcgaggctcgagagaattaaccgatccatggaaggagcggtcgcatgtatgatagcatgcccgccgagtggttgtgttgcgcctacttgcgaaagacgtccgtatcagactaacgcttatccatccccgttcgtgcacgacaacaaggtacacctagagatttttcttcgccaataacacctatgagaagggtaagcatccatgcaatcgttgatgacaggtgttagccgagaacgtgggccaccggaaagtcagcacaacagaaaaggggcctccgtatatctgggccgatgttgggagaccccaccccgaaacgaggcgaaaggattataccatggacgaggaaaacgagtacacgctaacccgctactacaccagcagcccggactcccttatagaacgcgtggcgccatgccttagggctggaatcgtcgactgcacgatcaaacatcgatcgaagctactgccagatgcggagagta

SEQ ID NO: 1911 - DNA, 966 bp, unidentified
  source 1..966: mol_type = unassigned DNA; note = Bacteriophage uvig_425922 from the Index of /pub/databases/metagenomics/genome_sets/gut_phage_database (ebi.ac.uk)
aagaaaaaacgcaaggtggagggagctgataagcgcaccgccgatggttccgagttcgaaagccccaagaagaagaggaaagtctagttctgcagagggtgatgccattcgacgaacttgtttattgcagcttataatggttacaaataaagcaatagcatcacaaatttcacaaataaagcatttttttcactgcattctagttgtggtttgtccaaactcatcaatgtatcttagtaccgcattcatttcagtgagagcttactcatcagagttcgtctttgaaattgctgataaagagctactggatattgacgcttatcaactgtaattttcaggggctatgaagcccctttttatgtctcaataagtgcccttcttattcggattcacactaaatttccgtaaagcattacccgacttaagcacttttgaagcctgctcattagcggcatctgagaaggtgctttttccgttctcaactttgacacttctaccacaattgatacgggcttgaagttgctcattagtgagttcactcgtagagcgattatataactcctgacacagcaacatacgacgtccgtatcagactaacgcttatccataaagggactataccgatactgcatagaatctgtgtaaaactgcttagatacttggaaaattgcatagtcataggggttggaacaagcccaactacacctgatattgtcctgtttttaacaggtctcttagaaaaccgaatagacttcattcaagggtcattgtattgtagctattcggcattgtagcattagccataacggttataagcttatctttaaatgataatcaattgcatgagagtttatcaccatgagaagcgtaattacataccttcggtacagttcagccatacaaggcgcggaatcgtcgactgcacgatcaaacatcgatcgaagctgcatgaagatcaatggagta

SEQ ID NO: 1912 - DNA, 966 bp, unidentified
  source 1..966: mol_type = unassigned DNA; note = Bacteriophage uvig_114951 from the Index of /pub/databases/metagenomics/genome_sets/gut_phage_database (ebi.ac.uk)
aagaaaaaacgcaaggtggagggagctgataagcgcaccgccgatggttccgagttcgaaagccccaagaagaagaggaaagtctagttctgcagagggtgatgccattcgacgaacttgtttattgcagcttataatggttacaaataaagcaatagcatcacaaatttcacaaataaagcatttttttcactgcattctagttgtggtttgtccaaactcatcaatgtatcttagtaccgcattcatttcagtgagagcttactcatcagagttcgataaccggttttctatatggttttgctttcatgtcttttgttgtaaaattaataagaaatattgaattaatataactaaaaaccgcccggtactccaataccgaacggtcttacatacacccgaagatgtacatccatattgcaagttatattgtatcatcttcagaaacacccgtcaacggaacatattttcgttgggtgtattttttatactcttttttaatatatttctagagaaagaaggatgaatatggactataattttacccaatttacagtatatgattttttattgtatctgacgtccgtatcagactaacgcttatccatctgtgtacgatgcaagcaagccggtatttaaagtgcatttaaacgacttttaacactttagagtcatttacatacatcataattgttcagattctcattcgcacaatcatgttatctataatgtatttattataggtaagaactcaaactttatcactttaataaaagaaaccgctcctcatctctccggggtacgttgaataaggaacggtctcttttgtttatttctacttataatatagcatcgtctatttgatgtgtcaatattttcgccccacctcttcggagatggggctgtgtggaatcgtcgactgcacgatcaaacatcgatcgaagctccgaatcagcgtagatagta

SEQ ID NO: 1913 - DNA, 966 bp, unidentified
  source 1..966: mol_type = unassigned DNA; note = Bacteriophage uvig_442872 from the Index of /pub/databases/metagenomics/genome_sets/gut_phage_database (ebi.ac.uk)
aagaaaaaacgcaaggtggagggagctgataagcgcaccgccgatggttccgagttcgaaagccccaagaagaagaggaaagtctagttctgcagagggtgatgccattcgacgaacttgtttattgcagcttataatggttacaaataaagcaatagcatcacaaatttcacaaataaagcatttttttcactgcattctagttgtggtttgtccaaactcatcaatgtatcttagtaccgcattcatttcagtgagagcttactcatcagagttcgttgggcggtatgttgataatccgtttcatctggaagttattttacgattatgatttacaacaacatggtgctattgaaattgcccattttgagatgattgcaaccatcgtgcaccagcttaccagagacctgactccggaggaaatcaaagcctctaactttggtccttactatattgaccacacccttgccgtatggccacaggctgccggtggtgttccacagaatgcctgtgaattccagtccaaaggcgatccgattactgaccttatggaagatatggctgcagagcagaaagccgacgtccgtatcagactaacgcttatccattcattttcataatcatatagcgtactgcgcccaattccggttatttcagctaattctgtcatggaaatgtgccgttcccttctcaccttccagattaatattttcatgaattaataatatcactctattcattgaattgtctgccggtaatgtttaccagtggcaagctgaccatccgtccggcttgacctttatttgaattttaactataatttgaaccactaaaaatgaatgaaagcaggtgtgcgtcatgctatatgaaatcaaccgggaagattttgaaaatgtaataatctatttggaatcgtcgactgcacgatcaaacatcgatcgaagctacgacctcaggttagtagta

SEQ ID NO: 1914 - DNA, 966 bp, unidentified
  source 1..966: mol_type = unassigned DNA; note = Bacteriophage uvig_510225 from the Index of /pub/databases/metagenomics/genome_sets/gut_phage_database (ebi.ac.uk)
aagaaaaaacgcaaggtggagggagctgataagcgcaccgccgatggttccgagttcgaaagccccaagaagaagaggaaagtctagttctgcagagggtgatgccattcgacgaacttgtttattgcagcttataatggttacaaataaagcaatagcatcacaaatttcacaaataaagcatttttttcactgcattctagttgtggtttgtccaaactcatcaatgtatcttagtaccgcattcatttcagtgagagcttactcatcagagttcggctttactgttgtcaatttaaaaagataaagaacaaatacagggcaaaatagtttttaaaaactatctaatatagcaaataaaaaaagatccttcaccgcgccaacagtgaaggatagatcgatacagtctgcgccaacagaactgcatcagcattgtaaaattatgacctgctaaaatcaccttttacagtgctcattttaacatattttagaaaggatggaaacagatttattatgagcgaatatatcatgtatcttagaaaaagcagacaggataatccagaagaaacagtggaggagacgtccgtatcagactaacgcttatccattatattttagtagattaaatgataaaatagtcttgaaagtcgtccttagatagacgggataacatgattattctaattcataagtaaatccttctccatcgacttcatgaacactatttacaataataaaagctcttggatctaactgcatgatttcgtgttctaaattcgaatacattttttgtggaattacaatcatcaatacaggtttggattcatttgtatatccacccttaccttctaaaattgtaacaccacgctccatattgtttaatacatgatttttaatatcaaaccattggaatcgtcgactgcacgatcaaacatcgatcgaagctggcggccgtctaagttagta

SEQ ID NO: 1915 - DNA, 966 bp, unidentified
  source 1..966: mol_type = unassigned DNA; note = Bacteriophage uvig_281842 from the Index of /pub/databases/metagenomics/genome_sets/gut_phage_database (ebi.ac.uk)
aagaaaaaacgcaaggtggagggagctgataagcgcaccgccgatggttccgagttcgaaagccccaagaagaagaggaaagtctagttctgcagagggtgatgccattcgacgaacttgtttattgcagcttataatggttacaaataaagcaatagcatcacaaatttcacaaataaagcatttttttcactgcattctagttgtggtttgtccaaactcatcaatgtatcttagtaccgcattcatttcagtgagagcttactcatcagagttcggttttgctaagatgttttatgttaactcggtcttagttggaacccccggtatcagggataaggttgtgactaagacctttttatatagaattaagaaaaaaaaagatccttcaccgcgccaacagtgaaggatagatcgatacagtctgcgccaacagaactgcatccgcattgtaaaattatgacctgctaaaatcaccttttacagtgctcattttaacatattttagaaaggatggaaacaagaacaatgaatgagtaccttatgtacctaagaaaatctcgtcaggacaatccggagacgtccgtatcagactaacgcttatccatgcactgtcctttcagacaatgaccttgtttcactggagatagttttaaagtagtttgcttggtgtagctagtacatcggtgccgtcccgatgtatttggtacacattacaggcttacatgtccaaaaacattgtagcataaagcaatggatctatgtaaaaggcataggtccatttttaatctttacctgaataaaaaaaaagaacctacgcattacacgtaggccttagtcattaaaaatagtatagttcaacttttgatattttgaatcaatttctgtacggttttgactcttttatgggaatcgtcgactgcacgatcaaacatcgatcgaagctcagagtcgactaatatggta

SEQ ID NO: 1916 - DNA, 966 bp, unidentified
  source 1..966: mol_type = unassigned DNA; note = Bacteriophage ivig_126 from the Index of /pub/databases/metagenomics/genome_sets/gut_phage_database (ebi.ac.uk)
aagaaaaaacgcaaggtggagggagctgataagcgcaccgccgatggttccgagttcgaaagccccaagaagaagaggaaagtctagttctgcagagggtgatgccattcgacgaacttgtttattgcagcttataatggttacaaataaagcaatagcatcacaaatttcacaaataaagcatttttttcactgcattctagttgtggtttgtccaaactcatcaatgtatcttagtaccgcattcatttcagtgagagcttactcatcagagttcgcttgatttatcttctgattcaacaggaaattctagaattctaaataatgtatttgaaaacaatatgtatattactgtaaaagatggacagtatttaactctaaaacgttgttatatttctttagaataataaaaaaccgacaccctcgcaaagtgtcggatatggtgtactcgcaatacaccgatacagaaaaagtttcgcactctttttctgtacccattttaccataaaatagaaaggatgggtacttatggataaatatttaatgtatcttagaaagtcacgttctgatgatccaaagacgtccgtatcagactaacgcttatccatatggtgctgttacacactctaaaaatgtgaatattgagattattttaaagtagtatatgagcattggaacaatcattctttatttacgtgacgatacgttaggttggcttcggcactgcctaaggatccctgcgcacttacggttactttcgcaccaaaaagatgaaaagcgatacttccctctccttgtacggcagctgctccgatggaagcttccaaattttgttcttctttattaaatatgcaggtagcctgtgcatagacacttccaacatccacattgcctcttgcctgcaagtaggaatcgtcgactgcacgatcaaacatcgatcgaagctggcagaccacgcctatggta

SEQ ID NO: 1917 - DNA, 966 bp, unidentified
  source 1..966: mol_type = unassigned DNA; note = Bacteriophage uvig_581976 from the Index of /pub/databases/metagenomics/genome_sets/gut_phage_database (ebi.ac.uk)
aagaaaaaacgcaaggtggagggagctgataagcgcaccgccgatggttccgagttcgaaagccccaagaagaagaggaaagtctagttctgcagagggtgatgccattcgacgaacttgtttattgcagcttataatggttacaaataaagcaatagcatcacaaatttcacaaataaagcatttttttcactgcattctagttgtggtttgtccaaactcatcaatgtatcttagtaccgcattcatttcagtgagagcttactcatcagagttcggataatcttatccaattagaaaatgattataacaaaaggcaattatatctacagaatctaccacaagatgtatatcagttcttattagaacacaatggaatatctcaaacagatatttataaggcatttgaacccattctgaaaaacgatatccaagaactattatatcgttgggataaatctgggacgataaaaagagaaaagagcggtaaaacctacaacgtatttatagcaaaataaaggagttcttatgtctgtaagaaatataataatatatttacgaaaatcaagatctgatgagacgtccgtatcagactaacgcttatccatcaggtcggtggatagacaatgtattttctcttgatatttttctaaatctttaatttccaacatcaatgtgcatatgagctggcgcattgatgttggatattattataccaatttcttaaaagacagattaccgttatctcttggaaggaaggcgaactgtccaagccttagagagttagtgtattcaccatctgtgacatacagcttgttattgctaaaatatgccacttctgcattactctgaagaaatgatattctattatttgcaatctgtaattcaagttcattaccaacttcgccggaatcgtcgactgcacgatcaaacatcgatcgaagctgccttgtccagaagaacgta

SEQ ID NO: 1918 - DNA, 966 bp, unidentified
  source 1..966: mol_type = unassigned DNA; note = Bacteriophage uvig_49690 from the Index of /pub/databases/metagenomics/genome_sets/gut_phage_database (ebi.ac.uk)
aagaaaaaacgcaaggtggagggagctgataagcgcaccgccgatggttccgagttcgaaagccccaagaagaagaggaaagtctagttctgcagagggtgatgccattcgacgaacttgtttattgcagcttataatggttacaaataaagcaatagcatcacaaatttcacaaataaagcatttttttcactgcattctagttgtggtttgtccaaactcatcaatgtatcttagtaccgcattcatttcagtgagagcttactcatcagagttcggccgaatacgccagcatgaagcagattttaactgctctcgtgaataagtaatttataaatgaggtcaagcaggtcgttgtccgacgtttttataattcggtcaataacagccatttgcaacggtgtcatgctggcttcactcgctttcattgaaacatattttgaagagtaacataacttttcaaaagagacaatacattctataaaatacagaatttgcgaaattgtcgcaataaaggggacgaaataaatgtatagcaccggcagcacattactgtcagacgtatggattatctatttgacgtccgtatcagactaacgcttatccatgcaagaaaaaaggcgagaactccttcgagctcaaggtgtttttacgcatataattttttatgccgcatatgtacatgatgggtgtgcaggttcgtcggcctcggtgcggataaggctggggcgggcgatgttgacggcttcgtacagctcgcgctcgctcacgtcggacaggttgccacttatctcaagcagcttcggatatacaaagtggatgaacgcctcgctgcggcctatgaggttttcgtagaagcgggagatcgtctcgtgcatggcgttggacatggcgttcgcggcgtggttggaatcgtcgactgcacgatcaaacatcgatcgaagctgatgtagcttcaccgacgta

SEQ ID NO: 1919 - DNA, 966 bp, unidentified
  source 1..966: mol_type = unassigned DNA; note = Bacteriophage uvig_572170 from the Index of /pub/databases/metagenomics/genome_sets/gut_phage_database (ebi.ac.uk)
aagaaaaaacgcaaggtggagggagctgataagcgcaccgccgatggttccgagttcgaaagccccaagaagaagaggaaagtctagttctgcagagggtgatgccattcgacgaacttgtttattgcagcttataatggttacaaataaagcaatagcatcacaaatttcacaaataaagcatttttttcactgcattctagttgtggtttgtccaaactcatcaatgtatcttagtaccgcattcatttcagtgagagcttactcatcagagttcgcgccgccatatgtgctaccgaacaggatcaggctcgatgtccacctccggtagtctctataaccatgttttatgggtcgacgaagaaatacagcagctggctcaaattgaaaggagagtggaaatggaaaattattacaagggcagaagaatagctccctttagcggcaagatttacaacgtgtactgcgatgaaagctgccatttgcaaaacgatagatttaaggctatgtcaatcggagcggtttggtgtcctcaaagcaaagtaagagaaatgaacaagcggcttatcgagataaaggacgtccgtatcagactaacgcttatccatagtaagcagatgaccaggaaacacatccaagcgctccaggataaaaagataataaagaccgtatcgaagagaccgcttaaggtgacgctgtccgaagagtcagaaacatcgttgggcatctcaaattttcacaacaaggaaagcagcatttagccagcaatcgacactttaacaagcaaaaagggtttcgctctcatcttggcggatcggcgaaaccccggaaggaaccgaccttgggaggtcgatctatatgcatgataccatgcttgatttaacgtgctgcgcatacctgcgcaaatcggaatcgtcgactgcacgatcaaacatcgatcgaagctgagtgtgccaagtacacgta

SEQ ID NO: 1920 - DNA, 966 bp, unidentified
  source 1..966: mol_type = unassigned DNA; note = Bacteriophage ivig_2192 from the Index of /pub/databases/metagenomics/genome_sets/gut_phage_database (ebi.ac.uk)
aagaaaaaacgcaaggtggagggagctgataagcgcaccgccgatggttccgagttcgaaagccccaagaagaagaggaaagtctagttctgcagagggtgatgccattcgacgaacttgtttattgcagcttataatggttacaaataaagcaatagcatcacaaatttcacaaataaagcatttttttcactgcattctagttgtggtttgtccaaactcatcaatgtatcttagtaccgcattcatttcagtgagagcttactcatcagagttcgattttaagaatagagtaagagatattaatcgagagaaatatctaagagatcatcgtcaataaaacttaaattaaaaaccgctcctgcgccaacagaaacggtcttaaatgtacatccgaagatatacacttttactttggtcggtaatattgtatcatctttggaacagtcacgcaagcggaacacttgttctttgctggctgttatttttgtaccttattttgcgtacacttaaaaggaggatgatattatgtatgaattaggggaatatcttatctatcttcgaaagtcaagaagtgagacgtccgtatcagactaacgcttatccattcagaaatgctaattttgaattaactataaaacctaaaataccacgaaagtaagcgtaggcactaggcttacgcttacttctacaaattgcgggatgtttcctttacgatgatacaatattctctccccggtggcaataccggggattcttattagaacaactggaatctatccattggaacaccaaagcatcctgcgtatccgtcctgtccattaccagtctcgttgtcatattgccaaggatagtaattcccattcactggacttatacgatactgtgctttctggtatccatacttaggaatcgtcgactgcacgatcaaacatcgatcgaagctgtatccaccgctaccacgta

SEQ ID NO: 1921 - DNA, 966 bp, unidentified
  source 1..966: mol_type = unassigned DNA; note = Bacteriophage uvig_394091 from the Index of /pub/databases/metagenomics/genome_sets/gut_phage_database (ebi.ac.uk)
aagaaaaaacgcaaggtggagggagctgataagcgcaccgccgatggttccgagttcgaaagccccaagaagaagaggaaagtctagttctgcagagggtgatgccattcgacgaacttgtttattgcagcttataatggttacaaataaagcaatagcatcacaaatttcacaaataaagcatttttttcactgcattctagttgtggtttgtccaaactcatcaatgtatcttagtaccgcattcatttcagtgagagcttactcatcagagttcgcgacttcgagcggggcttcatcaaggccgagatcatctccttcgacgagctcatggagctggggtcgatcgcggaagctcgtgcccacggcaagatgcgcatggagggcaaggactacgtcatgcaggacggggacgtggtcgaattccgcacagggcttacgtctaagaagtaaactggaggtatgaactagacctcctctcagccagtccgcgcagccatctatctccgtatctcactcgacagagagatggacgggctcgctatcgagcgccagcgtgaagactgcgagaacctcgcgacgtccgtatcagactaacgcttatccatagggcaagaaggggtttgctcctgagtctgttgagatcgtgtggaagcagtgaggctccgccgtggtgctgtgggtggggttcaagaagcatccgagaccgcgccctagcgggcgcgatgaggagcaactgtacagcgcccctatggggcgcgagctcatcctcactcgtgcatgatctcgtgggagaaagtgaatgatggggaggtcatgctcataacctcaccttggaaacctcacctcaggagttgtatcacttaaaccccgttgtatcacttgtgtatcacccaaaatcacacaagggaatcgtcgactgcacgatcaaacatcgatcgaagctgtacatctcaatctcacgta

SEQ ID NO: 1922 - DNA, 966 bp, unidentified
  source 1..966: mol_type = unassigned DNA; note = Bacteriophage uvig_598290 from the Index of /pub/databases/metagenomics/genome_sets/gut_phage_database (ebi.ac.uk)
aagaaaaaacgcaaggtggagggagctgataagcgcaccgccgatggttccgagttcgaaagccccaagaagaagaggaaagtctagttctgcagagggtgatgccattcgacgaacttgtttattgcagcttataatggttacaaataaagcaatagcatcacaaatttcacaaataaagcatttttttcactgcattctagttgtggtttgtccaaactcatcaatgtatcttagtaccgcattcatttcagtgagagcttactcatcagagttcgggacagatcctcctattgagctttgtatcagattggcagtaaagaggagttgatctttggtttgattaattccatcacaggtgtgcagattcttctgttccgacgtctgtgagaataccggttactttatcatacggacaggtgtagcgttggtgcagatatcgcatggatgcaccaagctcaccgtcaggacctccgagcggctttttgatataatcaaaattcatagaaataaattgccaggttatctctgtttttttcgcatatcacgctttctattatggtccggagagcttcgttgacgtccgtatcagactaacgcttatccattccgaggttttttgagatgatatctatgttatcggaattgtctcccgaacaatacgacagccttattgccgttatctcagcgctccgtaagaagtaatatatgggtaattcagatccgatttttgacctgcatgactgttttataacgaaatttttagtgtatttatatcgatcctgcggttcgttttttcagacgttccgatgattattgtaaattttgcctatcataataacagaggggaaatacagaatgttctatcaacccgaaaaggaactgaagcctgaggaaatattactgtaggaatcgtcgactgcacgatcaaacatcgatcgaagctccggctaacgtggttacgta

SEQ ID NO: 1923 - DNA, 966 bp, unidentified
  source 1..966: mol_type = unassigned DNA; note = Bacteriophage uvig_517008 from the Index of /pub/databases/metagenomics/genome_sets/gut_phage_database (ebi.ac.uk)
aagaaaaaacgcaaggtggagggagctgataagcgcaccgccgatggttccgagttcgaaagccccaagaagaagaggaaagtctagttctgcagagggtgatgccattcgacgaacttgtttattgcagcttataatggttacaaataaagcaatagcatcacaaatttcacaaataaagcatttttttcactgcattctagttgtggtttgtccaaactcatcaatgtatcttagtaccgcattcatttcagtgagagcttactcatcagagttcgtggaaagtcaacatgttaaaaagtgggtagataggagactacgacgaatttaacgaaagagatatgaaaatagcgtttatggctacggggatagaacggcgtagcagggctgcaatgatagaggaaagcgaggcgggaaatgagaaaacgaaaacgacaggcagttaagaaactgatacagtgcgcagccgttatagcggcaggcgtgctggcaattattttgtttatgctggctatctggtacagaggaaagaacagcgagccagtaacagacgaacaggtagcagcacagatgcagcagacgtccgtatcagactaacgcttatccatgtgaattagagcagaggaaagaaaaggccactgcggagggaaaacgggaacacccttggattgaggatttcaagtgctatcagaatattacacagcttgatcgtaaagcggtagttactctgattgataaagtcattgtgtatgggaaagatcgtctggaaatttgcttcaagtatgcagacgaaatacaggaaatgacagaagcagctcagaatattcgggaaatggaagaaagggaaggtagatttaaatgcggtgcgtaagttatacaaggactacatcgtgcaaaaatacaaagaaggaatcgtcgactgcacgatcaaacatcgatcgaagctggagtgacagtccaatcgta

SEQ ID NO: 1924 - DNA, 966 bp, unidentified
  source 1..966: mol_type = unassigned DNA; note = Bacteriophage uvig_223324 from the Index of /pub/databases/metagenomics/genome_sets/gut_phage_database (ebi.ac.uk)
aagaaaaaacgcaaggtggagggagctgataagcgcaccgccgatggttccgagttcgaaagccccaagaagaagaggaaagtctagttctgcagagggtgatgccattcgacgaacttgtttattgcagcttataatggttacaaataaagcaatagcatcacaaatttcacaaataaagcatttttttcactgcattctagttgtggtttgtccaaactcatcaatgtatcttagtaccgcattcatttcagtgagagcttactcatcagagttcgataaaataaaaatagagggcactaaaccctcatcaataaaatttttagaataattcatcccctaactaacgtaaccgttctgtctggttaattagggaataattattttacatcaattaataatttctactaacacgtctcatgcgagacgcgacctttagattaatccaacaatttatatggatttacatcaagagcttttgctatacataatcccaccgtaaaacttggttctatcctccctgagcggtatgcctccagtgtacgcttttttatccccgtcatatcagcaagctgctggacgtccgtatcagactaacgcttatccattctctatatctttttgcgagaacccagattttccagtcattttctttgatattgaattagtcgacaatccaatagcctcagcaaaattctcctgtgtaccatacttttcaattatacgtcctctcaatttattgtatttataattcaaatagctctcctcctttcattcgtagtttaacatcgtttagccataatgtcaacacaaaagttaagtttcatcaaattttttgtttggctgtttaactcaattatgttatatttaagcgggcttattgatataattatatttataaaacttgaggaatcgtcgactgcacgatcaaacatcgatcgaagcttacagttgaccgagttcgta

SEQ ID NO: 1925 - DNA, 966 bp, unidentified
  source 1..966: mol_type = unassigned DNA; note = Bacteriophage uvig_347727 from the Index of /pub/databases/metagenomics/genome_sets/gut_phage_database (ebi.ac.uk)
aagaaaaaacgcaaggtggagggagctgataagcgcaccgccgatggttccgagttcgaaagccccaagaagaagaggaaagtctagttctgcagagggtgatgccattcgacgaacttgtttattgcagcttataatggttacaaataaagcaatagcatcacaaatttcacaaataaagcatttttttcactgcattctagttgtggtttgtccaaactcatcaatgtatcttagtaccgcattcatttcagtgagagcttactcatcagagttcgagttaaagatacacaattagaatttgtagaaaccttaaaggatttagattgcagagttggtagtattgaaaatgatgtagatataatcaaaactgatatgagtataattaagactagattagaaattaaacaatagggatgtttttatagcatccctttttttcgttttttggttatatttgccttgtttatgttgtatgtgttatactatgtataatgaaaaatacatacaaattaggggtgattttacatgaagaatactgtaaaagtatgtgcttattgcagggtgtcaacaaataagacgtccgtatcagactaacgcttatccattagatgtaattcaagaagatataagtaataatgagggtttaaggctgttgtaaaatgtaccaaccaagattcattgtatagtacaatttacaaccgatatgttgactaatgtttaagtatatttgattaccgaaaagtgcgtacatcaaatatacttatttatttgtcaaaaagcttgactttttattgtatttatgatacatttttggtaacaagtaaatagtacggttatcaaaacggtaaacgtaaatagatggtatcgccctgaagagggtagcgaataagctggaaacgaatgaaggaatcgtcgactgcacgatcaaacatcgatcgaagctcgcttccaacatagttcgta

SEQ ID NO: 1926 - DNA, 966 bp, unidentified
  source 1..966: mol_type = unassigned DNA; note = Bacteriophage uvig_47521 from the Index of /pub/databases/metagenomics/genome_sets/gut_phage_database (ebi.ac.uk)
aagaaaaaacgcaaggtggagggagctgataagcgcaccgccgatggttccgagttcgaaagccccaagaagaagaggaaagtctagttctgcagagggtgatgccattcgacgaacttgtttattgcagcttataatggttacaaataaagcaatagcatcacaaatttcacaaataaagcatttttttcactgcattctagttgtggtttgtccaaactcatcaatgtatcttagtaccgcattcatttcagtgagagcttactcatcagagttcgtatcatataaagaacttggtgaagctgctgctgaatatgccaaaacacattaaataaaaggtggggagatttttaagatttccctacctttcttctatataaatcagcatactaagtttaaagaagcttaaataattggctatcatttctatagtttctatattttcattacttttgtggtatatttataaactaacaattcaaagctatatgaacaactttgtagcgatagattttgaaaccgccaatgcagatagaagtagcatctgccaaattggtataacagaagtagtagatggcgacgtccgtatcagactaacgcttatccatctgaacgtcagagtttgaaaaataggccatctatccatagagctttagattattagtgctgttggctacctttgcagcaataattacacatgttacatatatacaaaaaacgtggagccagtcctgtcactcgttccactgtagaaaggccttcgcattgccctgattgtaagttgaaaatcaaagttctagcagctattgcatattccaaatattctttgtatctttgcaccatcaaaacaaagaaatcatggataaaagaatactgtgcattattagagcgagcaccgagaaacaagaggaatcgtcgactgcacgatcaaacatcgatcgaagctctagtgataccgtacgtgta

SEQ ID NO: 1927 - DNA, 966 bp, unidentified
  source 1..966: mol_type = unassigned DNA; note = Bacteriophage uvig_539751 from the Index of /pub/databases/metagenomics/genome_sets/gut_phage_database (ebi.ac.uk)
aagaaaaaacgcaaggtggagggagctgataagcgcaccgccgatggttccgagttcgaaagccccaagaagaagaggaaagtctagttctgcagagggtgatgccattcgacgaacttgtttattgcagcttataatggttacaaataaagcaatagcatcacaaatttcacaaataaagcatttttttcactgcattctagttgtggtttgtccaaactcatcaatgtatcttagtaccgcattcatttcagtgagagcttactcatcagagttcgtggatcgggagaccaagaagggtttccgccaggaaaggagcataaaaaaatgaaacagatcaccatagatattgaaacggcatctgacgagaatatcaaagactgcggtgtataccgttatgcagagtcggagtgtttcgacttgctgctgatctcttacgctgtggacaatggtccggtagcaacctgtgacattgccaacggtgaaacattgccggacgatgttcggaatgcactcacagacaagactgtcatcaaaaaggcgttccatgtcaattttgaacgcatctgcctctctgtgacgtccgtatcagactaacgcttatccattatttgatagaaatttcctaaaacatacaaattacaaaaacggctgccatgtctataccggcatggaaaccgtattagataaatcaggggcagaactgcccgaaagcgtgataaagctgctctacagaatttacgtagaaacagcagaaaaaccggaagaaatggatgaagcatattttgtctgaagggtgcggtaaagcaccttcagcttaatatagataagatgttttttgagaaaggaatgatcgctatgacgatggatcgatctgcacattcccggctcgctgtgacgtaccgcagggaatcgtcgactgcacgatcaaacatcgatcgaagctgcgtctactgagtgactgta

SEQ ID NO: 1928 - DNA, 966 bp, unidentified
  source 1..966: mol_type = unassigned DNA; note = Bacteriophage uvig_124673 from the Index of /pub/databases/metagenomics/genome_sets/gut_phage_database (ebi.ac.uk)
aagaaaaaacgcaaggtggagggagctgataagcgcaccgccgatggttccgagttcgaaagccccaagaagaagaggaaagtctagttctgcagagggtgatgccattcgacgaacttgtttattgcagcttataatggttacaaataaagcaatagcatcacaaatttcacaaataaagcatttttttcactgcattctagttgtggtttgtccaaactcatcaatgtatcttagtaccgcattcatttcagtgagagcttactcatcagagttcgcggcgcggttccagaaaggaggcacccatgacgaaggaacagtttgaccgggagaaaaagtatcaggcggccctcgcggtggcccgtgaaatgctgcaaaaaggcgtcataaacgaggcggattttctgcgcattgaggccagactggcggcaaaattccggcctgttttgggcggtattttctgctgaaaagcctttcttttcagggtggcttcctataacatcagtgtcctgaaaggagggcgtatttatggaacgcattattcaaaaagttaccccgcccgcgcggaaaaaagcgccgacgtccgtatcagactaacgcttatccataactggcgctccggcaggccgcagaaaggaggcttgccaaatgccagcagtaacagcgacgcgggtaacgattatccctgcaaagaaagaccggcttcccatcaatgtactgagcagcgaggcccgcaagctgcgggtggcagcctatgctcgtgtatccaccaacaatgaggagcagcttaccagctatgaggcgcaggtggactattatacccggtacattcaatctaaggacgagtggcagtttgtagaggtttataccgacgagggcatttctgccaccaacaccaaaaagcgcgaggaatcgtcgactgcacgatcaaacatcgatcgaagctcacgagtggtaaggcctgta

SEQ ID NO: 1929 - DNA, 966 bp, unidentified
  source 1..966: mol_type = unassigned DNA; note = Bacteriophage uvig_430255 from the Index of /pub/databases/metagenomics/genome_sets/gut_phage_database (ebi.ac.uk)
aagaaaaaacgcaaggtggagggagctgataagcgcaccgccgatggttccgagttcgaaagccccaagaagaagaggaaagtctagttctgcagagggtgatgccattcgacgaacttgtttattgcagcttataatggttacaaataaagcaatagcatcacaaatttcacaaataaagcatttttttcactgcattctagttgtggtttgtccaaactcatcaatgtatcttagtaccgcattcatttcagtgagagcttactcatcagagttcgtaaccatatatccgtcacttgcagggggcgataaaatctacccccgataagaagcagtgccgattcgggcagcaggagcaattctgctgctcgttttcttttgtgtgaccccctggctcatgcgccgcagggtagtcataaataacaatcagcaaggaggttaattgtccaatgaaaaacagtaagcgaggaggtgcgccgcctatgaaccacatcgggaatatccgtatatctgcaagggagggcttatatggcaaagaaacttgaccctcaagagatagagcagtcccgccgaaaaaagacgtccgtatcagactaacgcttatccatgctggacagcttcggaacgccgcgaactgctgaaagagctgaaaaatctctaataccgaaaggaaaatccattatgaaatttgattttaacgcactgaactttgagatccttgatgcgaacaccaacgcataccccgacattttcattaaccagaacggtgtcacctttacgaaaaaggtacttgatgacctgaactatcctgcttttgtcctgtgccagcttgacgcaaaaaacaaggtttttgcggttcgtatgtgtaagagtagtgagcagaggggctacaagttctccaagccgaaggaatcgtcgactgcacgatcaaacatcgatcgaagctgagcggcctgaattcctgta

SEQ ID NO: 1930 - DNA, 966 bp, unidentified
  source 1..966: mol_type = unassigned DNA; note = Bacteriophage uvig_581111 from the Index of /pub/databases/metagenomics/genome_sets/gut_phage_database (ebi.ac.uk)
aagaaaaaacgcaaggtggagggagctgataagcgcaccgccgatggttccgagttcgaaagccccaagaagaagaggaaagtctagttctgcagagggtgatgccattcgacgaacttgtttattgcagcttataatggttacaaataaagcaatagcatcacaaatttcacaaataaagcatttttttcactgcattctagttgtggtttgtccaaactcatcaatgtatcttagtaccgcattcatttcagtgagagcttactcatcagagttcgaaaaaaataatattatattttttgaagttcttcaaaattggcttgctgcttagtgtttagcagccgtttaaatttttacccaaaaatataatgaaaaatataacaaattttattccaatttcaaaaggaattgcccacacgttgaagcatgggcaaactattcaagaagtagaatcacaaagattttataaatttttccatatcgttcagcctattcagccaaccattcagaaattttttctgatttccgtatttcgcaaactcataatattttgcttttttcgctgcaatatatttttcgacgtccgtatcagactaacgcttatccataaatatgattccagggttggacactatgttttaaaagatgatgaggttacaaatcttcttcgtgaacacggggttaaatttgaagttgacaatccggatcttttattctccggtgtatgcgtttcttcagaagaaacatcaaaaatcaataataacacccagatattgaaaattcttaaaatttgtttactgattattttttggcctgttggcttatattatttgatacgcaaaaaaaataggagtaccaatgtctgatactcctaaattaaatgcagctttttatggtagatattccgcggaatcgtcgactgcacgatcaaacatcgatcgaagctcgcattcgctggtagttgta

SEQ ID NO: 1931 - DNA, 966 bp, unidentified
  source 1..966: mol_type = unassigned DNA; note = Bacteriophage uvig_154343 from the Index of /pub/databases/metagenomics/genome_sets/gut_phage_database (ebi.ac.uk)
aagaaaaaacgcaaggtggagggagctgataagcgcaccgccgatggttccgagttcgaaagccccaagaagaagaggaaagtctagttctgcagagggtgatgccattcgacgaacttgtttattgcagcttataatggttacaaataaagcaatagcatcacaaatttcacaaataaagcatttttttcactgcattctagttgtggtttgtccaaactcatcaatgtatcttagtaccgcattcatttcagtgagagcttactcatcagagttcgaagtatcattatgttcgaaaagaagtcattaacacgctcatatgcatttgaaaactctggagtatcagatttctttaaacgaagaaggttaataaagaagtgactgtccttgtttattatagaatcaaatacacccaattcgtctagtcggtcattcaattcaaaaaaatccgaaataaatactggttccactttcattattcctccttgccttagtattccttcacatctcagccagtcataagaccgcatgaccgagaatgttctgaaggggaagtacaacggcggcacgattcccatgacgtccgtatcagactaacgcttatccatcgttttttatacctaaaaaactttggcagaccgtgccggattccgaaccctgaagtcggatgcgaaccgggcggggtcatccatgtactttttgaaaatccatcggtttcacgcttttttctttgcattttgcagagtgctgcgggcaagcgcatcgcttttatgcccccttctcggaaatttcttcaaaaatttccgcaccatcgtaggttgacacagccttgagctgttccacttggttgaagctggcgttcagggtgatcgagatttcgtagtcttttcggacgcgaatctccttaaggaatcgtcgactgcacgatcaaacatcgatcgaagctagcaggattcagaacttgta

SEQ ID NO: 1932 - DNA, 966 bp, unidentified
  source 1..966: mol_type = unassigned DNA; note = Bacteriophage uvig_597740 from the Index of /pub/databases/metagenomics/genome_sets/gut_phage_database (ebi.ac.uk)
aagaaaaaacgcaaggtggagggagctgataagcgcaccgccgatggttccgagttcgaaagccccaagaagaagaggaaagtctagttctgcagagggtgatgccattcgacgaacttgtttattgcagcttataatggttacaaataaagcaatagcatcacaaatttcacaaataaagcatttttttcactgcattctagttgtggtttgtccaaactcatcaatgtatcttagtaccgcattcatttcagtgagagcttactcatcagagttcgggctgttgctgttttacatagcacgaccaaggcaaagagaccgcagatcttgatctgcggtctcttcttttttgaagggggggattaatgctgcactacatagcagtagtacgccgcggccttgtcctcgacggcgtccttgtcatcgagccaagcgtgcgccatgtccgcgtaaaactcggcgttgccgccaagaccgtactttttcgcgacctcgcaaaaatcggagtacatcgcgcacataatcgcgtgccatatggccggatcgtagtgatacccgcgctgcgtcatcacctgtgtgacgtccgtatcagactaacgcttatccatgctttgccgacgtcggtgggcttggcgtccgtccccgcccgcaatatgattttgacgcgctgtatgccaagtacccccgcgcagccgcatacctcaaagccgacggcatggctcttgctgagcatgatgtcaaagctgccgctgggcgtaaggcgcgcgagcgcattatcaacggtgaggacggctccgaggcgttggccgatgccgaggctgagtgggcagcgtattgcgctgagcatatatgggactaatgccgcatccggctgtagcccttgacaaaaaacccgtttgcagttactaggaatcgtcgactgcacgatcaaacatcgatcgaagctcgtgtgtcgcctattaacta

SEQ ID NO: 1933 - DNA, 966 bp, unidentified
  source 1..966: mol_type = unassigned DNA; note = Bacteriophage ivig_2971 from the Index of /pub/databases/metagenomics/genome_sets/gut_phage_database (ebi.ac.uk)
aagaaaaaacgcaaggtggagggagctgataagcgcaccgccgatggttccgagttcgaaagccccaagaagaagaggaaagtctagttctgcagagggtgatgccattcgacgaacttgtttattgcagcttataatggttacaaataaagcaatagcatcacaaatttcacaaataaagcatttttttcactgcattctagttgtggtttgtccaaactcatcaatgtatcttagtaccgcattcatttcagtgagagcttactcatcagagttcgaagttatcggaggtatcactgccgaggctcttttgctcaccgcaccagactaatcaaacgccccaaaaatcgcgccgcaaaattttttaaaaaactagaaaaatttcttgacttcttggtcgtggcatgatattatatacaagcagtcgacaaacggcactgcgaaatgcgccggtagctcagctggatagagtgtttggctacgaaccaaaaggtcgggggttcgaatcccttccggcgtaccacggacatccgaaaggatgtccgttttctttttccccaaaagcaaacagcccaatcgacgtccgtatcagactaacgcttatccatatcgcgcgaggcactaaccaaaaaccagagctaacagcagcatatagatcctaatgtttcatgaaaaaaaccgcccagtggatgacagcactgggcggttcgaacagggttacaggggatcgatgcagacgaaagagatgtgattgatgctcgacgcttacgtatcgggctggagagcaatcatatcaaccctgtgcccttattatagcatagcaagataggggaatacaatgtgagattgaatacattgatgccggacgattgtgcggtcatctatgcgcgctactcatcacacgcgcaggaatcgtcgactgcacgatcaaacatcgatcgaagctgtacgctaatggcgagacta

SEQ ID NO: 1934 - DNA, 966 bp, unidentified
  source 1..966: mol_type = unassigned DNA; note = Bacteriophage uvig_458373 from the Index of /pub/databases/metagenomics/genome_sets/gut_phage_database (ebi.ac.uk)
aagaaaaaacgcaaggtggagggagctgataagcgcaccgccgatggttccgagttcgaaagccccaagaagaagaggaaagtctagttctgcagagggtgatgccattcgacgaacttgtttattgcagcttataatggttacaaataaagcaatagcatcacaaatttcacaaataaagcatttttttcactgcattctagttgtggtttgtccaaactcatcaatgtatcttagtaccgcattcatttcagtgagagcttactcatcagagttcgagttattttccgaatgcgtatgggacggaaagaaacttcatattaaaatttaattcatctccctttttcattatgtatccagttggattcatccgaagggacgcccgtatcagctggctcatggttatctcgccttccccttccgtattggcgtttcttgtctccaggcgcaccaggttgggcacctgggtaatctgcagttctgcggaatcctcaatggtgatgacgcgttcctggggcggtataaaggaagacaatgcattcaggaatgtggtcttgcctgaattggtgcccccgctggacgtccgtatcagactaacgcttatccataaaatcagtcttttaaaaaaccttaggactccgacagaacaactcatcttgcagaactttaaggagcatctgaaccggatttcttaaatttaaaataaaaagcccctgtgctaccaacacagaagcttttcattgatttctcttactggacaatccagaaagatacaatcagaatcatcacctgaattatatcattcctgggacgtcctggcaagagggcgtattttttatacttataaggagtgatattatgttggtttttggaatctatgcaagaaaatccctacacagcgaccagtcggaatcgtcgactgcacgatcaaacatcgatcgaagctgacttactaagtgcagacta

SEQ ID NO: 1935 - DNA, 966 bp, unidentified
  source 1..966: mol_type = unassigned DNA; note = Bacteriophage uvig_200526 from the Index of /pub/databases/metagenomics/genome_sets/gut_phage_database (ebi.ac.uk)
aagaaaaaacgcaaggtggagggagctgataagcgcaccgccgatggttccgagttcgaaagccccaagaagaagaggaaagtctagttctgcagagggtgatgccattcgacgaacttgtttattgcagcttataatggttacaaataaagcaatagcatcacaaatttcacaaataaagcatttttttcactgcattctagttgtggtttgtccaaactcatcaatgtatcttagtaccgcattcatttcagtgagagcttactcatcagagttcgccatttttggaatgaacgaaagaaggtatctaaatgctaaattttgataacattaggaactattacaattcattaattattattaaaagcatgttgaatcagcaaattatttcaaaagaagatgccataaaatctgagtcttttttagctaagaaatattgtatcaaacctgacagcatttatcgtctaaatgacttgataaatgacgataatagagtgatgtatagtagcgaaaggacgtgaataaataatgaaaatagtaacagaaattggtgcaattgctccaattaagaaactaaagacgtccgtatcagactaacgcttatccattagaaaaaaatctaaaaagaggagctgatggaaaatgggtaaagtcagagtaataccatcaacgattaatcctttaacgcatcaaagtattgtcgccaatgtgaaaagaaaagtagctgcttatgcacgtgtttcaactgattcagatgaacaatatacttcatatgaagctcaagttaattattacactggttatattcagtcaagagtagactgggaatacatcaatgtttatgcggatgaaggaatatctggcacaaatacaaagaagcgtgttcaattcaataaaatgattgaggaggaatcgtcgactgcacgatcaaacatcgatcgaagctttggcttcagttatcgacta

SEQ ID NO: 1936 - DNA, 966 bp, unidentified
  source 1..966: mol_type = unassigned DNA; note = Bacteriophage uvig_307306 from the Index of /pub/databases/metagenomics/genome_sets/gut_phage_database (ebi.ac.uk)
aagaaaaaacgcaaggtggagggagctgataagcgcaccgccgatggttccgagttcgaaagccccaagaagaagaggaaagtctagttctgcagagggtgatgccattcgacgaacttgtttattgcagcttataatggttacaaataaagcaatagcatcacaaatttcacaaataaagcatttttttcactgcattctagttgtggtttgtccaaactcatcaatgtatcttagtaccgcattcatttcagtgagagcttactcatcagagttcgacattgcgtggggaacggtatttgtccaaacaaaaagacactccttaccgtaatggtagggagtgttttctttgtatctaaggcacttaggtgagttaggtgagtaatcgggctaaaatccctataacttcttcttagtacgcgcgtatatagaaaaagttatagggaaatgtacccgattactcaccttcctcacctaaactttttaaatttaggggcaattatagtcttacttcttccccttcaccacgaacccggtgaaccccgccgctttcagcttctccagcatcctgtcggcgtgacgtccgtatcagactaacgcttatccattgtccgataaactgagctatactcacctaccttgtgaacaggcagtaagaaacatccggcaacagctcgggcgaatgcggaaaagaatctatgattctctgtacaatagcctcgaaatgccgctcacaagcggacgcaatataacagaatttctttgtaagtgcgacagatttcaaggagtttccgttcaagtatttaatgattactacgcttttttgaatgaaaagctgattgaaagggggccgctggtatgaatgtagtcatatatgcccggttttcctcacacagtcaaacagaacaggaatcgtcgactgcacgatcaaacatcgatcgaagctcggcgcatcatctctgacta

SEQ ID NO: 1937 - DNA, 966 bp, unidentified
  source 1..966: mol_type = unassigned DNA; note = Bacteriophage uvig_396131 from the Index of /pub/databases/metagenomics/genome_sets/gut_phage_database (ebi.ac.uk)
aagaaaaaacgcaaggtggagggagctgataagcgcaccgccgatggttccgagttcgaaagccccaagaagaagaggaaagtctagttctgcagagggtgatgccattcgacgaacttgtttattgcagcttataatggttacaaataaagcaatagcatcacaaatttcacaaataaagcatttttttcactgcattctagttgtggtttgtccaaactcatcaatgtatcttagtaccgcattcatttcagtgagagcttactcatcagagttcgatatgttgcttacaatgtttcgctcgatggatgcaaaagggcaagacaggcttcttgaaatagccgatgatatggtgcgttctgggaaatacgtaaaaaaggaagtgcaagattatccaattcagcaagctgcaatcgcttagacaaggcacttgataaaagaagccccctgtttcattgcttggcggcaaaacagagggcgcgcccatcgcagaaaggctaattcattgaaaggcaagttcattctatcatggctgtgaagttaatcagatgcgctttctatgcgcgcttcagctgtgagacgtccgtatcagactaacgcttatccatgaggactcgaacctccgacgcacggtttaggaaaccgacgctctatccgctgagctacgggggcggatatctggatttcgccgctagatatgcttgagcacttccatgacaaaatcgctgttcaaggctaacatgtcgttgtcgatgttttcaatgacatcgtcctcttcggcgaagaatgccggttttctgccatccatgcccgccaaatgcagggcctgctggccgtgcttcaaggcgtaggccgatgcgctgttgcgccattccatcgtagcctcgggcactttcagcccggtggccggaatcgtcgactgcacgatcaaacatcgatcgaagcttagctgccaagccaacacta

SEQ ID NO: 1938 - DNA, 966 bp, unidentified
  source 1..966: mol_type = unassigned DNA; note = Bacteriophage uvig_568903 from the Index of /pub/databases/metagenomics/genome_sets/gut_phage_database (ebi.ac.uk)
aagaaaaaacgcaaggtggagggagctgataagcgcaccgccgatggttccgagttcgaaagccccaagaagaagaggaaagtctagttctgcagagggtgatgccattcgacgaacttgtttattgcagcttataatggttacaaataaagcaatagcatcacaaatttcacaaataaagcatttttttcactgcattctagttgtggtttgtccaaactcatcaatgtatcttagtaccgcattcatttcagtgagagcttactcatcagagttcgtaaataaaaaggtagaacaaatttatgatgataggcttaatcggtgtaattgatgaaactgattatattagatattctcaaaaattcttaaaagaaagaaagcaagtagaagaaaatattgaatccttaaaacaaaaaatagaaataataacatctaatgaaaaaaaagaagctaccaatcaagaagtaaaagaaaaaacaaaaaactttttaaaagcagattacattaataaggaaattctttttgatattgtagataggattgaaattgatgaaaataagaaaatatatattcatttcgacgtccgtatcagactaacgcttatccataaaatgtttctaaatgtaagtaatccacgcgactttaaagttgcaatgtatataagattatctaaggaggacggtgataaacaagaaagtgaaagtgtaacgaatcagagaaatctaattttgagatatataaaagataacaatttagagctttttgatgaatatattgacgatggtgtaagtcggaactacttttgatcgacctggatttaatagattaattcgtgatattgaagacaacaaagttaatatggtaataacaaaggatttatcaagacttggcagagactatataaaaacggaatcgtcgactgcacgatcaaacatcgatcgaagctcaacagcctacgtgacacta

SEQ ID NO: 1939 - DNA, 966 bp, unidentified
  source 1..966: mol_type = unassigned DNA; note = Bacteriophage uvig_199869 from the Index of /pub/databases/metagenomics/genome_sets/gut_phage_database (ebi.ac.uk)
aagaaaaaacgcaaggtggagggagctgataagcgcaccgccgatggttccgagttcgaaagccccaagaagaagaggaaagtctagttctgcagagggtgatgccattcgacgaacttgtttattgcagcttataatggttacaaataaagcaatagcatcacaaatttcacaaataaagcatttttttcactgcattctagttgtggtttgtccaaactcatcaatgtatcttagtaccgcattcatttcagtgagagcttactcatcagagttcgaggatgaattccagcagatagcagaagaaatggaaggtgttcagattggctaatggattgtatttaagactctctatagtagatggagatttagggaaagaaaataaagatgaaagcaacagcattgataaccagagatcgcttcttgtcaattttatcactgacagagaggacatgagtgatgaatacatagaatatgtggatgatggatattccggaacgaattttgaacgtccggcatttaagaaaatgatagaagatgcgaaggcaggaaaaatagataccgtcattgtaaaagacgacgtccgtatcagactaacgcttatccatagcttcgtatgtatgatggagatttcagtgaacttatgaaagaggtatccgttatagaaaaagcatatagcaataaaaatgaatggttagagacttttaagaaagagaatcttccgaaagaactacagccagagcatatcaataaatggattgagaaagtattgataagagattttaaagaagtgcaggtatgtttatccaagcaggaatggaaaaaatactttccagcagaatggatggaggaatagggatggcaagaaagagcagaaaaaacagaaacgtagaatctaatatacaaacggaatcgtcgactgcacgatcaaacatcgatcgaagctgtatggttcgacacacacta

SEQ ID NO: 1940 - DNA, 966 bp, unidentified
  source 1..966: mol_type = unassigned DNA; note = Bacteriophage uvig_181597 from the Index of /pub/databases/metagenomics/genome_sets/gut_phage_database (ebi.ac.uk)
aagaaaaaacgcaaggtggagggagctgataagcgcaccgccgatggttccgagttcgaaagccccaagaagaagaggaaagtctagttctgcagagggtgatgccattcgacgaacttgtttattgcagcttataatggttacaaataaagcaatagcatcacaaatttcacaaataaagcatttttttcactgcattctagttgtggtttgtccaaactcatcaatgtatcttagtaccgcattcatttcagtgagagcttactcatcagagttcgttcaatatagtaatatacttgtacagagagaaccatattgattatggttgaaaggcacttacgcaagttattgcgtgggtgtcttttactttatactgaatttataaaaacaaaagccccaccgaagtgaggctaatgctatcaggttgcaatgatacaacccgaaactcgcaatttcattgtatcatcgtcaccctgaaaaatcaatattcagggtatttttatacccatttttaaggagatgatacatatgactatcgcatgggcatactgccgcttcagcagcgatcaccagagagagacgtccgtatcagactaacgcttatccattcgacgcccgcattaaatatctggaaggaaaaatccagtatagcgaaagcattcaccacaatccaggcggtaaaagccacccagattgtggatacgatggtggaagcgactttttccgctttatatccacaatcgaactcttaaattacaggcatcgtacccggtgataagtttattgtagcatactgaactattcatcatgtaaattttttgttggcagtgcacgaacctttgctattctcgcatccatgtccccattccagccgtgggccttgtatactttccagaactcttctaattggaatcgtcgactgcacgatcaaacatcgatcgaagcttcattggaccgaatccacta

SEQ ID NO: 1941 - DNA, 966 bp, unidentified
  source 1..966: mol_type = unassigned DNA; note = Bacteriophage uvig_38906 from the Index of /pub/databases/metagenomics/genome_sets/gut_phage_database (ebi.ac.uk)
aagaaaaaacgcaaggtggagggagctgataagcgcaccgccgatggttccgagttcgaaagccccaagaagaagaggaaagtctagttctgcagagggtgatgccattcgacgaacttgtttattgcagcttataatggttacaaataaagcaatagcatcacaaatttcacaaataaagcatttttttcactgcattctagttgtggtttgtccaaactcatcaatgtatcttagtaccgcattcatttcagtgagagcttactcatcagagttcgattggcgaaagagtgcgggataagcccttcggctgtgaacagttggttcaaccgaagcgctgagaacataagccttccgacgctcaagaagctgtcggaatacttcggagtaagcatcgaggaacttgtctacggaaacgaaacaaggcgcgagataacgttctccacgccgaactacaccaacgaggaattggagcaaatagcgcagtacgcgatgttcctgaagcagcagagaaaggattgattatgaatggcatacgcaatgtatttgagaaaatctagaaaggacgatgacactgggacgtccgtatcagactaacgcttatccatcagaatcgggaagccatatcgaaccgcagctagagtacactctgcgaatctgattcggcttccctctcttttaaagctataaggtagcatggagaatccgatttatctgatacccaatgatgccagagaacgaaagcccctcgtttgaggggcttttctcgatgtttcacgtgagatctatgctgttcgccgccacatgtacacagccaggtatgggggaaggttgttgtgcggctggtttccgcccgcgtacatcgtcttgacgttgccgccgaatcccttcttgtcctgcgcctgaacggaatcgtcgactgcacgatcaaacatcgatcgaagctacatggactgcgcgctacta

SEQ ID NO: 1942 - DNA, 966 bp, unidentified
  source 1..966: mol_type = unassigned DNA; note = Bacteriophage uvig_16065 from the Index of /pub/databases/metagenomics/genome_sets/gut_phage_database (ebi.ac.uk)
aagaaaaaacgcaaggtggagggagctgataagcgcaccgccgatggttccgagttcgaaagccccaagaagaagaggaaagtctagttctgcagagggtgatgccattcgacgaacttgtttattgcagcttataatggttacaaataaagcaatagcatcacaaatttcacaaataaagcatttttttcactgcattctagttgtggtttgtccaaactcatcaatgtatcttagtaccgcattcatttcagtgagagcttactcatcagagttcgggaagattgtctggaacactatctgagaggtctttgatttatgaacagtctgaatcttttcacccggttctatggacaagcgattgagcctgtggtataatgaaatcggtcaaaaaaagaagaatacggattaagccgcttgcctagatggtcatgtggcgttttcgtgttcctctcataagagttgaagcaagccttcgtctttctgatttgatgtaccacaccaaacagaaaaacggaggttatttttatgccagacaaggtttaccgcacggcgatctactgccgtctgtcccgtgagacgtccgtatcagactaacgcttatccatagacgattgaatacgttctcggctatgccgatgaactggatattgccgtataaaggggggatgagcaaatggcaagaaaaagcagaaagcaaattgcagttgaagagccggttatcgagtctgtttcttccgaggtcttctcaacagccatctatgcccgtctttccgttgaaaacagcggcaagtccgaaaaggtggatgtcatcgcaaatcagattgagatttgcaagtcctacattgcagagcgtccctacctgaatctgatagatacctatgtggacaacggacgaacaggaacggggaatcgtcgactgcacgatcaaacatcgatcgaagctcggtgtgttcaagcctacta

SEQ ID NO: 1943 - DNA, 966 bp, unidentified
  source 1..966: mol_type = unassigned DNA; note = Bacteriophage uvig_453325 from the Index of /pub/databases/metagenomics/genome_sets/gut_phage_database (ebi.ac.uk)
aagaaaaaacgcaaggtggagggagctgataagcgcaccgccgatggttccgagttcgaaagccccaagaagaagaggaaagtctagttctgcagagggtgatgccattcgacgaacttgtttattgcagcttataatggttacaaataaagcaatagcatcacaaatttcacaaataaagcatttttttcactgcattctagttgtggtttgtccaaactcatcaatgtatcttagtaccgcattcatttcagtgagagcttactcatcagagttcgtgcttgccttagtcgtttactgggtgttcttttaatcccctcattcctttttcaaaaaataaaaaatcccccggtgttgcaacaccgagggaccacgctctagatgttggcaacatcatggagctgtaatcacattctttttatacacttaccacagcaacaaaacagaactgattactataatagtataacaaatttttatcagttctgctactgcatgccaatttttttagcaaaggagctggtttttatgttaaaaaatatacccgctgttgtttacgcccgctattcatcctccaagacgtccgtatcagactaacgcttatccataattgtccccctgctttgcagggttcgacaaacgtaacttctggtggaggtgaggggagtcgaacccctgtccgaaaatattgccatacaactttctccgagcgcagacgtcatactttatttcgcgctgcgattgcctgacgacgggccttcacattgctatcctaaagagtttcccttaaagcctataggaatcagccttaaggtatcccactattgactgtcattcctcacccgcgggaagaggctcagagacagttagcagattaagctgctaaagcgtattcttgttcagcgtttggaatcgtcgactgcacgatcaaacatcgatcgaagctcttggatgttctgtcagcta

SEQ ID NO: 1944 - DNA, 966 bp, unidentified
  source 1..966: mol_type = unassigned DNA; note = Bacteriophage uvig_294132 from the Index of /pub/databases/metagenomics/genome_sets/gut_phage_database (ebi.ac.uk)
aagaaaaaacgcaaggtggagggagctgataagcgcaccgccgatggttccgagttcgaaagccccaagaagaagaggaaagtctagttctgcagagggtgatgccattcgacgaacttgtttattgcagcttataatggttacaaataaagcaatagcatcacaaatttcacaaataaagcatttttttcactgcattctagttgtggtttgtccaaactcatcaatgtatcttagtaccgcattcatttcagtgagagcttactcatcagagttcgtgtttaaaaaaataatagaaaatattaatatagaagatcgagaggacacaaaaaaaatattaagaaaaattataaaaagaataaatatagataatgaaaaaaacattgaaatttatctaaatatttaaaagcacaaagtttaaataactctgtgcttttatttctaagtaaacaatatttaaataagttttccaattttctggaaatcctaataaaaaaaatcgactctaacatgagccacataactaaaagtcagaggtgtgtaagagtctatatcatatgtaaatgatatcataataagacgtccgtatcagactaacgcttatccattatgacctgaatgtttttaaacattctaaatacaaacatagaccttttgcagtatatattgatggtaaagttaggatacaagaaacaggttcagcaattttaatagtaaatcaagattaaaagaagatattaatgtaataggaggaaataaaaatggttaaaattataaatgcagataaaacagacgaaaaattaatagaaatgttacaaaatgaaattataaatctagcaagcaagaaaggattattagatgagtaagcttaaagccattgcttattatagagtatctacagaaatgcaggaatcgtcgactgcacgatcaaacatcgatcgaagctataccaagtgtgctcggcta

SEQ ID NO: 1945 - DNA, 966 bp, unidentified
  source 1..966: mol_type = unassigned DNA; note = Bacteriophage uvig_550213 from the Index of /pub/databases/metagenomics/genome_sets/gut_phage_database (ebi.ac.uk)
aagaaaaaacgcaaggtggagggagctgataagcgcaccgccgatggttccgagttcgaaagccccaagaagaagaggaaagtctagttctgcagagggtgatgccattcgacgaacttgtttattgcagcttataatggttacaaataaagcaatagcatcacaaatttcacaaataaagcatttttttcactgcattctagttgtggtttgtccaaactcatcaatgtatcttagtaccgcattcatttcagtgagagcttactcatcagagttcgccgacggacgaatgaccttcaaattccagggcggcacagaaatcgaggcgtgagtcccaagaaaaatgaaaagaccgcaggtttcaacgcctgcggtttattgctgtccccatgggtagagtaatgcaccccctaaagccgtggttgcacccccctataatcaaaaatgcaccccccctctaaaccgtaattgcacccccttgcacggtttctatcaaaattacggttctttgccatagaaaaaaccgcattagaaagccatttttaagctttttagtgcggttatttttttgctttttagacgtccgtatcagactaacgcttatccataaggaaaaaaacactgcgcttccaagcagataccggaggccacccttgacgagctggtgcgacaggtcacggatgaccctttcagcgtcaaaaaaatcattgccgatgacggcaacaccctgcactttcacttttcagacggcactgcggtcacacgcacctggacagaccgttcacgagctgaaagctggacgccggaaatgaaagaaaaggcacgacagcagtcactggcaagaaggaggcaaaaatcatgaacactgcggttcggacggttacggtgataccaccgtccatcaacccggaatcgtcgactgcacgatcaaacatcgatcgaagctttgtgaatccagagtggcta

SEQ ID NO: 1946 - DNA, 966 bp, unidentified
  source 1..966: mol_type = unassigned DNA; note = Bacteriophage uvig_442559 from the Index of /pub/databases/metagenomics/genome_sets/gut_phage_database (ebi.ac.uk)
aagaaaaaacgcaaggtggagggagctgataagcgcaccgccgatggttccgagttcgaaagccccaagaagaagaggaaagtctagttctgcagagggtgatgccattcgacgaacttgtttattgcagcttataatggttacaaataaagcaatagcatcacaaatttcacaaataaagcatttttttcactgcattctagttgtggtttgtccaaactcatcaatgtatcttagtaccgcattcatttcagtgagagcttactcatcagagttcgtacattatgctttcaccctcgacctttatcccaaactcccaaaaagcccgtaaatacgggctttttgcataatgtccaacgtccatgtactgacgaactggcccatctggagatggtttccaccattgtccaccagcttacctgcaatctttctatggatgaaattgaaaaatctggttttgggccatattatattgaccatacagtagccgtatggccacaggcggctggtggcgtcccatttaatgcctgtgaatttcagtctaagggcgatccgattaccgatcttcatgaagatctgacgtccgtatcagactaacgcttatccataacaaatatatcccttccacatcatccaatagtgcgaacacctgtaatcagtggtgggatatattcattaaatatagcacagtcgccaggtgctggtaacaccggacggcttcacatagattactgtacggttccggaagaaccgtgatataacctcatcgcaaaaagattatatcacaatcctccggcacctgtacaggtgtattttttatactcttttttcatactttgggtaaggaggattgatggtatggaacaatattgtatgtacttgcgtaaatcccgtgcagatcgggaagcggaatcgtcgactgcacgatcaaacatcgatcgaagctatactcttgcgtactggcta

SEQ ID NO: 1947 - DNA, 966 bp, unidentified
  source 1..966: mol_type = unassigned DNA; note = Bacteriophage uvig_148886 from the Index of /pub/databases/metagenomics/genome_sets/gut_phage_database (ebi.ac.uk)
aagaaaaaacgcaaggtggagggagctgataagcgcaccgccgatggttccgagttcgaaagccccaagaagaagaggaaagtctagttctgcagagggtgatgccattcgacgaacttgtttattgcagcttataatggttacaaataaagcaatagcatcacaaatttcacaaataaagcatttttttcactgcattctagttgtggtttgtccaaactcatcaatgtatcttagtaccgcattcatttcagtgagagcttactcatcagagttcgaggataacttgattaaagccataaatcaatatttaggaattgatagtttttctgaagatgccttcaataagaaaatcgattatattactgtctttccaggcaatgtactaagaattaaaagagttgatggaaacgaagatgatattacatggaatgatccaaaaagaagtgaaggatggactccagaaatgagagaaaaggcaaggcaaagggctaaagcgcattacaagaaagaaggagctgatgaataatggcaaaagtaacaataataccttcaaagattaatccaattacacatcagacgtccgtatcagactaacgcttatccatatgagttaacctttaaattctatattggtgaagaaattaaaattaaattgtaaaaagctgcttcaattgagtaatatataattgagaggttcatgaactctccctagatagcactaagttatggtgatgctcggcattcaagtacctatgggccgtaatagatagaagtacgcagattaaggcagttaatcgggtttgactccaacctacataaatggagtctttttatttgctaaaactagccaagattatcaatttgtgatataattaattcgcagttaaggaaactgacagctttcaggaatcgtcgactgcacgatcaaacatcgatcgaagctgacgaacgttccgaacgcta

SEQ ID NO: 1948 - DNA, 966 bp, unidentified
  source 1..966: mol_type = unassigned DNA; note = Bacteriophage ivig_4396 from the Index of /pub/databases/metagenomics/genome_sets/gut_phage_database (ebi.ac.uk)
aagaaaaaacgcaaggtggagggagctgataagcgcaccgccgatggttccgagttcgaaagccccaagaagaagaggaaagtctagttctgcagagggtgatgccattcgacgaacttgtttattgcagcttataatggttacaaataaagcaatagcatcacaaatttcacaaataaagcatttttttcactgcattctagttgtggtttgtccaaactcatcaatgtatcttagtaccgcattcatttcagtgagagcttactcatcagagttcggtatcgacagcatcaacgaatgcgctacctatgaactgcccatggcgcaataagctctcaccctcgccacgaccacggcgaggggtacatatcaaagtttgatatggccagttgacaacatataccttccatgctatactgcaatttgtctctcatcaattgccggggcgggatattcaagtcctttcccaagccatcagggggtgcatacccgatggttcgggagagcgcttgaatggcattcaagaggtagagggttcgatccccttcgtctccaccaaaagagagccagacgaacacgacgtccgtatcagactaacgcttatccatagctgaaaatgggctgcacaacctgaaggaagatctggaggccgatacgattctattcgcggatccgccctttgacctggacggcgaagatgattttggggagaacgaggatgaccaggatgagaaaattgaattggggggcatgagatgaatattccaaaggaatggctgaaatttctacaggagcagtttcccattggacgattgggtgtccgccctctcacacaaaaacatgagaggacggatatcaatggctgaaagagtttattgtttatacagagtttccaccaacaagcaggtggaatcgtcgactgcacgatcaaacatcgatcgaagctaggctgttgtagagatgcta

SEQ ID NO: 1949 - DNA, 966 bp, unidentified
  source 1..966: mol_type = unassigned DNA; note = Bacteriophage uvig_284398 from the Index of /pub/databases/metagenomics/genome_sets/gut_phage_database (ebi.ac.uk)
aagaaaaaacgcaaggtggagggagctgataagcgcaccgccgatggttccgagttcgaaagccccaagaagaagaggaaagtctagttctgcagagggtgatgccattcgacgaacttgtttattgcagcttataatggttacaaataaagcaatagcatcacaaatttcacaaataaagcatttttttcactgcattctagttgtggtttgtccaaactcatcaatgtatcttagtaccgcattcatttcagtgagagcttactcatcagagttcgggatcgggcgatacatagagaatgttttttctctggaaatccaatataaatagccatatccaacatatctgtacctatgaattagcccatctcgaaatgattcgttcagtataacaatatcatactttcagtgtgcatttctatgcactcttttaaattataaaatgtttcagtgcatcattatgtatgtaatgggtgcgtctccatgataatcccatcttcacacagatatcctcccacttcatcaaccggatataacggtacatcaatacatccttttcatcttcattatccatccgcgacgtccgtatcagactaacgcttatccatcttccatttcaacaagatatcaccgtaggaatttacggtgatttgaatataaatattgcagaattattaaaataaataaaaaaccgccccactctaaagcaggacggtcacgctctcgaatgatacgaaagccctagacaagcacattgtatcattcggagcagccaaacgcaagcggaacaccagttctctgctggctgttatttttatactcttttttacatacattttcacaaaggagtgataccttatgccaaacaccaaatcgttcactgtaaatgaagtcttagtctatctccgggaatcgtcgactgcacgatcaaacatcgatcgaagcttgaagaagttcacgttgcta

SEQ ID NO: 1950 - DNA, 966 bp, unidentified
  source 1..966: mol_type = unassigned DNA; note = Bacteriophage uvig_517692 from the Index of /pub/databases/metagenomics/genome_sets/gut_phage_database (ebi.ac.uk)
aagaaaaaacgcaaggtggagggagctgataagcgcaccgccgatggttccgagttcgaaagccccaagaagaagaggaaagtctagttctgcagagggtgatgccattcgacgaacttgtttattgcagcttataatggttacaaataaagcaatagcatcacaaatttcacaaataaagcatttttttcactgcattctagttgtggtttgtccaaactcatcaatgtatcttagtaccgcattcatttcagtgagagcttactcatcagagttcgtgattcatggagattggggaaatggcaatgagcgtaagcagcgcttagaaaatgctggatataattattcagaaattcaggccagagtaaacaaacttttatcatagtatatgggctcagagggacattcccttctgggcctttatatttttaccttgtgattgattttagcaaatacaagggtagattggactggctaatatgcagattgtatggtaacatgtgacactaccaggaaaggagaaaagccatgagtgtacaggttattaagagcaaaaatacaagaaaaggacgcatccggacgtccgtatcagactaacgcttatccataagaagagaagccacagcgcaaagagtacagcgccggcggcagagaagattagactggcagcgtattgtcgagtatcaacagatcatgaggaacaggccagctcatttgagaatcaaaaggaatattacagcaagtatgtagataagcataaagaatatgagctggcaggtatttatgcagatgaaggtattacagcgacaaacacaaagaaacgtgatggatttaaccagatgattgcggattgtgaagaaggaaagattgataaggtgattacaaagtcaatatccagatttgcgagaggaatcgtcgactgcacgatcaaacatcgatcgaagcttcggagacgctgtataccta

SEQ ID NO: 1951 - DNA, 966 bp, unidentified
  source 1..966: mol_type = unassigned DNA; note = Bacteriophage ivig_1929 from the Index of /pub/databases/metagenomics/genome_sets/gut_phage_database (ebi.ac.uk)
aagaaaaaacgcaaggtggagggagctgataagcgcaccgccgatggttccgagttcgaaagccccaagaagaagaggaaagtctagttctgcagagggtgatgccattcgacgaacttgtttattgcagcttataatggttacaaataaagcaatagcatcacaaatttcacaaataaagcatttttttcactgcattctagttgtggtttgtccaaactcatcaatgtatcttagtaccgcattcatttcagtgagagcttactcatcagagttcgatattgaaattgtatggaaatacagggacgaatttctggaagcagtaggataagaaagaaccgggagagcttattgtcctggattccggtagagaaaaagatttcataaaagaggaggaaaacgctgcggtgtcttcctcttctttgtatcagaagaaaatttggcaaagaagatgggggaagagccatgtatcttgaaacatattctatggaagaactgatggaactgatagaagagaaaggatattgttctgtggaagcagtggaaatcttgaaagagatggaacaggcaaaaaaagagacgtccgtatcagactaacgcttatccataggcagaatatgaagcagatacagcttcgtggacagcacctgttagatcaagtgaaggcaagaatggactggacagaggaacttctaaagtaccaaagattccagaagatagagaaagggattgcggaccgttttattgaaaagattacggtatattccaaagactatgtggaaatcgtgttctggtttggggatttatttgaaaaagagctggaaaaagaactggccaatatggaaggaggccttccgtatgcagtgtgattttatttttgcttatctgcgtctttccagagatgataaggaatcgtcgactgcacgatcaaacatcgatcgaagctgccttatcaccacctaccta

SEQ ID NO: 1952 - DNA, 966 bp, unidentified
  source 1..966: mol_type = unassigned DNA; note = Bacteriophage uvig_35057 from the Index of /pub/databases/metagenomics/genome_sets/gut_phage_database (ebi.ac.uk)
aagaaaaaacgcaaggtggagggagctgataagcgcaccgccgatggttccgagttcgaaagccccaagaagaagaggaaagtctagttctgcagagggtgatgccattcgacgaacttgtttattgcagcttataatggttacaaataaagcaatagcatcacaaatttcacaaataaagcatttttttcactgcattctagttgtggtttgtccaaactcatcaatgtatcttagtaccgcattcatttcagtgagagcttactcatcagagttcgattcaacattagaagaagtaacagctaaagttttaaatctggacaaatttgatgaaaaagtattcaaaagtgaaatctttaaaatcatttctaagcccaatcatttattaacttttatttttaaagatggtagcgaaagagacatcacttggagtaatccttctagaagtaaatcatggactccggaaatgaaagaagtagccagacaaaggtcactaaaactttataaaaagagaggagaggatggaagatggctaaaagaaaaataacggttattccttcaacaataaatcctttaacgacgtccgtatcagactaacgcttatccatcattcagattcagaaacggagttgaaaagacaataaaagtgaagaaatgttaaatttttttagaaaaaatcagaaaaattacctaataatatatatgaagagtcatgaatcttccgtaattgcataagttatcgttgctcgtggacagcgtagtgcctaggaccacgttaaaatgctagtgcacactcgaactgcggagacagcagtaggtcttagatctcaggccttaaaccacaggtagtggagagatctttttttattttctttaaaaaaacaaataatcatgtggcgggtttaacaggaatcgtcgactgcacgatcaaacatcgatcgaagctatcgcctgagcggaagccta

SEQ ID NO: 1953 - DNA, 966 bp, unidentified
  source 1..966: mol_type = unassigned DNA; note = Bacteriophage uvig_35057 from the Index of /pub/databases/metagenomics/genome_sets/gut_phage_database (ebi.ac.uk)
aagaaaaaacgcaaggtggagggagctgataagcgcaccgccgatggttccgagttcgaaagccccaagaagaagaggaaagtctagttctgcagagggtgatgccattcgacgaacttgtttattgcagcttataatggttacaaataaagcaatagcatcacaaatttcacaaataaagcatttttttcactgcattctagttgtggtttgtccaaactcatcaatgtatcttagtaccgcattcatttcagtgagagcttactcatcagagttcggctatttaaacgatattagaaaggaggtgtcagaaaatgaacaatccttcaaaaatgaataagtacttagcttcaatagcaatgataaagcagatgatcaatgaagggattgtaattgaaaaagacatgccacagattaataaatactttagtgaaaaatatggtattaaagaaggcagtttatatagtcaaaataacttgataaagactccaactagagcgatgtatgtagacgaaaggagtaagaaaaatggctgaaacaataaaaataaattcattaccaacacttcccactttgctgacgtccgtatcagactaacgcttatccattaaaactttataaaaagagaggagaggatggaagatggctaaaagaaaaataacggttattccttcaacaataaatcctttaacgcagaccccggttggtagcgttcaaaaaagaaaagttgcagcgtatgctcgtgtctcaactgatagcgatgagcaatatacctcttacgaaacacaaaaaacatattatgaaaattacataaaaagtaaacctgagtgggaatttgtaagagtatatgctgatgaaggaataagcggaactaacacgaaaaagcgtgaagggtttaaatcgatgatggaatcgtcgactgcacgatcaaacatcgatcgaagctgagaccaataccaccgccta

SEQ ID NO: 1954 - DNA, 966 bp, unidentified
  source 1..966: mol_type = unassigned DNA; note = Bacteriophage uvig_174247 from the Index of /pub/databases/metagenomics/genome_sets/gut_phage_database (ebi.ac.uk)
aagaaaaaacgcaaggtggagggagctgataagcgcaccgccgatggttccgagttcgaaagccccaagaagaagaggaaagtctagttctgcagagggtgatgccattcgacgaacttgtttattgcagcttataatggttacaaataaagcaatagcatcacaaatttcacaaataaagcatttttttcactgcattctagttgtggtttgtccaaactcatcaatgtatcttagtaccgcattcatttcagtgagagcttactcatcagagttcgagttaaatttaacgataaggatagaaacaaaggagtggacattcttgccttatgtttaataaaagaacttggcagggacaaaaacataccggaagaattagttagagcagtggaaataaaatatgataacgaatagttcaaaaagccaaggtgttttgcaccttggctttgtaaatattgaattaaccaggttatgatgctatactatgctaaaatctatatttgataacctggtggataggagtaaattatgaagagaaaagttgcaatatacgccagagtatcaacggagcatgaagcgacgtccgtatcagactaacgcttatccatacatgaaaaaagtcaataaatggaatgatattaaaataaaagttacaatataaagtaattattaagggaagtaagtttaatcttgcttcccttttcttgtccaacgacgagtcaaatacataagcttgcttgaatgtatttgacgactgcatacaatcccgaaacaagcgaagcggtttcgtggattatctaaaaaatatagaaaggataaggccaggaagtcacaacctctatatatcaaatcgatttaatccccacttatttaccaatttgaccaaactagtgttaaatttatttaatggaatcgtcgactgcacgatcaaacatcgatcgaagctatcaagatcgacgctgccta

SEQ ID NO: 1955 - DNA, 966 bp, unidentified
  source 1..966: mol_type = unassigned DNA; note = Bacteriophage uvig_163358 from the Index of /pub/databases/metagenomics/genome_sets/gut_phage_database (ebi.ac.uk)
aagaaaaaacgcaaggtggagggagctgataagcgcaccgccgatggttccgagttcgaaagccccaagaagaagaggaaagtctagttctgcagagggtgatgccattcgacgaacttgtttattgcagcttataatggttacaaataaagcaatagcatcacaaatttcacaaataaagcatttttttcactgcattctagttgtggtttgtccaaactcatcaatgtatcttagtaccgcattcatttcagtgagagcttactcatcagagttcggagataaaatattacttataggccaacaacttccatatttgttaactttttaaaaatatcaatttattcacaaagttccaattcctgccttaatttgtcgattcgcccgatccactcccaggtgttcggaaattccgaatagctggctttttcaagctccgccgccacagcagcgccagccacaggataagttggacaattttcataagacacctgcctgcatgagactaagcaactcagcacggccggcattaggacgagcctgaatttctgcctttttcttttccacatatctgatcggacgtccgtatcagactaacgcttatccattacacctaccaaggcccggcaaacgctgctgttgaagatatattttcaataaaagctttatagcactctcaaaaacgcaaattaacttgtaaattagcagaaaaaatatataatatgtcaaacattcttgaaaatagcattaaccaaacaatcgggcgttctctttcaacgcaagaaatgtctttggctatttcaagaattagtgaatacgtccaatgcctaattatacttgataaggaacaaaaaaacaatgaaagctgtgattctggccagagtaagctcaaaagaacaagaggacggggaatcgtcgactgcacgatcaaacatcgatcgaagctgcgattgctgaccaatccta

SEQ ID NO: 1956 - DNA, 966 bp, unidentified
  source 1..966: mol_type = unassigned DNA; note = Bacteriophage ivig_2547 from the Index of /pub/databases/metagenomics/genome_sets/gut_phage_database (ebi.ac.uk)
aagaaaaaacgcaaggtggagggagctgataagcgcaccgccgatggttccgagttcgaaagccccaagaagaagaggaaagtctagttctgcagagggtgatgccattcgacgaacttgtttattgcagcttataatggttacaaataaagcaatagcatcacaaatttcacaaataaagcatttttttcactgcattctagttgtggtttgtccaaactcatcaatgtatcttagtaccgcattcatttcagtgagagcttactcatcagagttcgactcatacttctgttttgcgaatcttaacttcaaataaatatgttggtggagacggctacccacaaatcattaccactaccaacttcaagcaggtacagaagcaactgaaaaagcagattgtccggaagcctaaaaagcaaccaactccgcccaccaagttttaccgcgggatcatcaatagatactctgatgatgcttttaaacaggctgaacatatctatcaattaatttacagtgaggtggaagtctatggcgaaagttagaattatccccgcccaagtcaaacaaggtaatcgaaagacgtccgtatcagactaacgcttatccatgcaaaattgactttactttcaaggatggtgaagtgattacagtcaaaatgtaagttaaccattaccgcactcagctaatttggctgggtttttttgtcttcatttatcagtttttgggatgaagtagttgatttaaccgatgataccaatagcccatggaaatggtagtcgctgcaaaaagagcaacgaaaatatagtgcagccaaattaattgatgggctagtgagtagtcggttggcgcaattgtggcaataaacaaaactaaccatgctgcccgatgccttttaatgatccgcctatggaatcgtcgactgcacgatcaaacatcgatcgaagctggtagagtgagaatctccta

SEQ ID NO: 1957 - DNA, 966 bp, unidentified
  source 1..966: mol_type = unassigned DNA; note = Bacteriophage uvig_13765 from the Index of /pub/databases/metagenomics/genome_sets/gut_phage_database (ebi.ac.uk)
aagaaaaaacgcaaggtggagggagctgataagcgcaccgccgatggttccgagttcgaaagccccaagaagaagaggaaagtctagttctgcagagggtgatgccattcgacgaacttgtttattgcagcttataatggttacaaataaagcaatagcatcacaaatttcacaaataaagcatttttttcactgcattctagttgtggtttgtccaaactcatcaatgtatcttagtaccgcattcatttcagtgagagcttactcatcagagttcgacattaatgctaggtataatctaggtggtgctcactatgaatagagaacattacgagcaatatttatcttcattaatgatatttaaacaaatgcttcatttggatttgttaactgataaagaatataacgaaagtgagaatctccttgctaataaatactgtatcaacaaaggtaatttataccgtcaaaatgacttgataataaaggactttagagtgatatatgtaatggaaaataaggaggttcaacatggaaactaaaattactaaaattgatgcgttgcctaaacttgaaaagaagacgtccgtatcagactaacgcttatccatctataaaaaagtcattagttaattatttgaagggtggtaatattaatggctaaagttacaattatcccttcgaagaaaaatccaataaccttaactccaatcaatgaaattattaaaaagaaagttgctgcttatgctcgtgtttcaactgatagtgatgagcaatttacttcatttgatgcttttggcttaattcaacttatatagcaaaaattgtgagtgaaaaaaatgaaaagtaatagaattcaagatcatcatgctgaaagtgaattagccaaatatcttgataatcacatttacggaatcgtcgactgcacgatcaaacatcgatcgaagcttcggagaggtacaggatcta

SEQ ID NO: 1958 - DNA, 966 bp, unidentified
  source 1..966: mol_type = unassigned DNA; note = Bacteriophage uvig_151707 from the Index of /pub/databases/metagenomics/genome_sets/gut_phage_database (ebi.ac.uk)
aagaaaaaacgcaaggtggagggagctgataagcgcaccgccgatggttccgagttcgaaagccccaagaagaagaggaaagtctagttctgcagagggtgatgccattcgacgaacttgtttattgcagcttataatggttacaaataaagcaatagcatcacaaatttcacaaataaagcatttttttcactgcattctagttgtggtttgtccaaactcatcaatgtatcttagtaccgcattcatttcagtgagagcttactcatcagagttcgggcaggaggaatagaaagtgaacgcgatggagtggtaagagtaagagaagtacggtttaaggaatggtctaaagaattcggtcatataaaattcactgatgaagaatataagaagatctttgaatactgcaaattcctagtctatttgagagatataaaatagcgaataaaatctacataaaggaggtgatttaagtgtaatcgatcagctattcaacttagaatatacaacgaaggaaaggtggaacaaatgtcaacttttgatatgaacgagtctgagggcagcacaaaaatagataagacgtccgtatcagactaacgcttatccattatttagcagggaaaataatacagagttcatactggatataactttacgataaccttatactattatagtgtaaggattactttttacccatgatgtgtatcatagatgggcatcttttatagctccaccatgatacacgtcacagggtttatgggaggaaatataaatgagagtagtatggaaagatagcgcaccgaagactaagccatggatcgaattgaagtataggaattataccataagtcagtatggagacggatgggtaacaaatattcctggagaccaaaatatatattttcggaatcgtcgactgcacgatcaaacatcgatcgaagctccatgctccttatgactcta

SEQ ID NO: 1959 - DNA, 966 bp, unidentified
  source 1..966: mol_type = unassigned DNA; note = Bacteriophage uvig_380829 from the Index of /pub/databases/metagenomics/genome_sets/gut_phage_database (ebi.ac.uk)
aagaaaaaacgcaaggtggagggagctgataagcgcaccgccgatggttccgagttcgaaagccccaagaagaagaggaaagtctagttctgcagagggtgatgccattcgacgaacttgtttattgcagcttataatggttacaaataaagcaatagcatcacaaatttcacaaataaagcatttttttcactgcattctagttgtggtttgtccaaactcatcaatgtatcttagtaccgcattcatttcagtgagagcttactcatcagagttcggacagaaacgtgaatacagcaagaactgtgacggtgattcctgcaacgcttaatttgtttacaagtacgcctaaaatgtcacaaaacaaacgtaaagtggcggcatatgcaagagtttcaacagacaatgaagaacagctttcaagttacgcagcgcaggttgattattatactagatacataaaatcgaagacagaatgggattttgtggatatttatacagatgaaggaatcacagcaacaaatacgaaaaaacgagatggatttaaacgtatggtgaaggatgcattggatggaaaggacgtccgtatcagactaacgcttatccatagaaaataattacggaacaagattgcaaaaaaattaatgcaaaattacttaaaaaatatgggcctattttcggatctctatactgctgagtgggtggtacccatgagtaattcacacatgaaaatcttcaacaaagtatagtatttatgtccgcaatatttctctttatgagtagcttgaaatggcttgatgctgtgcttaattagagttaatatgtatacaatatgttaacagagacgaggtgagaagcatggagcgaatagttaggaaattggataaaaaaatactagcttttgctcaggaatcgtcgactgcacgatcaaacatcgatcgaagctgtctagccatgcggcctcta

SEQ ID NO: 1960 - DNA, 966 bp, unidentified
  source 1..966: mol_type = unassigned DNA; note = Bacteriophage uvig_83213 from the Index of /pub/databases/metagenomics/genome_sets/gut_phage_database (ebi.ac.uk)
aagaaaaaacgcaaggtggagggagctgataagcgcaccgccgatggttccgagttcgaaagccccaagaagaagaggaaagtctagttctgcagagggtgatgccattcgacgaacttgtttattgcagcttataatggttacaaataaagcaatagcatcacaaatttcacaaataaagcatttttttcactgcattctagttgtggtttgtccaaactcatcaatgtatcttagtaccgcattcatttcagtgagagcttactcatcagagttcgcaatatacttccacttctggttggcaacgagcgtgaacgaatggctcgcttgaagccttttggcggtttgcgtcctacaacatagtggatgccgttgatgtagccccagcgtttccatgcggcaaacagtccgggcaacgtgtttgtcaaaccgtgtttaatgggtcaaacacagatataactttattgctgaaatatttggatatgtgggatttaggtggtaactttgcagcggaaaatctaaaatcagatgaagaaagctgtaatatattcccgtgtttctactctagagcaggattagacgtccgtatcagactaacgcttatccatatgctgctatgatgcagaacaaacagctgaagccagtagcagttaagaaatagaaactgaaggacataaggctgtggtttgaatgtagttagctgaccttcttcaatttaataggcaaatattccctgaatcataggggctatttgcctaattttttgtacctttgcagcctaatatacccttccaaatgaagcctatcattaaatataggggcggtaaatcgaaagaaatcccccagtttatagcctatatacctcaatttgaagggagatatatagagccttttttcggtggcggtgcggaatcgtcgactgcacgatcaaacatcgatcgaagctgttatgtatggtggcctcta

SEQ ID NO: 1961 - DNA, 966 bp, unidentified
  source 1..966: mol_type = unassigned DNA; note = Bacteriophage uvig_206323 from the Index of /pub/databases/metagenomics/genome_sets/gut_phage_database (ebi.ac.uk)
aagaaaaaacgcaaggtggagggagctgataagcgcaccgccgatggttccgagttcgaaagccccaagaagaagaggaaagtctagttctgcagagggtgatgccattcgacgaacttgtttattgcagcttataatggttacaaataaagcaatagcatcacaaatttcacaaataaagcatttttttcactgcattctagttgtggtttgtccaaactcatcaatgtatcttagtaccgcattcatttcagtgagagcttactcatcagagttcgttgaaaaaatagttgtaaccgataaaaatatagacatacactacaaaatatagtgtatgtttttttgattttaatatatcattattaaaaaccaagatttttgccataataaaaaatcctcccatttatatcttgattatcactcccacaaaatcctataatttgtgccgcaaaattcccatatggataatacctttttgtatcttcatctatatttattcctgttgttatattattttcttgcatccattttcttaattcatctgttttttctttttcaacttttttactaatcgtttcgacgtccgtatcagactaacgcttatccatatagaaaaaaaggacagtgttagtattgaagctcaaatagataaatgtaaaacttattgtgacggacaaaaatataaaatatacaaagactctggttattctggaaaaaacataaatagacctcaattttcaagcctgttagaagatataaaaaaaggtattgtaaatcaagttatagcttacaggctagatcgtatcagtagaagtattgcagacttttcacaattattgataatgtttgatgagtacaatgtggactttatctctgctacagaaaactttgatactaactcccctatgggaatcgtcgactgcacgatcaaacatcgatcgaagctgaacgtgtacaacgtctcta

SEQ ID NO: 1962 - DNA, 966 bp, unidentified
  source 1..966: mol_type = unassigned DNA; note = Bacteriophage uvig_404291 from the Index of /pub/databases/metagenomics/genome_sets/gut_phage_database (ebi.ac.uk)
aagaaaaaacgcaaggtggagggagctgataagcgcaccgccgatggttccgagttcgaaagccccaagaagaagaggaaagtctagttctgcagagggtgatgccattcgacgaacttgtttattgcagcttataatggttacaaataaagcaatagcatcacaaatttcacaaataaagcatttttttcactgcattctagttgtggtttgtccaaactcatcaatgtatcttagtaccgcattcatttcagtgagagcttactcatcagagttcgtaactagggatggcgaacaggaaatgttaagaaaacgaatcgatgagatgtgacagttcctgcagacacagacaaatcgaattacagagtacgatgaacagatggtcagaaggcttattgagaagattacggtctttgatgataagcttatctttgaattcaaatccggcatgacacttgaacttaagagataattgaaggaataaaactatacagacaccttgcagcgatgcagggtgtttttttcgttcatagaaaatttacaaagtgcaactgtgccaggattgaaaatattaaccagacgtccgtatcagactaacgcttatccataatgctctctaacaagaaatatctgggaacagactattacctacagataattgacgaagaaacccagataagatttctggaagaactgacacgaagggcaggaaaccttggaaggctcaacagaaaatgcaaggaacacactaagaaaattcctactgcatttcatttcaagccagctgatttaacatttcctgatccatttgagcaggcagaatacatttatagtttgatagaaagcgaggaataacgcatggcaggggtaaagaacataacagttattccggcaaaaaaacgtgtaggggaatcgtcgactgcacgatcaaacatcgatcgaagcttgcgtgagtaagaggaatta

SEQ ID NO: 1963 - DNA, 966 bp, unidentified
  source 1..966: mol_type = unassigned DNA; note = Bacteriophage ivig_756 from the Index of /pub/databases/metagenomics/genome_sets/gut_phage_database (ebi.ac.uk)
aagaaaaaacgcaaggtggagggagctgataagcgcaccgccgatggttccgagttcgaaagccccaagaagaagaggaaagtctagttctgcagagggtgatgccattcgacgaacttgtttattgcagcttataatggttacaaataaagcaatagcatcacaaatttcacaaataaagcatttttttcactgcattctagttgtggtttgtccaaactcatcaatgtatcttagtaccgcattcatttcagtgagagcttactcatcagagttcgtgaatgagcctaactttgaattgaccataaagcccagaatcccgcgcaaataaagggttttttgttatttccaaaagaaacgggattattcttctgtaccaaaaaaagatgatacaatattcaccccggagattaccactccggggatcttattactgcagatatccggtcggaccgaatgtgtacttctttccgttgatcgttagcgtttcatttttcgccatcttgccgtctgatttaaaatagtaatcagcttccttaaggctcatccatttgttcttatacatggcaccgagtggagacgtccgtatcagactaacgcttatccatagcaaaaattgattacaacaaatttaatacataaatactgttttttaagtcaatagaaaaaccgctcctgcgccaacaggaacggtcaactggggaagcacacgccaatgtgctttagtaactccgaagagatactgtcttaccaaagaatattgtatcatcttcggtgcagtcgcacaatcagaacttacgttctatgtatgactgttatttttgtacttttttacataatatatacggaggtgatatcatgtcatattgtatttatttgaggaaatcaagaaaggatcttgaagccgaggaatcgtcgactgcacgatcaaacatcgatcgaagctggttagcggttctgcaatta

SEQ ID NO: 1964 - DNA, 966 bp, unidentified
  source 1..966: mol_type = unassigned DNA; note = Bacteriophage ivig_2327 from the Index of /pub/databases/metagenomics/genome_sets/gut_phage_database (ebi.ac.uk)
aagaaaaaacgcaaggtggagggagctgataagcgcaccgccgatggttccgagttcgaaagccccaagaagaagaggaaagtctagttctgcagagggtgatgccattcgacgaacttgtttattgcagcttataatggttacaaataaagcaatagcatcacaaatttcacaaataaagcatttttttcactgcattctagttgtggtttgtccaaactcatcaatgtatcttagtaccgcattcatttcagtgagagcttactcatcagagttcgctgcgctttcaaaagcaaaaaatccaaaaggtatagcagagagtaaagatgttgctcatgaaggtggttccattgccggtaacgccagaaaagagctagaaggtaaactgggaaggagtgtaatatctccactcaatgccaatgacgcacctcttcttgatgattcagacaagtaaaatctgccccggtaataaccggggcatgactaaaagtaatccgcatttttgtttcctgtgactaataattatatatgggtgatgatatgaaagaaaaaataccgcgctgtgcaatctatgaccggacgtccgtatcagactaacgcttatccattttatatagataaagaaagccgtaaactatgcggttttaaatttttactttaggggtgtagtaacatataaaaatccgttgaattcgagccgcatgccaccgctctggagcaaaaaggcgacggatatgtagtagcctcattaggcgaggattccggctatgttccctataccgctttttccgcaaagaaaagctatattgaagcgcatcccgatgttgttcaggcgtttaccaacgcccttcagaagggtatggactatgtgcagtcacatactcctgaggaaatcgccgatgtgattcggaatcgtcgactgcacgatcaaacatcgatcgaagctcgatagccaagaaccaatta

SEQ ID NO: 1965 - DNA, 966 bp, unidentified
  source 1..966: mol_type = unassigned DNA; note = Bacteriophage uvig_554333 from the Index of /pub/databases/metagenomics/genome_sets/gut_phage_database (ebi.ac.uk)
aagaaaaaacgcaaggtggagggagctgataagcgcaccgccgatggttccgagttcgaaagccccaagaagaagaggaaagtctagttctgcagagggtgatgccattcgacgaacttgtttattgcagcttataatggttacaaataaagcaatagcatcacaaatttcacaaataaagcatttttttcactgcattctagttgtggtttgtccaaactcatcaatgtatcttagtaccgcattcatttcagtgagagcttactcatcagagttcgctgcacccggagctgtgatcctgtcatgcagcaggtcagcggctagcttttaaagcccagaccagagctctctcgtactctgtcagcggcagccccggaactcagcaaagcagataattatattttagtacatgctgaaatacttcgccaccttgtgcgccggcgcatccggatcgcagatgaagtcatgcgccagatcgaagtagaagtctggcgtgtctacctggtacttttccaccgtcctccgtgagtcgttgtagtacatgttcatcacgaggtagtaggacttgaacccgctctgacgtccgtatcagactaacgcttatccatctgttgcatctgttgctgaacaatcagcaaaatgcaacaagtgcaacggcgaacaacaataacggttgtcgttaaaacattgaaatttcaagtgctgtacatattatgcaacaaatgcaacaacaaatatataaaactaaacaatcacatgtataaggcacacaggcgtatagcacacccgcataaatgcgcgtattaggcacttatacgcgcgaagcgttgccactgttgcagaaaggaatagaccaagatgaaagcagttatttacgcaagatactccgcaggctctgggcagaccgaggaatcgtcgactgcacgatcaaacatcgatcgaagcttctcatatccacctggatta

SEQ ID NO: 1966 - DNA, 966 bp, unidentified
  source 1..966: mol_type = unassigned DNA; note = Bacteriophage uvig_257872 from the Index of /pub/databases/metagenomics/genome_sets/gut_phage_database (ebi.ac.uk)
aagaaaaaacgcaaggtggagggagctgataagcgcaccgccgatggttccgagttcgaaagccccaagaagaagaggaaagtctagttctgcagagggtgatgccattcgacgaacttgtttattgcagcttataatggttacaaataaagcaatagcatcacaaatttcacaaataaagcatttttttcactgcattctagttgtggtttgtccaaactcatcaatgtatcttagtaccgcattcatttcagtgagagcttactcatcagagttcgaattagaaaacaagaaattcggaggttctaaaataaagccttatcctcctgattttttctaaccctttagatagcaaaaccgcccggtgctggtaacaccgaacggcttcacatagatttctcttaccggatgcccggaaagatacattcaaaatcgaacactttgaattatatcattctttcgggcacctcgcaagaggtgtattttttatacccttttttaatatttttatacgaaaggatgatcgaaatgagaataggtgcagcttatatccgtgtcagcacggacgaccagctggagacgtccgtatcagactaacgcttatccatgcatcgttttcgaccggaagaccgagcattttgattttcaatattatgcatgaaatagcggagaaccttgaaaaataaggctctccgcttattataggttactgcactttagaccgccatactggctcattacatattgcgcgatcttcggattcggcgtcttgatattgactggatattgtaatcttttttcatatctccacatacgctacacctccccttcccacggccagcgctctgtaagccaggaccatgtgcatgcatcgtccgcatcctcgatcgtgagcggtccaaacgatgggaatcgtcgactgcacgatcaaacatcgatcgaagctttcagaaggaccgatcatta

SEQ ID NO: 1967 - DNA, 966 bp, unidentified
  source 1..966: mol_type = unassigned DNA; note = Bacteriophage uvig_210496 from the Index of /pub/databases/metagenomics/genome_sets/gut_phage_database (ebi.ac.uk)
aagaaaaaacgcaaggtggagggagctgataagcgcaccgccgatggttccgagttcgaaagccccaagaagaagaggaaagtctagttctgcagagggtgatgccattcgacgaacttgtttattgcagcttataatggttacaaataaagcaatagcatcacaaatttcacaaataaagcatttttttcactgcattctagttgtggtttgtccaaactcatcaatgtatcttagtaccgcattcatttcagtgagagcttactcatcagagttcgtgcttgctcaaagtatgaccctaatcatcaaacagttcggcgtagtaccacgtgaaataaaaaaccgccgtccttggcgggcgacggctctcagcacgcaagctgcctttttatatgcccccggtcagcaaggggcagtcgtaagcaagtcgcacatttataggccgctggcgacaggcggcatttggctgatgcctgattttagcacaacgagtcacgacaacgcaagggggtgattcctacgaattacatgtatctccgcaagagccgcgcggaggaggggcagagcacggaggaggtgacgtccgtatcagactaacgcttatccatagaaaaccaaaccccgcgacttcaccctggagctccagctccgcgatttttaactgccatatttataaaacggtcagtcttatgacaaagactgcatcgaggacctgcgggtctatcccaccgtcggctcacagacctacatagacaacgccttcagcgtgaggcccaaaagcgccgagctgctgtatgcggaggtgaacgtcgaggccatcaccttcaacaaaggctattacaccgtggatgtgacctacttctacaagataacgggcgagaccttccccggcggcaacgtcgtcaccgggaatcgtcgactgcacgatcaaacatcgatcgaagcttcggatcataagcgaagtta

SEQ ID NO: 1968 - DNA, 966 bp, unidentified
  source 1..966: mol_type = unassigned DNA; note = Bacteriophage uvig_151237 from the Index of /pub/databases/metagenomics/genome_sets/gut_phage_database (ebi.ac.uk)
aagaaaaaacgcaaggtggagggagctgataagcgcaccgccgatggttccgagttcgaaagccccaagaagaagaggaaagtctagttctgcagagggtgatgccattcgacgaacttgtttattgcagcttataatggttacaaataaagcaatagcatcacaaatttcacaaataaagcatttttttcactgcattctagttgtggtttgtccaaactcatcaatgtatcttagtaccgcattcatttcagtgagagcttactcatcagagttcgagacaagaattaattaagcatttaggattacgtgaagaactaactattattaaatatgattatgaaggtgaagatgctttcaaagttcttaataaaaataatgaacaaataggaagtattagaaaaagcgatattccaaaaatgaatgaaatttataataatattaaaaaagttaatgttttaggaacatcacatttcaccaatgaagaaggaaatactgttctttcttgtcaagtaggtgttacttattatgaatgatattaaacgtggtgctttatatattcgtgtgtcgaccgatgagacgtccgtatcagactaacgcttatccatatcatatcacttataataaaaaagaaaatacccttgaaatcgtttataaataaagcgattattatttgtactttatcagtataccttttggacttattccctacaaggtctccacgtttacaatattcactagtactttgtgcaactccttgccataatttgcaaccaataaaatccgtatcatattccccatttacatttttataagttcgaggtaccgctaaagtaatacgtgtaagtttctttccagattctgtttcaaataattctggatcattaacaagcctcccgaccaaaaccggaatcgtcgactgcacgatcaaacatcgatcgaagctacatgttgacggcagagtta

SEQ ID NO: 1969 - DNA, 966 bp, unidentified
  source 1..966: mol_type = unassigned DNA; note = Bacteriophage uvig_206100 from the Index of /pub/databases/metagenomics/genome_sets/gut_phage_database (ebi.ac.uk)
aagaaaaaacgcaaggtggagggagctgataagcgcaccgccgatggttccgagttcgaaagccccaagaagaagaggaaagtctagttctgcagagggtgatgccattcgacgaacttgtttattgcagcttataatggttacaaataaagcaatagcatcacaaatttcacaaataaagcatttttttcactgcattctagttgtggtttgtccaaactcatcaatgtatcttagtaccgcattcatttcagtgagagcttactcatcagagttcgatgacatttcagctgaggatgcatataaccaacttggagaggttatacaacgtgatgactccttgccggatgctgaatatggaagtaacgaatccctaggcaatttaaaggtcgagtccgaagcaatttttatgcattctcatctgctggacttgaaatatgaatcaactacagaagattatgaaagtcttttacagtctcgtaatgagcttgccggcgttctcggcaagtctggcaggtgatgtagataatgaaaaaaattgagacaaatcaaccaaccgttgagcgcggagtaatttagacgtccgtatcagactaacgcttatccatgttttattgacctcggcaaatgccgggggtcatatgtggtatttaagaggtgataaaatgtttggaaaaattaagataaaaaactgcatactgactattataggaagtgcggtattagcctttgggctatataatgtgcactcgctttccggagtaactgaaggcggcgtacttggacttactctgctcttggaacaccattttggcatttctccgtccgtttcaggccttattctgaatcttgcgtgctatctattcggaatccgtatgcttgggcgtgagtttctttggtactctgtgggaatcgtcgactgcacgatcaaacatcgatcgaagctcggaaccgcgcaagcagtta

SEQ ID NO: 1970 - DNA, 966 bp, unidentified
  source 1..966: mol_type = unassigned DNA; note = Bacteriophage uvig_134660 from the Index of /pub/databases/metagenomics/genome_sets/gut_phage_database (ebi.ac.uk)
aagaaaaaacgcaaggtggagggagctgataagcgcaccgccgatggttccgagttcgaaagccccaagaagaagaggaaagtctagttctgcagagggtgatgccattcgacgaacttgtttattgcagcttataatggttacaaataaagcaatagcatcacaaatttcacaaataaagcatttttttcactgcattctagttgtggtttgtccaaactcatcaatgtatcttagtaccgcattcatttcagtgagagcttactcatcagagttcgtaggcaggtacgttgataatccattcaagcttgatattttcttgcgcctttgatttccaacatcaaggtgcaagttcttccgtgcctatgtcagtcagcaatccggcaacctccctgtatggcatgatttcttgtaagctgatgaaccattgtactgaccatttcaagatggccaagttcattagctcatggttgttggatatgaatttaactttaatatgtaaagaatctcttcttatttatatatagtttaatattaaccatgaaggggtagtttaacctattcatttatggttaattgacgtccgtatcagactaacgcttatccattagctgctataaagctaattgcagaacattacatgatatggcagaacatttggatgtaacagaagaatttttgaatgatgcaattgagtgctatcgttcaaaatatggtttatgcgtacagttagataactatgtaataggttttcaaccatctttgtacattatggagttatttgaataaacgcattaattattacgtttatagaatataaatatatatattccttactattcaataagggggattattatgaataatacatacacacttgaaaatgtaattatatatttaagaaaatcggaatcgtcgactgcacgatcaaacatcgatcgaagctgatgtaacgctatgcagtta

SEQ ID NO: 1971 - DNA, 966 bp, unidentified
  source 1..966: mol_type = unassigned DNA; note = Bacteriophage uvig_234005 from the Index of /pub/databases/metagenomics/genome_sets/gut_phage_database (ebi.ac.uk)
aagaaaaaacgcaaggtggagggagctgataagcgcaccgccgatggttccgagttcgaaagccccaagaagaagaggaaagtctagttctgcagagggtgatgccattcgacgaacttgtttattgcagcttataatggttacaaataaagcaatagcatcacaaatttcacaaataaagcatttttttcactgcattctagttgtggtttgtccaaactcatcaatgtatcttagtaccgcattcatttcagtgagagcttactcatcagagttcgatgtattgaaggaatgcaagtgggatggagaaactctttttattatgctctgattttctcttttttattttgataccatcaggtctcattcttaggcttgaccttataagatctcttattgagacttcattatcacattccatattggactttcttacttcaagtcttacaagattgccaaccccctggatctgcaattcagccgaatcttcaattgtaataactcgctcatctttgggaataaaattagacagtgcattaagaaatgttgttttaccacttcctgtgccaccagaaacagacgtccgtatcagactaacgcttatccattcgttgctctcgcagcaagaattatctcagttaaaagggattgctgccggattgcttcttggaagcggcaaatattctgttgatgatattgtatccatttgtaaaaacaccaaataaaaaagccccggcatctctgccagggccatgagctatgctcatatataatctcgcaaattgtattatagcatagctcccggactatttcactatgttccgggcatttttatgcccatttttaggaggatgctatatgaattttggtatttacggaagaaaatcatattttgttgatacctcagaggaatcgtcgactgcacgatcaaacatcgatcgaagctcaagctattgcagtcggtta

SEQ ID NO: 1972 - DNA, 966 bp, unidentified
  source 1..966: mol_type = unassigned DNA; note = Bacteriophage uvig_146622 from the Index of /pub/databases/metagenomics/genome_sets/gut_phage_database (ebi.ac.uk)
aagaaaaaacgcaaggtggagggagctgataagcgcaccgccgatggttccgagttcgaaagccccaagaagaagaggaaagtctagttctgcagagggtgatgccattcgacgaacttgtttattgcagcttataatggttacaaataaagcaatagcatcacaaatttcacaaataaagcatttttttcactgcattctagttgtggtttgtccaaactcatcaatgtatcttagtaccgcattcatttcagtgagagcttactcatcagagttcgaatatagtcgcgaacgtccaggtgaatttatactagatatagagcttctctgatacctactaccacatatagtaggtattctttaacacatacatatccatcataagtatcttcctttgataagacattaatgatggtaacttaagataggagataagtcaatgcgcatcataggaaaagatagctatatcccagaatacaaaacgagaacatacagaggtatcaaagtaaaaagggatggcaatggatggtgtacgagccttgatggtgataataatatttataaatcgtactactcgggacgtccgtatcagactaacgcttatccatttaaaagccatatgggtctggaagaatattctgaagaaataggcatatcagtcgatgacttaaaaaaatatgaaagcggagaacggtgtatttctaggaacaccatggaaaaaatgataaattattctccattcaagcagtggagtgaagagtttggcgatacagtattcaacgattctgagtacaataaaatcgctgaatacgccagatttatgttatatctgagaaaaaataaaggagatgacagtacatgttaaaatataattctgaaacgaatctcgactccgatattgactctgaggaatcgtcgactgcacgatcaaacatcgatcgaagctagccatgtgttatctggtta

SEQ ID NO: 1973 - DNA, 966 bp, unidentified
  source 1..966: mol_type = unassigned DNA; note = Bacteriophage uvig_356610 from the Index of /pub/databases/metagenomics/genome_sets/gut_phage_database (ebi.ac.uk)
aagaaaaaacgcaaggtggagggagctgataagcgcaccgccgatggttccgagttcgaaagccccaagaagaagaggaaagtctagttctgcagagggtgatgccattcgacgaacttgtttattgcagcttataatggttacaaataaagcaatagcatcacaaatttcacaaataaagcatttttttcactgcattctagttgtggtttgtccaaactcatcaatgtatcttagtaccgcattcatttcagtgagagcttactcatcagagttcgttggccttgatgagttcgacgaggctgcgatggacgctcagattgaaagtgcaacaatcctcgaccacatggtcacgttccatttcagggacggccacatcgaatccagagacttcttggataagcggcacggcaccccttggaccgaggaacggcgggaaaaagcaagagaatccatgaaggctgcttggacagacgagcgcagggaggcaatgagtgaaagaatcaagaaaataaggagcgaaaagaaatggccaaatccgtaaccacgataccggcgacgctgtcacgcttcacggcgacgtccgtatcagactaacgcttatccatgcaaaaaggacatccgggtgaccttcaaggacggtaccgagatcaaagcataatcccatagacgcagaaacgcctctgaaccacatcggctcggaggcgttttttgttatctcattccccagagaaaacagtcaattttctttgtgctgcttatccagctataggacggcaaggctttgtcgaaggcatcgatgcattcttttccgttttgagttttaaggaagtctttataccacgcctcgattctcgcataaagggctatggcattttggagccgcccttctcctttgccatcaagctggaatcgtcgactgcacgatcaaacatcgatcgaagctcctcgctataactcgcgtta

SEQ ID NO: 1974 - DNA, 966 bp, unidentified
  source 1..966: mol_type = unassigned DNA; note = Bacteriophage uvig_243310 from the Index of /pub/databases/metagenomics/genome_sets/gut_phage_database (ebi.ac.uk)
aagaaaaaacgcaaggtggagggagctgataagcgcaccgccgatggttccgagttcgaaagccccaagaagaagaggaaagtctagttctgcagagggtgatgccattcgacgaacttgtttattgcagcttataatggttacaaataaagcaatagcatcacaaatttcacaaataaagcatttttttcactgcattctagttgtggtttgtccaaactcatcaatgtatcttagtaccgcattcatttcagtgagagcttactcatcagagttcgatttgaagatttgaaaaatatgctttatgaacgtgcgaatatcatttgcagctttgaataggttggtgaggacaaatggggattgataaaaccatattacttatgataaatgagcggttatacaaaaatggaaagatagataaagacacgaaagaaaaaatagaaaaggagattaataaaaatgattgtaaaacaggaatggatagactaaaataatggtaggttctgtccttccatatggaggattagcatgagtaatatataccagttaagagaactacttagaacacagacaatttagacgtccgtatcagactaacgcttatccatttaaccagtataaaaggttttcaatagaattttctctctttgtaagattttaaactaacaaaagatgaaaaaagggcagaacctaccaaataaaattgccacggtgaagaacaagttcatcgtggcttttattataagatattctaatgcttaagtcaatattgcaaaaaataattgtctgaatttttcagaattgtttttttcggaatactaattggaatttttttgatacccccctgggtcttgttttctactggaaattccattttcaattttctcaaaaaacgcttcaaaaatcccggaatcgtcgactgcacgatcaaacatcgatcgaagctttcgcgtagctccgtcgtta

SEQ ID NO: 1975 - DNA, 966 bp, unidentified
  source 1..966: mol_type = unassigned DNA; note = Bacteriophage uvig_278686 from the Index of /pub/databases/metagenomics/genome_sets/gut_phage_database (ebi.ac.uk)
aagaaaaaacgcaaggtggagggagctgataagcgcaccgccgatggttccgagttcgaaagccccaagaagaagaggaaagtctagttctgcagagggtgatgccattcgacgaacttgtttattgcagcttataatggttacaaataaagcaatagcatcacaaatttcacaaataaagcatttttttcactgcattctagttgtggtttgtccaaactcatcaatgtatcttagtaccgcattcatttcagtgagagcttactcatcagagttcgccaagcagataccggaggatacactcatgactgtcgccgccgaagcgttaggcaccgacacatttgatgcagatgccttttacaacaaaataacggctgtaagagtggaggtcggcaatacgctggtgttctgcttcaaagacggcatagaaaccgttaaacgatggtcagaccgttccagagcggagagctggacaccggagatgcgggaagccgcacgaaagaaaacacagaggcgaggtgagcattgatgcaggcagcaaaaaatataacggtcatcccagcgacacggatgatgcagacgtccgtatcagactaacgcttatccattccacaagggcggcagagtagttttcaccttcaagaacggcaccgaggtcacggacgccttgggtctcaggattcgcacagtactccatgaacctgacaaccaattcttccggcgacaaacccaatggagcaatgagtgcttttacctggtcgagcagctcggaatcaacttgtatttcaatgaggtcttcatctttgttcgccatcgttctggactcctttccgatatttcgctgcttgaagatccttcagccatacagacagaagttctttgatttccagccaggattctgagctgctggaatcgtcgactgcacgatcaaacatcgatcgaagcttcatggcgaggaagttgtta

SEQ ID NO: 1976 - DNA, 966 bp, unidentified
  source 1..966: mol_type = unassigned DNA; note = Bacteriophage uvig_441833 from the Index of /pub/databases/metagenomics/genome_sets/gut_phage_database (ebi.ac.uk)
aagaaaaaacgcaaggtggagggagctgataagcgcaccgccgatggttccgagttcgaaagccccaagaagaagaggaaagtctagttctgcagagggtgatgccattcgacgaacttgtttattgcagcttataatggttacaaataaagcaatagcatcacaaatttcacaaataaagcatttttttcactgcattctagttgtggtttgtccaaactcatcaatgtatcttagtaccgcattcatttcagtgagagcttactcatcagagttcgatgcagcagattaaggaaaagaaatatccggattcgctgcgtggctatacaggaaatcttctcttggtagctatcaactatgacaagaaaacgaagaaacatcagtgccttattgaaaaagtagtataaagatcatgccgtggaaggaaccttcttccacggcttttctataccatgattgagtcattgacttgtacattttgaaaatactgaatgcagtattatactgatgggaaaggagggaaaaccgatgcaatatgataaagcagaccagcaaaactgcccgcgcagagtcgtgttgacgtccgtatcagactaacgcttatccatacgtactttggccggggaattggaaagacctgacagttaaggttcttctataaatcctatcaagtcccgaattgcttgtatctgcaattcgggactttttgttttattttgccatgttttgtacattttcctgaaaatatacacggtttgatgggtcagacaaaaaagcgcacacccctcggtgtgcgcttggattttacgtctgcgtcgattcccgcaggcttacctggtaacctaactccatgcgggtttcaacaggctgcccctgcaaggcacacagcagctgctgcgttgcttttaggaatcgtcgactgcacgatcaaacatcgatcgaagctagccaccaccatggaactta

SEQ ID NO: 1977 - DNA, 966 bp, unidentified
  source 1..966: mol_type = unassigned DNA; note = Bacteriophage uvig_584681 from the Index of /pub/databases/metagenomics/genome_sets/gut_phage_database (ebi.ac.uk)
aagaaaaaacgcaaggtggagggagctgataagcgcaccgccgatggttccgagttcgaaagccccaagaagaagaggaaagtctagttctgcagagggtgatgccattcgacgaacttgtttattgcagcttataatggttacaaataaagcaatagcatcacaaatttcacaaataaagcatttttttcactgcattctagttgtggtttgtccaaactcatcaatgtatcttagtaccgcattcatttcagtgagagcttactcatcagagttcgtaatgccgttcagctaagcgagaatgagcgcgcggtgctggtggatgtgtatatgccctccatccgtcaggcgcgtgtcaaccgctccgtcaaccgcactgtcacgctccccgcatggctcaacgctgccgcgctggagcataatatgaacttctcgcaggtgcttcaggacgcgctcaagcagcagctcggcctttgataaagaaaaagcccccggctatatgccgagggctttgaaagagggtgtcatatgaagttaactcacggggcatatatccttgcccggttctcgaccgaccggacgtccgtatcagactaacgcttatccatgtgggctgctttgtttcagtctgccgaggccaaaaaagaaccgagcggaataacccgctcggttcttttttctctattctctatgtgacgcgcaacggtgcagcctacatcaataccccgcgtaggcacgcaggccttcgactgcacgcggcgcgtgttaataattattcgttctgagtttcgtcaactatggcctcgattatttcaacaggcggttctttgtctatcttgtctttataatttctaagccacttcttgagccattccgggatgggtgcgccgagctttccggcattctcgggaatcgtcgactgcacgatcaaacatcgatcgaagctcattcacgtcacacgactta

SEQ ID NO: 1978 - DNA, 966 bp, unidentified
  source 1..966: mol_type = unassigned DNA; note = Bacteriophage uvig_441567 from the Index of /pub/databases/metagenomics/genome_sets/gut_phage_database (ebi.ac.uk)
aagaaaaaacgcaaggtggagggagctgataagcgcaccgccgatggttccgagttcgaaagccccaagaagaagaggaaagtctagttctgcagagggtgatgccattcgacgaacttgtttattgcagcttataatggttacaaataaagcaatagcatcacaaatttcacaaataaagcatttttttcactgcattctagttgtggtttgtccaaactcatcaatgtatcttagtaccgcattcatttcagtgagagcttactcatcagagttcgatcgaagcaaataaatttgctgccgagttattattgtctgatgaaatattaattgaatatcaaggaaaaacagtcgatcaaattgctgcatatctaaatgtgattccagaacttgtaaagcttaaatttctttagcttttttattttttacttctgaacagaacatgtgttctatataataaaatgaggtgatattatcaaaaaaaatatttttaaaattgttgctgcatacataagaataagcactcatatgcaagaagaattgtcccccgatgcccaattacgtcttattagagaatagacgtccgtatcagactaacgcttatccattatttgaccgtgaaaacaagctgattgacatttattattatacttctgtatagcttagaaatggcttatttatgcgatttattaaagttcatatgtacttgcttctcatagtcaaataaaaaaagaccagggatttctccctggcttaattgttatttaagatatttagttgctacatatccagtattttttttgtatttaaccttcgtccacgaagctccttttttaactacttctaccttaattcctttcggaatctttccaagctcttttgatttcgcatttgcagcgctcctgatcggaatcgtcgactgcacgatcaaacatcgatcgaagcttaacttaaccgccaagctta

SEQ ID NO: 1979 - DNA, 966 bp, unidentified
  source 1..966: mol_type = unassigned DNA; note = Bacteriophage uvig_3575 from the Index of /pub/databases/metagenomics/genome_sets/gut_phage_database (ebi.ac.uk)
aagaaaaaacgcaaggtggagggagctgataagcgcaccgccgatggttccgagttcgaaagccccaagaagaagaggaaagtctagttctgcagagggtgatgccattcgacgaacttgtttattgcagcttataatggttacaaataaagcaatagcatcacaaatttcacaaataaagcatttttttcactgcattctagttgtggtttgtccaaactcatcaatgtatcttagtaccgcattcatttcagtgagagcttactcatcagagttcgaaaggtccactggacctttttctgattccacctcaccccatcttccgcgttaaaagagatgggctgcagagaaaacagcttgcccatataggataagtttggtaaaatataggtactatgggaaaagcgatatcttcaaaatttcataggatgcgtgcggaagatctgaagcgacaggtggaactcagtaaaagaaaagccgaatttaaaattccaccatttgttgtgaagcagtttgacattgacgagttgcacgaagagggacggttatgctatcggctcgtgcccaaacagggatttgacgtccgtatcagactaacgcttatccatgttggcaccggagtcctttatattttcaccgtcggtggtctgggcttcggctggatcattgacatggttatgatctgttgcaacaaattcaccgacagcaccggcgcggtggttggtctgaaggttgctgagtataccagacagccggatcctgatcttgcagaggcttctctgggggaggagagggaggcagcggcctagactgccagagcttacggctataccgtaatagagtcaggcgctcaggataatgccgacaagtaaaaacacggctcgaaaatatgccgcaggaggtggctcggaatcgtcgactgcacgatcaaacatcgatcgaagctctggctgttcattgatctta

SEQ ID NO: 1980 - DNA, 966 bp, unidentified
  source 1..966: mol_type = unassigned DNA; note = Bacteriophage uvig_195822 from the Index of /pub/databases/metagenomics/genome_sets/gut_phage_database (ebi.ac.uk)
aagaaaaaacgcaaggtggagggagctgataagcgcaccgccgatggttccgagttcgaaagccccaagaagaagaggaaagtctagttctgcagagggtgatgccattcgacgaacttgtttattgcagcttataatggttacaaataaagcaatagcatcacaaatttcacaaataaagcatttttttcactgcattctagttgtggtttgtccaaactcatcaatgtatcttagtaccgcattcatttcagtgagagcttactcatcagagttcggcagatgtgcttcggttgccttatttataccatatattttgtccggagtgcgctacactttttctcgaatttacgcaaaatcgcatggttattctcgtcggaaaatggtatgttataattttacatttttccatatttttacgaccgtgcagctacacttgacagattgcatttttcgtggtgcaataatctcatctttgttgcaccggtgcaactctatcatttttagccgttggggaggcttatcattatgcttacgaactatttaatctatttgcgcaaatcccgcgcagacaatccgacgtccgtatcagactaacgcttatccatgcattggtcggtacgtggagaatgtgtttgatcttgatatagagctgttatagttcatctccaacatcgaggtgcagattcctctgtgccaatatcggtcagcagccccgccaccttccgatccggcatgctgtagcgctgcgacaggtaacgaaacgatgctgccgcttctccgtccgggccgccgtactgcgacaaaatgatctgcgcgatcttcgcattggggcttgtgatgttgaccgggtactgcaggcgtctctcataattccacattagcagccacctccttcccacggcaggggaatcgtcgactgcacgatcaaacatcgatcgaagctcgccagcggttgaggtctta

SEQ ID NO: 1981 - DNA, 966 bp, unidentified
  source 1..966: mol_type = unassigned DNA; note = Bacteriophage uvig_386577 from the Index of /pub/databases/metagenomics/genome_sets/gut_phage_database (ebi.ac.uk)
aagaaaaaacgcaaggtggagggagctgataagcgcaccgccgatggttccgagttcgaaagccccaagaagaagaggaaagtctagttctgcagagggtgatgccattcgacgaacttgtttattgcagcttataatggttacaaataaagcaatagcatcacaaatttcacaaataaagcatttttttcactgcattctagttgtggtttgtccaaactcatcaatgtatcttagtaccgcattcatttcagtgagagcttactcatcagagttcggttcaaagtaggcaacacggttgtgagagtgtcgtttgcaaatacgcagaatacgattactgacaacttcatcaacatgattgcttctatgtaacggataaatccgttggcagaaattggcgagatactaatgcggtgacaaactggattttcgcagtccgctatggtaacatagccttggacaaaatcatgcgaaaactccggtttgttttttcagcttcggacgattaacaaacaggagtggcacactatgcaaaaaagtattgataagatttactatgccgccatctacctgcgtttgacgtccgtatcagactaacgcttatccataagcgaaagccaacgcaaagaaggtgatttcgttcataagggaggtgagctaaatggcaagaccgtcaaagcgccgtcaacaggcattagccagtcagaccgttgctgcggaacagtttactgtcgttcacaagactgctatctacgctcgtctttctcgtgaagataatctgaatagctctgattccatcgaaaatcagctggcattgctcaatgagtatgtaagcaatcgtccgtatctgcaactggcaggaacctttgttgacaatggctacactggaacggactttgaccgtcctgggaatcgtcgactgcacgatcaaacatcgatcgaagctgtcatcactcgcggaagaag

SEQ ID NO: 1982 - DNA, 966 bp, unidentified
  source 1..966: mol_type = unassigned DNA; note = Bacteriophage uvig_381373 from the Index of /pub/databases/metagenomics/genome_sets/gut_phage_database (ebi.ac.uk)
aagaaaaaacgcaaggtggagggagctgataagcgcaccgccgatggttccgagttcgaaagccccaagaagaagaggaaagtctagttctgcagagggtgatgccattcgacgaacttgtttattgcagcttataatggttacaaataaagcaatagcatcacaaatttcacaaataaagcatttttttcactgcattctagttgtggtttgtccaaactcatcaatgtatcttagtaccgcattcatttcagtgagagcttactcatcagagttcgtcggaagatacgttgaaaacgtttttaaacttgatatcttttataagttgtaaaccatatccaacatctatgcgctaatgagcttggtcatttggaaatggtttccaccatcgtgtaccaattaaccgatggtctttcaccagaggaaatcaaagccagcggttatgacaaatactttgtcgatcatactttaggtgtctatccgcaggccgcatccggaactccattttctgccgatacgttccaatctaccggagataccattaccgatttatatgaagatatggcagcggagcaaaagacgtccgtatcagactaacgcttatccattatctggtaaaacaatgaaattccactcaagtcccaactgcagtggtatgactaatccgatagaaatagaactggaagatgccgtaaaaaaaggatattgtccttgtaaaagatgcactagtcaaactaaataaaaagtccccggtgctaccaacaccgaggacaagcattgctccgaagatgcaatctctatacattcatattgtatcacgttggagtatatcattacaagtaataaggaggtattccaatgcttacatctgctaatgtcattatctatttacgaaaatcaagatctgaggaatcgtcgactgcacgatcaaacatcgatcgaagctctacagtatgatgacagaag

SEQ ID NO: 1983 - DNA, 966 bp, unidentified
  source 1..966: mol_type = unassigned DNA; note = Bacteriophage uvig_100318 from the Index of /pub/databases/metagenomics/genome_sets/gut_phage_database (ebi.ac.uk)
aagaaaaaacgcaaggtggagggagctgataagcgcaccgccgatggttccgagttcgaaagccccaagaagaagaggaaagtctagttctgcagagggtgatgccattcgacgaacttgtttattgcagcttataatggttacaaataaagcaatagcatcacaaatttcacaaataaagcatttttttcactgcattctagttgtggtttgtccaaactcatcaatgtatcttagtaccgcattcatttcagtgagagcttactcatcagagttcgaaatgcttaagcaagcaaattccaaacgatgctcttaaaaatatagcaaaagagattcttggtgttgatgaacttacaagcgaaataatcgatgagagaattgaaaaagtaattgttggagatgataagttattgactttttatctgaaagatggaaacaaaattgatgcccactggatgcagaaaagcagaagtgaatcatggactgaagaaatgaaagagaacgcaagaagaaaggcggttgaaatacatggcaaaagtaacagtaatcccatcaacgattaatccaattactaaattgacgtccgtatcagactaacgcttatccatgcattacatttgtgttcaaaaatatgaaggaaataacaatagcagccaaataaaaggctgttatttttttgcctaaaataggggtgtcggaagtaatcgttctgacacttaggggtgtcgctttttaaggtaagggtgtcgtttgtattaaaatagttgttcaaatacataaaagaactagaattgtgatacgagaaatctgtcacaattttttttgggctaaaacggccaaaatagcagggctagataccgtttaataaggaattcgtcttatttttagcattctttttaaactaataaggaatcgtcgactgcacgatcaaacatcgatcgaagcttgtgtgcggctagaaggaag

SEQ ID NO: 1984 - DNA, 966 bp, unidentified
  source 1..966: mol_type = unassigned DNA; note = Bacteriophage uvig_206650 from the Index of /pub/databases/metagenomics/genome_sets/gut_phage_database (ebi.ac.uk)
aagaaaaaacgcaaggtggagggagctgataagcgcaccgccgatggttccgagttcgaaagccccaagaagaagaggaaagtctagttctgcagagggtgatgccattcgacgaacttgtttattgcagcttataatggttacaaataaagcaatagcatcacaaatttcacaaataaagcatttttttcactgcattctagttgtggtttgtccaaactcatcaatgtatcttagtaccgcattcatttcagtgagagcttactcatcagagttcgacaagcaccatatcacactgaataagaatatggtcccaggcgacactcgcagccctgtacagacaagcggtgtccgtatcggcactgctgccatgaccacgaagggatatctggaaacggatttcgtccgtgtggcaaatcagatcgccgagatcattcgtaaaatgcaggtgtctacgtctgtcaagtaaattagctttatatatcgctccattacaatgcttttacatatcagtaaaggagtgattcgatggtacagaaagacagcaaacaaacagaaattcaaaatgcttacgcacggacgtccgtatcagactaacgcttatccatatattctcagcgatttttgcgtagtgaaacccagaaaggagttcaagaagtgagcattttggataattttgatgtgattggggtgccccgcacattcagcattgcggaagttcgtattttgaaaaaccgtttgtcattcaatttagccgccgcatctgaaatggggtatccggggtttgttcggttgtttatcagccgggataaaagtcaagtcgccctgcagccctgcaccaaagaaacaccaaacgcaatgaaattctttactcaggatatggtggccaagaaaaaacggacactgccggaatcgtcgactgcacgatcaaacatcgatcgaagctgttgtcataatccacggaag

SEQ ID NO: 1985 - DNA, 966 bp, unidentified
  source 1..966: mol_type = unassigned DNA; note = Bacteriophage uvig_192865 from the Index of /pub/databases/metagenomics/genome_sets/gut_phage_database (ebi.ac.uk)
aagaaaaaacgcaaggtggagggagctgataagcgcaccgccgatggttccgagttcgaaagccccaagaagaagaggaaagtctagttctgcagagggtgatgccattcgacgaacttgtttattgcagcttataatggttacaaataaagcaatagcatcacaaatttcacaaataaagcatttttttcactgcattctagttgtggtttgtccaaactcatcaatgtatcttagtaccgcattcatttcagtgagagcttactcatcagagttcgagcgggtggtgtttcggttcaaggatgggaaggaaatcgtaacgaggctatgaaacattacagaaacaggcccaggtcggcaggtggacttctgctggcctgggtctgttttggggatatctcgcttcagtacagtttgatgatctacttgtaaaaaagaagaaaatccaatataatattcctgcaccaagaaaggcggtgaattccatggctttagaatccaatacatattccggaatatgtaaatacaaggatattgatttcactttcatgtttagtggtgaagagctgcgattggttgacgtccgtatcagactaacgcttatccataattcctacggcaaatcctactgtccctccaaagccatcccggaggaaaagctgatgcagaccgtcgccctggttgggcatacgggcgaaataacggcgattacagcccacaacgataatcttctggagttcaccctcaaggacggaaccaacgccgtgaagcggtggcaggaccgctcccgtgccgagagttggacagcggaaatgcgcaaatctgccggagaaaaaacacgggaaaggaataaacgccatgccgaaagctaaaaatgtcaccgtcatccccgccacgctgaatatccaggaatcgtcgactgcacgatcaaacatcgatcgaagctgagacgtgagcaggacgaag

SEQ ID NO: 1986 - DNA, 966 bp, unidentified
  source 1..966: mol_type = unassigned DNA; note = Bacteriophage uvig_416748 from the Index of /pub/databases/metagenomics/genome_sets/gut_phage_database (ebi.ac.uk)
aagaaaaaacgcaaggtggagggagctgataagcgcaccgccgatggttccgagttcgaaagccccaagaagaagaggaaagtctagttctgcagagggtgatgccattcgacgaacttgtttattgcagcttataatggttacaaataaagcaatagcatcacaaatttcacaaataaagcatttttttcactgcattctagttgtggtttgtccaaactcatcaatgtatcttagtaccgcattcatttcagtgagagcttactcatcagagttcgtgaaatcagttgaccttgccgacgaggtgataacggtgcagtacatctcaaagctcgtctgtggcagaacgaaaagcccaacatgggaaaaggctgtccatatagccgagaatcttggcatgactccgtcagaattcaggcagattgagattgagtacgacagcagtgaagttaataaaaaagcccactgagtggtcaagactcagcgagctttagtccagtcccaaacggcagaacggacaatcacattatggcagaaaaagcggtaatttacgcgagatttagttcagataagcagcggacgtccgtatcagactaacgcttatccatgcccgtaccagattcgaactggtgatctccgccttgagagggcggcgtcctaaaccgctagacgaacgggccaaacagttcaagttagtggacaatgtcctcggatggattaccttccttgtggcagccttcgtttattgctctaccatagagccgacggcgagcttttgggattgtccggaatttatcactactggttataaacttgaggtaggtcacccgccaggcgcacctttcttcatgctcaccgccaatctgttctcacattttgcaagtgatccctcgcaggtggcaaagatgggaatcgtcgactgcacgatcaaacatcgatcgaagctgtccaatacacattgcgaag

SEQ ID NO: 1987 - DNA, 966 bp, unidentified
  source 1..966: mol_type = unassigned DNA; note = Bacteriophage uvig_495199 from the Index of /pub/databases/metagenomics/genome_sets/gut_phage_database (ebi.ac.uk)
aagaaaaaacgcaaggtggagggagctgataagcgcaccgccgatggttccgagttcgaaagccccaagaagaagaggaaagtctagttctgcagagggtgatgccattcgacgaacttgtttattgcagcttataatggttacaaataaagcaatagcatcacaaatttcacaaataaagcatttttttcactgcattctagttgtggtttgtccaaactcatcaatgtatcttagtaccgcattcatttcagtgagagcttactcatcagagttcgaattcttggaaatcacagaggaacagaaacttataccgctgattagtgcgtaaaagaaaattgaccagcgccacacaaaaacggtgctggtcaatgactttgtataggacatatttagtgattttgatcgttagaaaagtgctttttattacaacagcatacaccatgagtgtgagcaactaaggagagcaactgactcttaatcagtgggtcctgggttcgagtccccgatggtgcaccaaagaatgccttacacgaaagtgtagggcgtttttttgttgctctatttcaagaaggcacgacgtccgtatcagactaacgcttatccatatataccgcgaatcttgctttccgggaaaagtgcgatacagatgtgatgattccgattaaagaactgatcatgtccgcatacgatttgcgcaagcagcgggaagaacaggataataggtagaattgcggcccacttaggcagcggttcttctccgttttggtgaatagctttccttattataatagagtattgtttgtgttgcgaaaatgcaccaaccatttccgcaacatgaacagcgaggtgaaacttatgatatgcgtagaccagaatggacaagctgttgaaatctcggtggctgaggaatcgtcgactgcacgatcaaacatcgatcgaagcttccatcatgatcattcgaag

SEQ ID NO: 1988 - DNA, 966 bp, unidentified
  source 1..966: mol_type = unassigned DNA; note = Bacteriophage uvig_305979 from the Index of /pub/databases/metagenomics/genome_sets/gut_phage_database (ebi.ac.uk)
aagaaaaaacgcaaggtggagggagctgataagcgcaccgccgatggttccgagttcgaaagccccaagaagaagaggaaagtctagttctgcagagggtgatgccattcgacgaacttgtttattgcagcttataatggttacaaataaagcaatagcatcacaaatttcacaaataaagcatttttttcactgcattctagttgtggtttgtccaaactcatcaatgtatcttagtaccgcattcatttcagtgagagcttactcatcagagttcggatggcaaaagtcaaaccgcgtatcacatacacatttatcgacccaaatagcgcaaaggacgttgaattagcgattcagaaaataatcgtagaaagacttctttcgctacagatacatgaaacattatcaaaagtcagttgaaaccagcctatattctcaacagcaaaggagatcaagcggtttcctttgctttctttttatgctaaaatagagagcgatataggttggttggcgaaaggagcaaccgacatgaaaatagcggcttattgtcgcgtatcaacagataaagatgagcagttgacgtccgtatcagactaacgcttatccattgcggcggattatagaccatattagtgttaataaggacggaaatgtgcgtataatcctgaaaaagctcgatgatttggatatactttaattgctttacctatttggtgcggatagtagaaataaccgcccacaattagataggtagaatcaaccaaaaccaacctatatcacataaggggacaagccatttttaccgcttgttccctttttatatcccgattacccgcctaaatgtaaaagtatagccatctggtattccatggtgtgaagatattccaagcgctgtataccaagggagcggaatcgtcgactgcacgatcaaacatcgatcgaagctatggtacgttccttatgaag

SEQ ID NO: 1989 - DNA, 966 bp, unidentified
  source 1..966: mol_type = unassigned DNA; note = Bacteriophage uvig_291363 from the Index of /pub/databases/metagenomics/genome_sets/gut_phage_database (ebi.ac.uk)
aagaaaaaacgcaaggtggagggagctgataagcgcaccgccgatggttccgagttcgaaagccccaagaagaagaggaaagtctagttctgcagagggtgatgccattcgacgaacttgtttattgcagcttataatggttacaaataaagcaatagcatcacaaatttcacaaataaagcatttttttcactgcattctagttgtggtttgtccaaactcatcaatgtatcttagtaccgcattcatttcagtgagagcttactcatcagagttcggtgttcggctacacgctcgacctcggtgatcttggcaacaaactgcttgccgttgtcaatgcggtgtttgccgtgctgtcgatcctcggcattgtgaccgacccgaccacggcgggcatcggcgacagcccgcaggcgatgacctacgaagagcccaaacagaacccctataattaaaatgagcccccgggctgactaccgcaacaggtagtcacaagtccaagttatccagccaatccagcaacaaccgaagcgtctgcgcgtggcggcctatgcccgcgtcagcagcgattccgaggagacgtccgtatcagactaacgcttatccataattcgaactcatcaacggcatgaagttatcagaaagccgtgcagccacatgaagaacagatacatccctttcggctatcagatgcaaaatggagattcagtcatcaacacggaacaagccgcaactgtacagcacatattttatgcgtataccgaaggacagagttttaaggaaattgcagaatacttgaccacaagtggcacagcctatcacttttcagataataactggaacaaaaatatcgttgcccgcatacttgcaaatgagatttactgtggagccaaaggatacccagccatggaatcgtcgactgcacgatcaaacatcgatcgaagctaccgttcacgaccggtgaag

SEQ ID NO: 1990 - DNA, 966 bp, unidentified
  source 1..966: mol_type = unassigned DNA; note = Bacteriophage uvig_263829 from the Index of /pub/databases/metagenomics/genome_sets/gut_phage_database (ebi.ac.uk)
aagaaaaaacgcaaggtggagggagctgataagcgcaccgccgatggttccgagttcgaaagccccaagaagaagaggaaagtctagttctgcagagggtgatgccattcgacgaacttgtttattgcagcttataatggttacaaataaagcaatagcatcacaaatttcacaaataaagcatttttttcactgcattctagttgtggtttgtccaaactcatcaatgtatcttagtaccgcattcatttcagtgagagcttactcatcagagttcgttgctgatgaggaggggcacaccatcccttttccgggcagcctgcgtcggtgagctgcccggacagctctaattcaaaatgtacatcgttatatacacaaggtatgtacggcgcaggctgccatcaaaaatccccgcaagtgattgcgtgagcgcttgaaaaagcacaaataaagcaaacgaaccgccccggtttccgcaatggaagccggggcggtttttgtgttgcaacgtacaggaaaagcagaaaatattttttacagaaaggacaagcaaactgtccaacatgatcgctataatagacgtccgtatcagactaacgcttatccattatgagccatgaatgaaacaattattgaccgcacttatgtgtgcttaaagctgattgatatgctctacaagaagggacttatcaacgaagcaacctattttaatgtgaaacgaacctatcagaacaagtagttttttgcgctgggttgtcaaggatgtcagcccagtgtccatatcattgcagattaaagattttttgagtattctcgttttgtcagaagaaatcaggaacactaaaggaggaagatgctatgtacaatatgtctccgtactcattatctcgatcttttcgggacaaaccggaatcgtcgactgcacgatcaaacatcgatcgaagctaagatagtactcacgtgaag

SEQ ID NO: 1991 - DNA, 966 bp, unidentified
  source 1..966: mol_type = unassigned DNA; note = Bacteriophage uvig_13765 from the Index of /pub/databases/metagenomics/genome_sets/gut_phage_database (ebi.ac.uk)
aagaaaaaacgcaaggtggagggagctgataagcgcaccgccgatggttccgagttcgaaagccccaagaagaagaggaaagtctagttctgcagagggtgatgccattcgacgaacttgtttattgcagcttataatggttacaaataaagcaatagcatcacaaatttcacaaataaagcatttttttcactgcattctagttgtggtttgtccaaactcatcaatgtatcttagtaccgcattcatttcagtgagagcttactcatcagagttcgaggtttaaagtggttaggtaaatttgaagaagaacctttaatagatgatatgttgccaaaagataaaatatcagaagctaaagaattaataatgaattgtctacaaaatgaggatatgattttggtttcaacaattaaggaattggctaatgataaaaatatatctttaagaacattaaataaggcaaaaaaagaattagaaatcgcatcagttagaagtaatggtaaatggtattggaagttgtaggtgatgtatgttatgtcaactgaggaggaaaaacaaaaagtaagggaaagacagacgtccgtatcagactaacgcttatccatagtgtgttgaagaacatttatcaaaattgatggaggaacagctagatgtctgatgaaattatattaaaaactgaagatgtgtcatatgacgatgatgaagatattgaagaagtcgatgactttgattatacaggatatgaagtggtaagaagagaattttatgctcatttatacgatgcagcagttaattttaaaaatgatagtattcaatttaataccgcttgtgttaataaaattaatggcttgtatattcatttattagttaatcctactgacaagaaaatggttatcaaagaatgtggaatcgtcgactgcacgatcaaacatcgatcgaagctaatggacaaccgcactgaag

SEQ ID NO: 1992 - DNA, 966 bp, unidentified
  source 1..966: mol_type = unassigned DNA; note = Bacteriophage uvig_527169 from the Index of /pub/databases/metagenomics/genome_sets/gut_phage_database (ebi.ac.uk)
aagaaaaaacgcaaggtggagggagctgataagcgcaccgccgatggttccgagttcgaaagccccaagaagaagaggaaagtctagttctgcagagggtgatgccattcgacgaacttgtttattgcagcttataatggttacaaataaagcaatagcatcacaaatttcacaaataaagcatttttttcactgcattctagttgtggtttgtccaaactcatcaatgtatcttagtaccgcattcatttcagtgagagcttactcatcagagttcgaccagttccgccgtgcagcgtggaccgacctaactgtggaggtgtatctgtgatgcttctggaaagcacccccgtgttaaacgcaattcacctcatacatgagcaaacaaataaggctcaccgccaaaattgacggtgagccttattttacgctcgatttttaacgttaagtcgttataaaaaccttatgctctcggttttttaatagcagcctgtgctgccttctgctgggcgttagcctgcttcagtgcccactcacccttggcaatgttcagcttctgggtggtcacattgttgttggacgtccgtatcagactaacgcttatccatggtcgataatatcaacaagaacacttattctcccctttcccctgctgttcctcctgatgttttcagcattgatgcaactgcactaaagctgatctccattttatttgacaacaacctgatctctgctgaggtctatcatcaggtccttagcagatattctgcgtaatgtcaaggatgtcgctgacaccggcgacatcctacctattcccttcgcaatcttctatactacgggcaaaggaggtacagcgatatgaacatcacacaaagaatgtactttgggcaattcccattggacaaagaggaatcgtcgactgcacgatcaaacatcgatcgaagctcgttagtgaattacctgaag

SEQ ID NO: 1993 - DNA, 966 bp, unidentified
  source 1..966: mol_type = unassigned DNA; note = Bacteriophage uvig_133907 from the Index of /pub/databases/metagenomics/genome_sets/gut_phage_database (ebi.ac.uk)
aagaaaaaacgcaaggtggagggagctgataagcgcaccgccgatggttccgagttcgaaagccccaagaagaagaggaaagtctagttctgcagagggtgatgccattcgacgaacttgtttattgcagcttataatggttacaaataaagcaatagcatcacaaatttcacaaataaagcatttttttcactgcattctagttgtggtttgtccaaactcatcaatgtatcttagtaccgcattcatttcagtgagagcttactcatcagagttcgaaaaaggtagcgatgaggactattttgaactagaaataacactaaatatataattattatttacagcatcaatgagcaaatgaataggctcgttaatgctatacataaaaatagctagagaattaactctagctattatcttgcaagtagtcacttaatattttattaattaaatttgtatattgctagaagtgaaaaaataatataaaatagaaaaaagagaactacattctattggcttttgagtggtttttcctgtctaaaactaataggccaagggatataccttagcctacttctgacgtccgtatcagactaacgcttatccattaaattagaaataacaagtaatgatgctaaggctcaaggttggtattctctatataataatttaggtgaaggttacaaaggtggtccagatttgcatgattcagattatttttcaggaagtaaattaataacattaaaagaaggtcaatatttgaaattagacagtaatacaaaaattataaaatagaaataataatagataaacatcagggcagttttactagctgctctttttttaggaggaaataagatgtatgcaatgtatttaagaaaatccagggctgatgacaaggatattccggaatcgtcgactgcacgatcaaacatcgatcgaagctgttaacctcggacattgaag

SEQ ID NO: 1994 - DNA, 966 bp, unidentified
  source 1..966: mol_type = unassigned DNA; note = Bacteriophage uvig_8523 from the Index of /pub/databases/metagenomics/genome_sets/gut_phage_database (ebi.ac.uk)
aagaaaaaacgcaaggtggagggagctgataagcgcaccgccgatggttccgagttcgaaagccccaagaagaagaggaaagtctagttctgcagagggtgatgccattcgacgaacttgtttattgcagcttataatggttacaaataaagcaatagcatcacaaatttcacaaataaagcatttttttcactgcattctagttgtggtttgtccaaactcatcaatgtatcttagtaccgcattcatttcagtgagagcttactcatcagagttcgttcaccaaggacgagaaagcaacacgtagccgccgcacaatggacgccccgtccacctataagtttgagcaggccaagcgtgagtacatagtagagccggttttcaaggaaagcggcagcaacacacttttctcacttctcctcaacttaatgcgtctcgacgccattggctgacatccgtgacagcttcggcggatggcagtagaatgaccatgccacttgccgtttgccgcaggaaaaggaggaaagtatgagaaagacaaacggtatgacccgcgagacgaccgcgttcctgtatgagacgtccgtatcagactaacgcttatccatttacctacgaacctgacacgccgtcgcccgccgcaggcacggcaagcgcatgagggggtgaaattaaattaaccatactgtaatttacgcccgcgctgacaagccaaatgagactgagcttaactggcaagtacaagtattgcagggcctcgcggcgagtttgcacttgaacgtcactcacacaatctgcgaaacagccagcagtctcgatttcgaccgcccgggcttgcaaaagctaatgcgcttatctgagcatcacgagatagacaccgttataatgacaaatctcgaccgcataagggaatcgtcgactgcacgatcaaacatcgatcgaagctgccactgactggctaacaag

SEQ ID NO: 1995 - DNA, 966 bp, unidentified
  source 1..966: mol_type = unassigned DNA; note = Bacteriophage uvig_361885 from the Index of /pub/databases/metagenomics/genome_sets/gut_phage_database (ebi.ac.uk)
aagaaaaaacgcaaggtggagggagctgataagcgcaccgccgatggttccgagttcgaaagccccaagaagaagaggaaagtctagttctgcagagggtgatgccattcgacgaacttgtttattgcagcttataatggttacaaataaagcaatagcatcacaaatttcacaaataaagcatttttttcactgcattctagttgtggtttgtccaaactcatcaatgtatcttagtaccgcattcatttcagtgagagcttactcatcagagttcggaagggatgtcgctgacagcactggcaaacgagctaatacgtcagtccatacccaaccagaaaggaaagccagcatggagccacagctgcatccgaaatatccttaccaaccctgtttaccttggggacaaggagtttcctgctctggtgacacgggaactgtttgcacaggtacagagtaggctggaagaaaccagccggatgaaacgggaaagtcagaccagggaattagccagaaaggagggattacatgccaagggcggaacgaatcgtggaggtcatcccggccacctggaacccgacgtccgtatcagactaacgcttatccatacaaacttcaaattcagctaaggacaggcatggtattggatgtgaatctgtgattaaaagtaaagaggatgttcgtattaataatagagaaattaaaataaaagaacaaagggaggccatgtatagatgccgaaaattgagttgagctttgatatagataggctggggcaggatgtcttgaaaagattatatgccatgacggacgaaatatttgagtctgagggtttgaaatgtgtagacaggggagtggtccgggtctatgaggatagagggagaaagaaggattatggacgtttttggggaatcgtcgactgcacgatcaaacatcgatcgaagctcgccttggcttatgcacaag

SEQ ID NO: 1996 - DNA, 966 bp, unidentified
  source 1..966: mol_type = unassigned DNA; note = Bacteriophage uvig_186102 from the Index of /pub/databases/metagenomics/genome_sets/gut_phage_database (ebi.ac.uk)
aagaaaaaacgcaaggtggagggagctgataagcgcaccgccgatggttccgagttcgaaagccccaagaagaagaggaaagtctagttctgcagagggtgatgccattcgacgaacttgtttattgcagcttataatggttacaaataaagcaatagcatcacaaatttcacaaataaagcatttttttcactgcattctagttgtggtttgtccaaactcatcaatgtatcttagtaccgcattcatttcagtgagagcttactcatcagagttcgatgaaatgtccgtagaattccttggcggacttcgattcagggaacgcatataggaggcagtcatgaaaaagacgcggtatatcccatacggatacacaatgcgcaatggtagaacggtcatctccggagaagaagcagaagttatcagagagattttcaaatcgtatctgaacggagcttccttgaaagcgattgctgacgagttgagcgaccaccagattccttatacgcaaaagagcgctatatgggataaggcccgtattgcaaggatcatcgacaacgccaaatatgcaggaacaggacgtccgtatcagactaacgcttatccatatgctgaaggatctccttgcgcaggagttgatcacagaaaaggaatatgccagggcgaaaaagtattatatgaagcttaccggtgcagatatcgtattagcccgctgaaaattgtgcataaggtcaattctgcgctgttccaattgttttggtagctattcagaatagttatcagtataatgtggtttgccaaaagtggttggtatcatattatgataccaaccaaaaaacgagagaggaggacaccgaaatgcctgaagtacggctcatcaccccgatcacaagacagagcacgaagaaggaatcgtcgactgcacgatcaaacatcgatcgaagctctcgatagccgaatcacaag

SEQ ID NO: 1997 - DNA, 966 bp, unidentified
  source 1..966: mol_type = unassigned DNA; note = Bacteriophage uvig_183615 from the Index of /pub/databases/metagenomics/genome_sets/gut_phage_database (ebi.ac.uk)
aagaaaaaacgcaaggtggagggagctgataagcgcaccgccgatggttccgagttcgaaagccccaagaagaagaggaaagtctagttctgcagagggtgatgccattcgacgaacttgtttattgcagcttataatggttacaaataaagcaatagcatcacaaatttcacaaataaagcatttttttcactgcattctagttgtggtttgtccaaactcatcaatgtatcttagtaccgcattcatttcagtgagagcttactcatcagagttcgtactgtgcatcgaaagcgattccggaaatgacgctcaaagaatcctgctgtcaggcactggggcttgcggaatatgatccgcaggagattgccgaccgcatcatccagattgatgccctccccgacaacaggctcgtttttcatcttgctgatggtacggattcggaaatccagtggacattcccgtcccgttcggaaagctggactgaggaaaaaaggcagaaagcggctgagcaagcacggaggcaccatgcaaagacaggtcgttaagcgcgaggtacaggtcatccagccgacgctgacgtccgtatcagactaacgcttatccatgtgacggcgtggaaattgagactttcgcacattcccaggaacatatggcataatcagcagagcataacaaaagaccagtcactgacggctggcctttttgcgtgtgcagctgttctctggtcagatttcgcttatcacagctttgaattcatccgacgcaataaagaaagaacgggaatatccagtctttcctgcttatactggatcatggaatccctcgctttgcatatccgcatacatgatttccacatgcttttgctgagcgtagtgaattgtattcagcgtgccgcctgctttgccggaatcgtcgactgcacgatcaaacatcgatcgaagctctgattcagacggaggcaag

SEQ ID NO: 1998 - DNA, 966 bp, unidentified
  source 1..966: mol_type = unassigned DNA; note = Bacteriophage uvig_159029 from the Index of /pub/databases/metagenomics/genome_sets/gut_phage_database (ebi.ac.uk)
aagaaaaaacgcaaggtggagggagctgataagcgcaccgccgatggttccgagttcgaaagccccaagaagaagaggaaagtctagttctgcagagggtgatgccattcgacgaacttgtttattgcagcttataatggttacaaataaagcaatagcatcacaaatttcacaaataaagcatttttttcactgcattctagttgtggtttgtccaaactcatcaatgtatcttagtaccgcattcatttcagtgagagcttactcatcagagttcgtatggaaatgcgaacaggaagtattgctcccatgggtgctacatcgaggatcggtttgggggtggcagtagatgagtcaggaagaaggaaagcgtgagatcgtctttcagatgactatgagtgccgcccgtcagatgctcgaaaaggggctgatttcggtggatgactacaagcagtttgatacaaagatgcaacaaaaataccgcccgatattcggcacattattctccaaggatgggacggtaaagacatggcaaagaaagtaagaaaaatacctgctaccctcaatcagttcacatcgacgtccgtatcagactaacgcttatccatatgagaaaagcagcacggtagtcttccgaggtgggattgagattacaatttaatatgaagaaacacgaatcgaaaggggcatctggcagcttggctggatgcccctttctttatgtactgatattgagtgctgtatgatatgttgatggcaaatacatttaccagcggtatcagattttgaggatattgcgaagctgcaaatatagtttatcacagatgccggaggtttttcctgtaatggcgtagatcttcttcactgacctcagaaatgattctgtcaagtgtatccagtaattgcttggaatcgtcgactgcacgatcaaacatcgatcgaagctaccaagatagccgtcgcaag

SEQ ID NO: 1999 - DNA, 966 bp, unidentified
  source 1..966: mol_type = unassigned DNA; note = Bacteriophage uvig_89669 from the Index of /pub/databases/metagenomics/genome_sets/gut_phage_database (ebi.ac.uk)
aagaaaaaacgcaaggtggagggagctgataagcgcaccgccgatggttccgagttcgaaagccccaagaagaagaggaaagtctagttctgcagagggtgatgccattcgacgaacttgtttattgcagcttataatggttacaaataaagcaatagcatcacaaatttcacaaataaagcatttttttcactgcattctagttgtggtttgtccaaactcatcaatgtatcttagtaccgcattcatttcagtgagagcttactcatcagagttcgctactctgcacaggctgctatcgcaaacaagtaatccacacaggatgtattgacaggtaacttaatacaagtttattcctgatataaaatcagagggtgttccaatcggaacaccctctttttgatgtattatgtaaaataaatttatattttgttgcttttgaaaatataatgatgattttcaaaggagacaaatgtatgggaaataacattatatctaaggtacttaaatttgtgggtataggcgtaattatagtaggaattgcggcttcactgatatcaggctgttctgtcaacactgacgtccgtatcagactaacgcttatccataaaaaacaatcataaatctgcttgaaaaatggcagagacagagagaaagaaaccgaagggaggagcgataatgaataagaaaatcgacagcttatatgcggcgtttatgcttattgaaattctatatgagcgtgggcttataaacaaagccacacttgacaccgtgagagaaaaagttaaatccgaaaatccgcacaattcacaggcggcttaatgtcaaatatacttaaaaacacaaggaggaatttttatgacaaacacaatttttaaaaacaacacgaaaatcggaaatccttacgaggaatcgtcgactgcacgatcaaacatcgatcgaagctgattgagtctagagtgcaag

SEQ ID NO: 2000 - DNA, 966 bp, unidentified
  source 1..966: mol_type = unassigned DNA; note = Bacteriophage uvig_47505 from the Index of /pub/databases/metagenomics/genome_sets/gut_phage_database (ebi.ac.uk)
aagaaaaaacgcaaggtggagggagctgataagcgcaccgccgatggttccgagttcgaaagccccaagaagaagaggaaagtctagttctgcagagggtgatgccattcgacgaacttgtttattgcagcttataatggttacaaataaagcaatagcatcacaaatttcacaaataaagcatttttttcactgcattctagttgtggtttgtccaaactcatcaatgtatcttagtaccgcattcatttcagtgagagcttactcatcagagttcgttgtctatgataaacaaaatgaccgtctccttttccacttctattgctcatagagccgcataaacagcggctctatattagttatatgtttttgcactctggcggaccagacggcgaacttaatgcttctcttcgttatctttctcagagatttactatgccgaaccgaaaagcgatgggtgtattaaatgatataggtacagaggcaactgtaatattctcaccatcgactgatgctttttttgacgcttttgcaactgtgtagctccacttaaaaggaagtaaattcaagtatacatcgacgtccgtatcagactaacgcttatccattgtgctcctgaatacatgtatgagcacagctacgcttatccggctttacagtcggcaatctaattttataaaagaaaaaccgccctagtgttggcgcaccagagcggcaaagactacattcccgaaggttgatgcagtacgttccgaaaatattgtatcatcttcggggcagccatgcaagcggaacctttgttcgcgccggctgttatttttatacttatttttacataattataatcgaggtgataccatgaccgaacaaaaatctgatgatctgcgcatgggagcactgtatatccgggaatcgtcgactgcacgatcaaacatcgatcgaagctggtgacggcacagaaccaag

SEQ ID NO: 2001 - DNA, 966 bp, unidentified
  source 1..966: mol_type = unassigned DNA; note = Bacteriophage uvig_51452 from the Index of /pub/databases/metagenomics/genome_sets/gut_phage_database (ebi.ac.uk)
aagaaaaaacgcaaggtggagggagctgataagcgcaccgccgatggttccgagttcgaaagccccaagaagaagaggaaagtctagttctgcagagggtgatgccattcgacgaacttgtttattgcagcttataatggttacaaataaagcaatagcatcacaaatttcacaaataaagcatttttttcactgcattctagttgtggtttgtccaaactcatcaatgtatcttagtaccgcattcatttcagtgagagcttactcatcagagttcgtggatttttataaaacgagagacgaaataaggagggtctatgttaccgagtaatgtgaaaataattaaaccgcgcgctcaagtggtgattgatgagcaaccgcttattcaatacataagggtggcgggctatgcaagggtatccacagggaaaccggagcaaaagacgagctttgagtcacaacagaaacattataagagtttggtcgctcgccaccccgattggattgatgtcggtctgtacgccgatgaggggattacaggtacgagcattcgaaagcgaaagaatttcattcgaatggacgtccgtatcagactaacgcttatccattgctttacaaccttgccacggctctaatccttgacctactcgtaaataataaaatcagtcaggcagagtttgaacgcatcgatgctttgaacaaggaaagtttcggtgtggggtgatatttttttatattttatctggacggcggccaatcaagttttgagtgggaaaatgtctgatatttgcggcatagtgcttgactaattcgggacgatatttaatatatgagtaccctcgaaaaaaggagatttttatggaaattcaattaaaacgggcgggttcttatgttagggttagcacctaggaatcgtcgactgcacgatcaaacatcgatcgaagctatagttcggtctggaccaag

SEQ ID NO: 2002 - DNA, 966 bp, unidentified
  source 1..966: mol_type = unassigned DNA; note = Bacteriophage uvig_239031 from the Index of /pub/databases/metagenomics/genome_sets/gut_phage_database (ebi.ac.uk)
aagaaaaaacgcaaggtggagggagctgataagcgcaccgccgatggttccgagttcgaaagccccaagaagaagaggaaagtctagttctgcagagggtgatgccattcgacgaacttgtttattgcagcttataatggttacaaataaagcaatagcatcacaaatttcacaaataaagcatttttttcactgcattctagttgtggtttgtccaaactcatcaatgtatcttagtaccgcattcatttcagtgagagcttactcatcagagttcgatgatgaacgtgaacaactgctggccgcagtgggagaggaggatgctgtatgatgattgcgaaatacatccggctgtcctctgccgatgaggacgcccggtatggtgataaaccggagagcaacagtgtaacccatcagcgtatgctcttaaaccgctatctggagacgcatccggagtttgaagaatatcaggtcttggagtttcaggatgatggacgcagcggcaccaactttgaacggcccgggatcaaggcgatgctggagatggtgcgccgtcgggaaattgactgcgtcatcgtgacgtccgtatcagactaacgcttatccatccagcagcaggaacttgaccggatgctggagagctgtaccccggacagtccatggattcagcacttcaagcagtttggacagttggaaacgctgaatcgggaggtcctggtacgcctggtggagcggattctggtctacgagggcgggcgcattgagatcgtgttccgttaccaggagcagtttgccaacgctatgatcttcgcatcggaagaaacggcccgtcagccgctgagagaggcggtgtaagcgatggcgagaaagtcacgcaaggacctgatccgcgcggaaaacagcgggcaggaatcgtcgactgcacgatcaaacatcgatcgaagctgattatactctaccgccaag

SEQ ID NO: 2003 - DNA, 966 bp, unidentified
  source 1..966: mol_type = unassigned DNA; note = Bacteriophage uvig_543352 from the Index of /pub/databases/metagenomics/genome_sets/gut_phage_database (ebi.ac.uk)
aagaaaaaacgcaaggtggagggagctgataagcgcaccgccgatggttccgagttcgaaagccccaagaagaagaggaaagtctagttctgcagagggtgatgccattcgacgaacttgtttattgcagcttataatggttacaaataaagcaatagcatcacaaatttcacaaataaagcatttttttcactgcattctagttgtggtttgtccaaactcatcaatgtatcttagtaccgcattcatttcagtgagagcttactcatcagagttcggttaccttaattctttaggcactccttaatatttttttttcatatagagggctactggctgtaaaatgctggtagccctcattttttagttgtatctagtatataaggggtgtataatagataggaattaaaaaacagcctcataaagccctttgttttatcgagggtaaagaagtctacacctaatacataaaagtggctgtatgaggcacacaggagctcacaggactattacaggagaataaacaggatggtaaaaaagaaattgagagcggtattttatgccagagtatccacagagacgtccgtatcagactaacgcttatccatagacagcacctcgatgctgttttcgagatagattcagctgcgaccagccgtgaggaaataggcaatccgccgcactacggcaccaaaaacaaactatacgaggagcatattcctcttattccacaccgcgcgagacagatgacacgcgatgattatttgtactatgacattttgattggaatggacactgcaaatatcaggaatatgacaaggattgcaggtggcagtgacagtcagcagaagatatttaagatgctgtcatttgctgattacgggacaaatcataagcttacagcagcgggaatcgtcgactgcacgatcaaacatcgatcgaagctgtacggaggtcgtaatcaag

SEQ ID NO: 2004 - DNA, 966 bp, unidentified
  source 1..966: mol_type = unassigned DNA; note = Bacteriophage uvig_248716 from the Index of /pub/databases/metagenomics/genome_sets/gut_phage_database (ebi.ac.uk)
aagaaaaaacgcaaggtggagggagctgataagcgcaccgccgatggttccgagttcgaaagccccaagaagaagaggaaagtctagttctgcagagggtgatgccattcgacgaacttgtttattgcagcttataatggttacaaataaagcaatagcatcacaaatttcacaaataaagcatttttttcactgcattctagttgtggtttgtccaaactcatcaatgtatcttagtaccgcattcatttcagtgagagcttactcatcagagttcgaggacagcaacaacgcctctttcgtatacagcgtgaatctgctccgaatgcttcttggcatggaacttatcacgaaagaagaatacaacaagatcgtggcgatcagcgaggatcattacggcacaaagattttttccgtttgatcaaaaaacttccgattttcgctggatgtttctgaactcttgtggtatctgtttgtgttgccgaaaggcaaaaccgcgggcaagcccgcagaaaggagtagagcgcaatgaacgtaattgagatcacagccgagaaagaaacggtgcaagaaacgatgacgtccgtatcagactaacgcttatccataaatcgtattccaattgatcggcggtctaaaactgaccgaaagcatcgcatgaaaggacggcgaaaacagatatgaaaaacaggaacatacccttcggatacagattcgaaaacggaaagatcattatcagcgctgacgagcataccacacttcagcgaatctgctccgaatacctcgacggacggtcactcctgcagattgcaaatggattgcagacagacagggtagagtttgcacccggcataacgacatggaacaaagccaggatcatgagaatcgtcgatgatgatcgctatcttggaatcgtcgactgcacgatcaaacatcgatcgaagctcgtatggacactacatcaag

SEQ ID NO: 2005 - DNA, 966 bp, unidentified
  source 1..966: mol_type = unassigned DNA; note = Bacteriophage uvig_366853 from the Index of /pub/databases/metagenomics/genome_sets/gut_phage_database (ebi.ac.uk)
aagaaaaaacgcaaggtggagggagctgataagcgcaccgccgatggttccgagttcgaaagccccaagaagaagaggaaagtctagttctgcagagggtgatgccattcgacgaacttgtttattgcagcttataatggttacaaataaagcaatagcatcacaaatttcacaaataaagcatttttttcactgcattctagttgtggtttgtccaaactcatcaatgtatcttagtaccgcattcatttcagtgagagcttactcatcagagttcgggatacgagccagatcaaggactatgagatcgacgaaagcaaaaaggcgcttgcccggcggattgtgatggagatgctctgcgaacatgatgcgcacagcacggatatcctgaacaagctgaagctgatggggatatccgaacggacgatacattctgccaagaaggagcttggcgttcaatcatacagaagtgacggcgtctggtactggcatctggacgacccgtcgggatcataaaggaggaaagcgatgcaggatgatggccgcagagagcaactgcgtcagatttaccagcgggagacgtccgtatcagactaacgcttatccataattgaccatagataacctaacgagaggaaacgaaatgccctatgatggatgatcagactgaacagatttttatgaacgccgaggcgattacggaagccgacgctgaaacggaggtccttgcagatcttgcgggatatcaggttacgaaggccgagctgttctcccatacaagggagccagctattacgatctgggagtcccggatcaaattcaatatggcctgcctacggaagtttccgaatgttacgcatatccagatcctgattcatccggatcagaagcggctcatcatccgccccggaatcgtcgactgcacgatcaaacatcgatcgaagctattgcgtgaggtatgtcaag

SEQ ID NO: 2006 - DNA, 966 bp, unidentified
  source 1..966: mol_type = unassigned DNA; note = Bacteriophage uvig_203185 from the Index of /pub/databases/metagenomics/genome_sets/gut_phage_database (ebi.ac.uk)
aagaaaaaacgcaaggtggagggagctgataagcgcaccgccgatggttccgagttcgaaagccccaagaagaagaggaaagtctagttctgcagagggtgatgccattcgacgaacttgtttattgcagcttataatggttacaaataaagcaatagcatcacaaatttcacaaataaagcatttttttcactgcattctagttgtggtttgtccaaactcatcaatgtatcttagtaccgcattcatttcagtgagagcttactcatcagagttcggaagatcagtagataaaaggtatggattggaggatcgcaatgaagaaatatgaatacaatatttgcacggctgcggacaaagaaatttttgataagcaatgtgcggcattggaaaagcatattccaggcattgaacggtccgatatgctgacagatgttgacggctcgcaaacgcagatatatgaattaaacggaaagaagataatcgtacacaacagttattatattgacgctgtgtacattgattcagaagttgaacttacagagtatttcaaatgataattttaccgcttgactaaggacgtccgtatcagactaacgcttatccatatttatcctacatacaatccgtctgtagcaaagacatacaaattcacctgcggatgcacgagccacacatatggcagtgctgttatcacaaaacagccgacctgcacatcagaaggtacaaaaacaaaaacttgtacgcagtgcggagcaacagtaacagaaacaattgcaaagctttcccacagctacacaaccacagttgttgcacctacttgcactactaacggctacacactccacaagtgttctgaaggagggtatctccggtagcatccaaaatcagcgggccatcctggaaaaggaatcgtcgactgcacgatcaaacatcgatcgaagctcgagctgtcacctattcaag

SEQ ID NO: 2007 - DNA, 966 bp, unidentified
  source 1..966: mol_type = unassigned DNA; note = Bacteriophage uvig_54187 from the Index of /pub/databases/metagenomics/genome_sets/gut_phage_database (ebi.ac.uk)
aagaaaaaacgcaaggtggagggagctgataagcgcaccgccgatggttccgagttcgaaagccccaagaagaagaggaaagtctagttctgcagagggtgatgccattcgacgaacttgtttattgcagcttataatggttacaaataaagcaatagcatcacaaatttcacaaataaagcatttttttcactgcattctagttgtggtttgtccaaactcatcaatgtatcttagtaccgcattcatttcagtgagagcttactcatcagagttcgattcgcaatgatattttggaagagacaagctgctctttgttcgggttatcgacattcgatccgacatttattgagcagaatgtgaggaaaattattctgtacgacaataggttggtgttcagtatggctgatgggcgagaggagaaaattagttggaaaaataaatcacgctctcaatcgtggacgccggaaatgaaagaacacgcaagacaaaggactatggaacggttgcagaataggaggataaacgatgccgacagtaaaggtaataccagcgactcgtgattttcatacgggcatgacgtccgtatcagactaacgcttatccatgcgatgggaagtggcaattcaaattcaaaaatgaaagagtgatagaagtctaaaccgttaaaaagagaaaggcgcctgggacaagaacctcaggtgccttatttttttgtttagctttaatagcaaaaccataattttaacgcaatggcataaatttaacggaaaaatatgtatagcccacaccgatagagtagaaaggggaaaattgccttaatatatgaggtatattcacaaaaataagcagaattagggcaaaatacgataaaaacgccaggttttgatagaaattctcgtatcaaaggaatcgtcgactgcacgatcaaacatcgatcgaagctgtaggatcctccattgtaag

SEQ ID NO: 2008 - DNA, 966 bp, unidentified
  source 1..966: mol_type = unassigned DNA; note = Bacteriophage uvig_373913 from the Index of /pub/databases/metagenomics/genome_sets/gut_phage_database (ebi.ac.uk)
aagaaaaaacgcaaggtggagggagctgataagcgcaccgccgatggttccgagttcgaaagccccaagaagaagaggaaagtctagttctgcagagggtgatgccattcgacgaacttgtttattgcagcttataatggttacaaataaagcaatagcatcacaaatttcacaaataaagcatttttttcactgcattctagttgtggtttgtccaaactcatcaatgtatcttagtaccgcattcatttcagtgagagcttactcatcagagttcgcaagaattcttataacacagagtttgctttgcttttgtgttccaagaaaataaaacgtgcaaagagccgggggattccccggctctccgtttcaatgctccactatacagtcatagtaggtagccagcttattctcaacggcgtcgtcgtcattgaggaaagcctcggcgaggcacgcgaagaagtccgcgttgtctacgccgaatttttttgcgacgctgccgtaatcggaatacagcatgttcatcgtcgcccagaactcgtgcggctcgcagtcgagctttttcttttcaaaggcttgacgtccgtatcagactaacgcttatccatctgtgaccgtgccgaatgacccgcttgttgtgcagctgaaagcagaggcgcggcgtgaccggcatcgcgcggagctgtacgggcgtatcattgccgggcttgttacctttgttttctttgtgctcatcttttttattattgacctgctgaaccccaatgtgggatggatccgccgctccatcattgagcagacgcactacggcgtgagcactcgcgccgccatcatgtgcgcgctcccgtggtggctgggatgaccacgcttcatcatggcgcgtacatactcgcgcgttatagtaccgaggaatcgtcgactgcacgatcaaacatcgatcgaagctccgtaacattccatactaag

SEQ ID NO: 2009 - DNA, 966 bp, unidentified
  source 1..966: mol_type = unassigned DNA; note = Bacteriophage uvig_284738 from the Index of /pub/databases/metagenomics/genome_sets/gut_phage_database (ebi.ac.uk)
aagaaaaaacgcaaggtggagggagctgataagcgcaccgccgatggttccgagttcgaaagccccaagaagaagaggaaagtctagttctgcagagggtgatgccattcgacgaacttgtttattgcagcttataatggttacaaataaagcaatagcatcacaaatttcacaaataaagcatttttttcactgcattctagttgtggtttgtccaaactcatcaatgtatcttagtaccgcattcatttcagtgagagcttactcatcagagttcgttgtaaatcgtataataataaaaaccctagaagatatagaagttatcttctagggttttattcttacttttctattaataagtttttatgagtccatccttctttagaatcatatttaatttttatccattctttttctgagtctactctctcaacaaattgattttttttcactattctttttattctggcttgtgaacttggaaactctcttataataactgagtctgatattgttaaataatattttttttcagttaccttttcaaaaatatttactccaaatatcaaaataataaagacgtccgtatcagactaacgcttatccataaatctataaaaaaaattagatctgcttctccagaagaattaaataagattcaaaaagaagtcaaagatttaagaaaatatctagctgaactggaaaaagaaataaacttaaaaaatgaacaagaaataaataaagataacttagaattatttgataaataaggaggatgttatgaaaaaagaaaatatcaaagctgccatattaaaaattaaggaattaaaagcaaaatgtaaaaaaggagcttaataaatgaaagttgttacataccttagagtttctacagaaatgcaaaaagatagggaatcgtcgactgcacgatcaaacatcgatcgaagctgcatgtaacgccaacttaag

SEQ ID NO: 2010 - DNA, 966 bp, unidentified
  source 1..966: mol_type = unassigned DNA; note = Bacteriophage uvig_31017 from the Index of /pub/databases/metagenomics/genome_sets/gut_phage_database (ebi.ac.uk)
aagaaaaaacgcaaggtggagggagctgataagcgcaccgccgatggttccgagttcgaaagccccaagaagaagaggaaagtctagttctgcagagggtgatgccattcgacgaacttgtttattgcagcttataatggttacaaataaagcaatagcatcacaaatttcacaaataaagcatttttttcactgcattctagttgtggtttgtccaaactcatcaatgtatcttagtaccgcattcatttcagtgagagcttactcatcagagttcgcagtttacctgcccttatgaaatcacgcatgacggaggaacagttgtgtggtgattataaatattgtatggcacagaaaatgacaaaaacactgctcgataagggcctgatttccgtggatgaattcaccaaaatcagcgcaagaaaccgccaaactttctccccatatttagcggagattatgccctaaatgacttgatatatatcgattagtacgggaatatgtccatactgaaagtgaggtgagttgatgaaaaggataacaaaaattgaagaaaatagagccttatctattaagaagacgtccgtatcagactaacgcttatccattcgtctttgaactgaagtgtggactgaaattaaaggaaaggttggtgggataatggcacatataccctacggatataagattataaatggaaaagcagaggttgatgaaaaacaggctgaggtagtcataaagctgtttgatggctacattgcaggacttggattaaagcctgcggcagagaatgcgggtcttgatatttatcatggcagtgcaggcagaatgctgcgaaacacgcattaccttggagatgaatattatcctgccgtcatcgacagagagcgttttgacaaggcagaagaggaatcgtcgactgcacgatcaaacatcgatcgaagctccgtagacgtgctccttaag

SEQ ID NO: 2011 - DNA, 966 bp, unidentified
  source 1..966: mol_type = unassigned DNA; note = Bacteriophage uvig_51541 from the Index of /pub/databases/metagenomics/genome_sets/gut_phage_database (ebi.ac.uk)
aagaaaaaacgcaaggtggagggagctgataagcgcaccgccgatggttccgagttcgaaagccccaagaagaagaggaaagtctagttctgcagagggtgatgccattcgacgaacttgtttattgcagcttataatggttacaaataaagcaatagcatcacaaatttcacaaataaagcatttttttcactgcattctagttgtggtttgtccaaactcatcaatgtatcttagtaccgcattcatttcagtgagagcttactcatcagagttcgcgccggagcaagtggatgccttcatgaccgaagtgcaagaacggcttaaaaataaaggcaagaagtaaccttcttccccctacccgtggataatgtgcatagctataacttttatagaaatattaatgattttgtgaaccaaatccaatttgacatggagggcaatatctgccctcctttttctatgtcaaatacagttcttttagtctcggccaatcggcaaatccaggggcgcaaagggggtgagaaaatggaagaaaaaagaacatctctcgtttctcgtaaaccaggcaagaccgggacgtccgtatcagactaacgcttatccatccgggtatatcatcatcgacccttcctggaaaaataaaaactacatggagtgaaaaaatgttaaagaatttccaagtaatcgaacttatcagtagcaaaaccaaagcactcatgacggtgtactgcaacaaactcaagttcaacatatacaccgccgtagaccttaactacgccgcccatgtgcagctcttgatggacccgaacggaaagtgttttgctatccgtgcctgcgaaaaggatgccccgaacgccgtagcattctcccgccctgccgatgcaaaaccctacgctatcgtcttgggaatcgtcgactgcacgatcaaacatcgatcgaagctgtatgagcgacggaagagag

SEQ ID NO: 2012 - DNA, 966 bp, unidentified
  source 1..966: mol_type = unassigned DNA; note = Bacteriophage uvig_525361 from the Index of /pub/databases/metagenomics/genome_sets/gut_phage_database (ebi.ac.uk)
aagaaaaaacgcaaggtggagggagctgataagcgcaccgccgatggttccgagttcgaaagccccaagaagaagaggaaagtctagttctgcagagggtgatgccattcgacgaacttgtttattgcagcttataatggttacaaataaagcaatagcatcacaaatttcacaaataaagcatttttttcactgcattctagttgtggtttgtccaaactcatcaatgtatcttagtaccgcattcatttcagtgagagcttactcatcagagttcggaaaaatcgtgtttgttttgaaagatgggacggagttggtgcagaaaatttgaggggtgtggggtgcagaacgcactccctttgcttggtgggtgtgcattgtatcatttgtgacgtgcgtttccattcatatgtacgcctacttcaaggtcacaatcgccgttggagtgggcgtatacttttaccatcgccttgcacacctgcttggtgtcggtatccagacgctccatggcattccgaaatagctgtaccagcttttccacgctgacggggttcttttccttgccacgctggatgatagacgtccgtatcagactaacgcttatccatggaaaaaatactgtccaacagcaaaacaaattccggaaaatacgctgctctctgcctgctgtgatgttttggaaatatcggaatttgatgcggaacaatttgcggaacgaatcgaacagattcagattccggcacccaatgaactgcaattctgcttttcagacggaacggaacaaaccgtacattggaaagaccgttcccgttcggaaagctggacggcggaaatgcgagagaaagcgaggcagaaaaaatggcgacagtcctaaaaataccagcaaagtttcaccccataacgcatttggaatcgtcgactgcacgatcaaacatcgatcgaagctctgttgcagataccacagag

SEQ ID NO: 2013 - DNA, 966 bp, unidentified
  source 1..966: mol_type = unassigned DNA; note = Bacteriophage uvig_520815 from the Index of /pub/databases/metagenomics/genome_sets/gut_phage_database (ebi.ac.uk)
aagaaaaaacgcaaggtggagggagctgataagcgcaccgccgatggttccgagttcgaaagccccaagaagaagaggaaagtctagttctgcagagggtgatgccattcgacgaacttgtttattgcagcttataatggttacaaataaagcaatagcatcacaaatttcacaaataaagcatttttttcactgcattctagttgtggtttgtccaaactcatcaatgtatcttagtaccgcattcatttcagtgagagcttactcatcagagttcgccgagcaattagcccccataaagcagatggaagaggtggattttaatgcctgaaaaaaacgatatcccaatctttcggaatcttgatggagtgtactaccgtgtgattcgtgatggtatacatgtcaaccgatgcttttctgatttgtctgaagccgagcaggatatgatcatggcagagtataacgaggaacaactcagacggctttgtcgctatctcagcataagcctacgccagattggagatgcgctggatcttgtcagagacgaatgaaaggagagcagaatggaagtagaaaatgacgtccgtatcagactaacgcttatccattgcgatgctgggaaagtcgatctaataatcacacagaaggtcagcaatgtgtccagagatgcccaagaaatgacgatttgcgcaagaatgctcgctgctcgcaagcctcctgttggcatctacttcatatcagaagatctatacactttggcctcatattatcgtgatgaccttcgggaaccctgtttcttcccaacaccagactggaaaatcttgcctgatgacgagctggatatgagaggtgctctccatgagtaaatcagcaaagaaagcagccgaccaagcagaacgcgagaaagtggaatcgtcgactgcacgatcaaacatcgatcgaagctaccaggaccttcctatagag

SEQ ID NO: 2014 - DNA, 966 bp, unidentified
  source 1..966: mol_type = unassigned DNA; note = Bacteriophage uvig_92124 from the Index of /pub/databases/metagenomics/genome_sets/gut_phage_database (ebi.ac.uk)
aagaaaaaacgcaaggtggagggagctgataagcgcaccgccgatggttccgagttcgaaagccccaagaagaagaggaaagtctagttctgcagagggtgatgccattcgacgaacttgtttattgcagcttataatggttacaaataaagcaatagcatcacaaatttcacaaataaagcatttttttcactgcattctagttgtggtttgtccaaactcatcaatgtatcttagtaccgcattcatttcagtgagagcttactcatcagagttcgtggctcattttttattttgtgaaagggggatatttttgaaagaacaaaatttgatacgttatagcattcagcttgcttttttgaagcagctgttagaaagaaagctcataaccgatagagagtattcccttatcaagcagcgcttaatgaaagattatcgtgtggtttccgaactatcctcttgattttgtgttgcattggcgttatgattaacgcaatgaaaggaacacattcaacaaggaggtcaagcatgaaagatgttgaagtcattaaagcgcgaaacacgctctctccacgagcgacgtccgtatcagactaacgcttatccatatcacggcatttgtccgcatgaatccttgatttttgacgttttcaaggtttgaaaagcgtcaatttgccacccatttgccaccgctttttgaaaattcacccctgaacagcagaaaaagggctgaaccgattgaacaaggtctttcggttcagcccttttcgctgtattatgccaattctaccaggctttcaaacagatttactgtggtctgcttcatttcatccgtgttatgaacgtatttgttcattgtggtctgaatgtctgcatgtcctaaccgttcctgcacatccttgattggtggaatcgtcgactgcacgatcaaacatcgatcgaagctcacagaccgcctctatagag

SEQ ID NO: 2015 - DNA, 966 bp, unidentified
  source 1..966: mol_type = unassigned DNA; note = Bacteriophage uvig_588507 from the Index of /pub/databases/metagenomics/genome_sets/gut_phage_database (ebi.ac.uk)
aagaaaaaacgcaaggtggagggagctgataagcgcaccgccgatggttccgagttcgaaagccccaagaagaagaggaaagtctagttctgcagagggtgatgccattcgacgaacttgtttattgcagcttataatggttacaaataaagcaatagcatcacaaatttcacaaataaagcatttttttcactgcattctagttgtggtttgtccaaactcatcaatgtatcttagtaccgcattcatttcagtgagagcttactcatcagagttcggggaaagtaatagtgcaacatcatttcgaataaatatagaacggaggtggtgcacatcaaaacaaaaccaatccttacatatacgttcgacaacccgaacgccagagacactatagtgcaaacattacgcgaaatgataatcagcaaaatcgtcgagaaagaccaatccgtttacataccaacccaacgtgcacataatcaagaccaataagcgcgtggcgcggaatttcgacgataagaggtacaaaaaatgagaattgcggcttattgcagagtatcaacaggcaaggaagatcagctgacgtccgtatcagactaacgcttatccattcgacgccaaagcggacggtgaaatcataatacacctcaagcacctcgcttgaggtgtgtttttttatcattttctatcttcctattacgaagctgtcgtggagacggtagcctcataacagtaagatagaaaatcgtaaaaaatgggctataccgatttggtatagccctaaatttatatactgaacttcagcccatcattcgccgccacgaccctcgaagtccgtccgtcatccgccagatgaccccgtagctcctccgcgaagacacacttgctgtcaaaatctgaatgcaccagcaggaatcgtcgactgcacgatcaaacatcgatcgaagctaattctgaggcgttatagag

SEQ ID NO: 2016 - DNA, 966 bp, unidentified
  source 1..966: mol_type = unassigned DNA; note = Bacteriophage uvig_129895 from the Index of /pub/databases/metagenomics/genome_sets/gut_phage_database (ebi.ac.uk)
aagaaaaaacgcaaggtggagggagctgataagcgcaccgccgatggttccgagttcgaaagccccaagaagaagaggaaagtctagttctgcagagggtgatgccattcgacgaacttgtttattgcagcttataatggttacaaataaagcaatagcatcacaaatttcacaaataaagcatttttttcactgcattctagttgtggtttgtccaaactcatcaatgtatcttagtaccgcattcatttcagtgagagcttactcatcagagttcgtttcatggttccggttttgtatggagatttctcctatttatgaagagataaaaatttcttcataaaaaatatagccacagctgggcagaccatgttaatataaaaatgtaactgttccaaactgactttgcattatggatttttccctaacgcactttccaaaggtttgattttagtatctgacttttcggagcagttcttataaaataaatatatatggttgagccggttgtgtgaaaggagattttaaatgaaacaatcggacaacacaaaaataacagccctttatgagcggctttcgacgtccgtatcagactaacgcttatccattaaagaaacaggctgaaaaagaagccagagaaaaagccaattcagaggcttaaataaaagaaaaaaggacactaacctcaaagcgtcctttagaacggcaatgtgagtgtcgcagatcatgcattctaatttttttttaacccctgataattcagaatatttattcatcattctagaaagtgcgtatttgtctaccaaaaataaacggtcgctaggcttataaccatatagtagtttaacatattcttgcaggtgttctactacaaaccgtggtagtgtaatttttcgcctactgtttgcggaatcgtcgactgcacgatcaaacatcgatcgaagctgttgactgaactgcgtagag

SEQ ID NO: 2017 - DNA, 966 bp, unidentified
  source 1..966: mol_type = unassigned DNA; note = Bacteriophage uvig_74804 from the Index of /pub/databases/metagenomics/genome_sets/gut_phage_database (ebi.ac.uk)
aagaaaaaacgcaaggtggagggagctgataagcgcaccgccgatggttccgagttcgaaagccccaagaagaagaggaaagtctagttctgcagagggtgatgccattcgacgaacttgtttattgcagcttataatggttacaaataaagcaatagcatcacaaatttcacaaataaagcatttttttcactgcattctagttgtggtttgtccaaactcatcaatgtatcttagtaccgcattcatttcagtgagagcttactcatcagagttcgtatgatcccgtttttacattgtagatttgtggaatatattattttatcaatcctccttatgtaaatcgcataaattcgtgggtcgattagatatctatattcttttatcatgtgtagtcctttctgggggtgcacatatatttatagctctgttactgaaaaatttcgacttaattgtctttttttataaaatgggttgttgcccccccaagggtttcagcataaatttaaaattttgcgaggagatattatgcaacaagcagccgcatacgtccgcgtgtctactgacgatcagacggagacgtccgtatcagactaacgcttatccataagttgtctattctaagcctgatgacagcgtaagtatatttttttatctataactatacgcacatggagtacggaggtccgcatggcatgtgcgtataattttttatttttttgaaaaagctgtcagcatttagagttctcgaatcacccaactgtttactttttatcatacctccttatttccatgtcccataaatgtatagggattctagtgtcattgttgcattattcgcattcgataatatgcccacattaactcgtgtcactgtatttctgctaaccatcgcaaatccaatgcctggaatcgtcgactgcacgatcaaacatcgatcgaagcttgtaaggtactcctaaggag

SEQ ID NO: 2018 - DNA, 966 bp, unidentified
  source 1..966: mol_type = unassigned DNA; note = Bacteriophage uvig_9192 from the Index of /pub/databases/metagenomics/genome_sets/gut_phage_database (ebi.ac.uk)
aagaaaaaacgcaaggtggagggagctgataagcgcaccgccgatggttccgagttcgaaagccccaagaagaagaggaaagtctagttctgcagagggtgatgccattcgacgaacttgtttattgcagcttataatggttacaaataaagcaatagcatcacaaatttcacaaataaagcatttttttcactgcattctagttgtggtttgtccaaactcatcaatgtatcttagtaccgcattcatttcagtgagagcttactcatcagagttcgaagcaacaagtttattgttccagacaatgttccggaaaggcaaggtggaaaaatgaatcgtaatatcatcatctatcaggttatggttgaaattatcaaaacctggcttcgttcaggaaagatctcaagaaaagattatacggaaatgaacacaaaaatggctgaaaaatacggcatatctttgtcgggtatattcgttgataaatctgaaaatccatgctaatatggtatctgaaaggaggaggtttacatggaacgtttgatacaaaaaatagaaccttctgttgatatttcacataagacgtccgtatcagactaacgcttatccatctgccgctgctgaatcatcaaaaacaaggagatggagaaaatgccaaaagtaacaaaaattccgccaagattaaatcctgccacttttgcacctttggagagtgttgaaaaacgaaaagttgcaggatatgcaagagtttcaactgattcagaagaacaaaaaacttcctatactgctcaagtggattactatacgaaattcattaaagaacggatcgattgggaatttgtcggagtttatacagacgaaggcatcagtgcaacaaacaccaggcacagagaaggattcaacagaatgatggaatcgtcgactgcacgatcaaacatcgatcgaagctctcatcaccaacttgaggag

SEQ ID NO: 2019 - DNA, 966 bp, unidentified
  source 1..966: mol_type = unassigned DNA; note = Bacteriophage uvig_190248 from the Index of /pub/databases/metagenomics/genome_sets/gut_phage_database (ebi.ac.uk)
aagaaaaaacgcaaggtggagggagctgataagcgcaccgccgatggttccgagttcgaaagccccaagaagaagaggaaagtctagttctgcagagggtgatgccattcgacgaacttgtttattgcagcttataatggttacaaataaagcaatagcatcacaaatttcacaaataaagcatttttttcactgcattctagttgtggtttgtccaaactcatcaatgtatcttagtaccgcattcatttcagtgagagcttactcatcagagttcgtcttcatcaaacacacctttggatttgtttacaagatagagaacgctgattgaatcggcgttctttttctttgccacgggacgagatgaagtagttaaagtagttgtttttcggtttttgcgtaaactttcacctaatacgcgcgtacttagaggaagttacacgcaaaaacggattttccactactttaactacttgaacggggttaaatcagctctttttcagttcaaggacagcggactcaatcagcttgtcaatggtgtcggagtcgagcttataacccttgctgttcaagtattcgacgtccgtatcagactaacgcttatccattactttacagaaagcgcgaattggaggtgagactacgaaagcggtaatttacgctcgatattcgagccatagtcaaagagaggaatctatagagggtcagctcagagaatgtcacgagtttgcccttaaaaacggattcaccatcataaatgaatacattgacagggcaatttccggcaaaacagataaccgtccgagctttcagcgtctcattaaagacagtgaaaagggacagtttgaagcggtgataatgtatacccttgaccgtttcgctcgtaatcgttatgactctgctatctaggaatcgtcgactgcacgatcaaacatcgatcgaagctctccattcaaggtatcggag

SEQ ID NO: 2020 - DNA, 966 bp, unidentified
  source 1..966: mol_type = unassigned DNA; note = Bacteriophage uvig_41106 from the Index of /pub/databases/metagenomics/genome_sets/gut_phage_database (ebi.ac.uk)
aagaaaaaacgcaaggtggagggagctgataagcgcaccgccgatggttccgagttcgaaagccccaagaagaagaggaaagtctagttctgcagagggtgatgccattcgacgaacttgtttattgcagcttataatggttacaaataaagcaatagcatcacaaatttcacaaataaagcatttttttcactgcattctagttgtggtttgtccaaactcatcaatgtatcttagtaccgcattcatttcagtgagagcttactcatcagagttcgaagttcctgaatatgctatggatgaagcagttgatgcagttattggaggatatgacaatattaaagtattagatttcatagaagtatttaataataacagactgctgttccatctaaaaaataaagaaataaaagaatttatttgggaagaacgttcaagaagtcaatcttggactgatgaaatgagagaagaagcaaagaaaagaacaataataaataacaaaaataaaaagagaggagcaaatggaaaatggcaaaagtcagagtaatacctagcacactaaatccacttactcaatcgacgtccgtatcagactaacgcttatccatcaataacattcaaattttataacgggaaagaaataactttaacatctgcttaactagtggctgttttttttgttttgcatttcgatttttgcgcctatcatgttataattgctttggaagattaaatagtataaacgaactctcttatatagatttcctaaaggagtgattattttgccaggtttagatgaaagaaaaaaagtctttaaagcaagcaataagaagcatcaaaaattatatgaccattatattgaggcttttaagcatgagccaatcttttgcttgtgccttaaaaagaatggaatcgtcgactgcacgatcaaacatcgatcgaagcttcaacatctgtaagatggag

SEQ ID NO: 2021 - DNA, 966 bp, unidentified
  source 1..966: mol_type = unassigned DNA; note = Bacteriophage uvig_453452 from the Index of /pub/databases/metagenomics/genome_sets/gut_phage_database (ebi.ac.uk)
aagaaaaaacgcaaggtggagggagctgataagcgcaccgccgatggttccgagttcgaaagccccaagaagaagaggaaagtctagttctgcagagggtgatgccattcgacgaacttgtttattgcagcttataatggttacaaataaagcaatagcatcacaaatttcacaaataaagcatttttttcactgcattctagttgtggtttgtccaaactcatcaatgtatcttagtaccgcattcatttcagtgagagcttactcatcagagttcgtgcggaatagtgaaatgcaaaataatactaataaacagtctaacattcactttcttttcccctttaatttactaataatgaactttgtaatagaaatacaatatgaatgcacagtatttaaacttagataccatcaaagagaaccgcaacttcaaaggaatatcccaagaggatgcaaaagaattaattgatacactatatgctttttcagttttgagctatgaagcatataacaaaaaagatacacaatatggagaattttgaattaaaaggctttgctaaaggcaaaaaacagcaaaagacgtccgtatcagactaacgcttatccattcgagcatcctttcaaagagagcggaaaacgagactcgaactcgcgaccctaaccttggcaaggttatgctctaccaactgagctatttccgcattttttcaacaaaagtttataagaaacaacaatggtataaaacgatatctcgtctactctattcctgatccgaattcacaaacttacttggactgacattataatacttcttaaatacctccctgaaatacttcgcatccgaaaacccgacaatttcagcaatctccgttattgtatattctttctgctttaataattgtgctgcaggaatcgtcgactgcacgatcaaacatcgatcgaagctcgttattctgcatccacgag

SEQ ID NO: 2022 - DNA, 966 bp, unidentified
  source 1..966: mol_type = unassigned DNA; note = Bacteriophage uvig_244564 from the Index of /pub/databases/metagenomics/genome_sets/gut_phage_database (ebi.ac.uk)
aagaaaaaacgcaaggtggagggagctgataagcgcaccgccgatggttccgagttcgaaagccccaagaagaagaggaaagtctagttctgcagagggtgatgccattcgacgaacttgtttattgcagcttataatggttacaaataaagcaatagcatcacaaatttcacaaataaagcatttttttcactgcattctagttgtggtttgtccaaactcatcaatgtatcttagtaccgcattcatttcagtgagagcttactcatcagagttcgttgaatcaattttagaaaagctcaaaagtatgcttacagaaatcgccgtagtagattataataaagcggcataagcctaaaaatagcaaagccgcccctgctctaacaaggacggctttgcattcactcacacaatctcggtatgaaatattttctctcgacaagagtattatatcatacatccgctgatttgtgtagggtgtattttttgtacccttttttaataatattcatagtaggagatgatataatgaactatttaatgtatcttagaaaatcccgtgctgacggagataatgagacgtccgtatcagactaacgcttatccatcaaagtgggatacgagtgaacctcgtttagaaatacatctaaatgacttctaatttttaaagttttcatatataacataatggtgctaatgagctcgcccacaaaggtaatggatagcctctacttttcattttcaatctttatctccttttttatatttcaatttctccaaagcaaatatattccacgctgtttccgtatggagcactaaataaatacattcctttatttgctgataatgtggcatatccataacctacaatagtccctgatacttgcataatgcatgtaattctctgaggaatcgtcgactgcacgatcaaacatcgatcgaagcttactcaaccattgttacgag

SEQ ID NO: 2023 - DNA, 966 bp, unidentified
  source 1..966: mol_type = unassigned DNA; note = Bacteriophage uvig_563601 from the Index of /pub/databases/metagenomics/genome_sets/gut_phage_database (ebi.ac.uk)
aagaaaaaacgcaaggtggagggagctgataagcgcaccgccgatggttccgagttcgaaagccccaagaagaagaggaaagtctagttctgcagagggtgatgccattcgacgaacttgtttattgcagcttataatggttacaaataaagcaatagcatcacaaatttcacaaataaagcatttttttcactgcattctagttgtggtttgtccaaactcatcaatgtatcttagtaccgcattcatttcagtgagagcttactcatcagagttcgcgtactcccaaaaattcattgactttataatagaagaaatacggaaaaatcctgttaattttgtaaacagtctaaaagcgcataaataaaaagataaccccgggcacataggaatgctcagcaactaaatgcttaccccattttgggacccagtgtaattccctcacaagttatctttgttaatattattatacatgatttgctagaatatgcaataggtttaaatcaaaatattttataaggtgcacccatgtcttataacgataacattaaaaatttaaaacctgatgaaataatcatgacgtccgtatcagactaacgcttatccataaggcggctggaagcctcagaaatttaatattgatgtatatttaaagttctgatttccaacatgtgtgtgcatatgagctcgcccacctcgagatggtatgcaccagaaccctgttttgttatattgctcatgtaattgcaaatattattttttagttttctttaggagtaactactacaggaggtaatattacaggcggctggccaaaagacgaggttatctccgcaatcaacaatgaggttctacttattagattttctagcacgaaacctccattttctttaaattcttttgctaaaggaatcgtcgactgcacgatcaaacatcgatcgaagctgttcatctgtcctgcgcgag

SEQ ID NO: 2024 - DNA, 966 bp, unidentified
  source 1..966: mol_type = unassigned DNA; note = Bacteriophage uvig_203635 from the Index of /pub/databases/metagenomics/genome_sets/gut_phage_database (ebi.ac.uk)
aagaaaaaacgcaaggtggagggagctgataagcgcaccgccgatggttccgagttcgaaagccccaagaagaagaggaaagtctagttctgcagagggtgatgccattcgacgaacttgtttattgcagcttataatggttacaaataaagcaatagcatcacaaatttcacaaataaagcatttttttcactgcattctagttgtggtttgtccaaactcatcaatgtatcttagtaccgcattcatttcagtgagagcttactcatcagagttcgtgccgcagcaccatggcccaaagcatcttcacccatctggtccacagacagcaccattcaagaatatttagggtttggatgtgtgcagagtgtttatcgatggttggatggcgttagtatgccaacagtcgataatctgtatgcaattagcaaaatgcttcaagttcctatggattcaattgtttgcggaaatgctggaagaacaaaaagtcaaatggatgcatgtcttacggatcaggagagaagagtttatacctactataagaaaatgagagaattaaatgcagcataatttttgaagacgtccgtatcagactaacgcttatccattcacaggagcccctacagggagtataagtgcccttatatgatgaaagtgtaagggtaaagaggtaaaagggctgtaagaggcaaatagagggcttattcatgtgagagcatgggtaggctcttttttagtgcgtaaaaataattatacagcccctgtataattttcccctaaaaaatgaggagggctgtgattatgtttattaaggctaagtagagccacaggataataagcataacaggaggtagcaggatgagtataggaacagaacttagagcggtattttacgccagagtatccacggaatcgtcgactgcacgatcaaacatcgatcgaagctttacggtagtatactgcgag

SEQ ID NO: 2025 - DNA, 966 bp, unidentified
  source 1..966: mol_type = unassigned DNA; note = Bacteriophage uvig_311594 from the Index of /pub/databases/metagenomics/genome_sets/gut_phage_database (ebi.ac.uk)
aagaaaaaacgcaaggtggagggagctgataagcgcaccgccgatggttccgagttcgaaagccccaagaagaagaggaaagtctagttctgcagagggtgatgccattcgacgaacttgtttattgcagcttataatggttacaaataaagcaatagcatcacaaatttcacaaataaagcatttttttcactgcattctagttgtggtttgtccaaactcatcaatgtatcttagtaccgcattcatttcagtgagagcttactcatcagagttcgacaacttcatgcattcatcaaataccaaagcagtgaataagaatgaatcaaaggcaacagaggtaagctcccatatgctgacaactacgataggtacatatcatgtcacattagaatttagtcctgataataacagcaaagcagttgaagaaatcagaagcacactgaaagaaaaatatataaaaggggctatacaggaggataaagaggcgttacaatctgactccctagtgggaaaggagagagaagcatgaaaagagtaaattgtttatacagagtttcatctaaacagcagttgcagacgtccgtatcagactaacgcttatccatggcgaaaaggtattggttcacctaccactctgtatacaccctgttcagcgtaaaggacataatagccagtgtattggcataaatggcagactcaggccaggtagcgtagatttctgaagatacaacatttttgatgtaatcagtataacgtacataataattctgagcggtgggatcctgcggaacaccatcatggacaatgacgtattcaggaatgaccacacggctgaggacaatttcgccggattcatccacaggcttgatctcatcctccggaatcttgggtggatattcaccataggaatcgtcgactgcacgatcaaacatcgatcgaagctactatctcaaccacatcgag

SEQ ID NO: 2026 - DNA, 966 bp, unidentified
  source 1..966: mol_type = unassigned DNA; note = Bacteriophage uvig_85018 from the Index of /pub/databases/metagenomics/genome_sets/gut_phage_database (ebi.ac.uk)
aagaaaaaacgcaaggtggagggagctgataagcgcaccgccgatggttccgagttcgaaagccccaagaagaagaggaaagtctagttctgcagagggtgatgccattcgacgaacttgtttattgcagcttataatggttacaaataaagcaatagcatcacaaatttcacaaataaagcatttttttcactgcattctagttgtggtttgtccaaactcatcaatgtatcttagtaccgcattcatttcagtgagagcttactcatcagagttcgtatcacccattgataaatcgagtttcatataatacttccagaaaaacaaaagagggagtgaaaagaatggaaccaaaacaaactaaagaagaaaaatatataattgagagaaaatatgtaggagaaaaaagtctaatagaaatcattacaaaaatgattttacaggaaataaaggtaaaaaatggctaaaaaaataaagatatgttataatcaaaatgagcaagttgaatgttgatgtgaaggaggaagcatgaatacaaacatcaaacatacagctttactaagtagactatcaagagagacgtccgtatcagactaacgcttatccatatggaaaaagaatacaaaaaattgaaatagaatataattttattaatgattaatttggatctattttatatttaataatccaattatgtatgtcgatcctaatggacatgctcctaagtggtggcaaagcattcttattggattgggagtaatcgctattgcagctttagcaactgctgcgattgtatgctctggaggaagtgctacaccgtttttggcagttgcgggacaagcagctctaggtggattaaaaatagctaccatagctggtgccactgctggtatagtgcgagctggtaaggaatcgtcgactgcacgatcaaacatcgatcgaagctcctcagctccttccatcgag

SEQ ID NO: 2027 - DNA, 966 bp, unidentified
  source 1..966: mol_type = unassigned DNA; note = Bacteriophage uvig_81090 from the Index of /pub/databases/metagenomics/genome_sets/gut_phage_database (ebi.ac.uk)
aagaaaaaacgcaaggtggagggagctgataagcgcaccgccgatggttccgagttcgaaagccccaagaagaagaggaaagtctagttctgcagagggtgatgccattcgacgaacttgtttattgcagcttataatggttacaaataaagcaatagcatcacaaatttcacaaataaagcatttttttcactgcattctagttgtggtttgtccaaactcatcaatgtatcttagtaccgcattcatttcagtgagagcttactcatcagagttcgtccaaggcaatccccgagggtattttgatggatacaaccgcttctgcgcttggggtcgataagttcaacgaggcttttttccacgagcgcgtttcaaagatggtgatttcagtcgggaactgcatcacgtaccacatgaaggacggaacagaaattcagcgggtctggaaagaccgttcacggcgggaaagctggaccccggaaatgaaagaaaaggcaaggcaggcaacgacagaaaggtggagatcaaatggctaacgcaagaaaggtacaggtcatagaggcaacaatcaatcctaagacgtccgtatcagactaacgcttatccatacgacgggcgtatcgtttttacttttgtcaatggaatggaggcagaaggataaattagaagacaagccctttcaacaaaacgggaatgtcttgtcgaaagggtgattcagtcaaatatccaaagtttcctgattgtagtctatgtctgtaagcggctcaacatcaaaggtttcttcgggctcggcatattcttctaccggagttctattcttgggctttgttttatataagctgctcatacggagtggattcctcattcgatggttatatgcgatgagcatagcttcagcataaccgagcggaatcgtcgactgcacgatcaaacatcgatcgaagctacacgatgtcgttcatcgag

SEQ ID NO: 2028 - DNA, 966 bp, unidentified
  source 1..966: mol_type = unassigned DNA; note = Bacteriophage uvig_81430 from the Index of /pub/databases/metagenomics/genome_sets/gut_phage_database (ebi.ac.uk)
aagaaaaaacgcaaggtggagggagctgataagcgcaccgccgatggttccgagttcgaaagccccaagaagaagaggaaagtctagttctgcagagggtgatgccattcgacgaacttgtttattgcagcttataatggttacaaataaagcaatagcatcacaaatttcacaaataaagcatttttttcactgcattctagttgtggtttgtccaaactcatcaatgtatcttagtaccgcattcatttcagtgagagcttactcatcagagttcggctgagaaggattacaaagcttttgttcgtaatacaaaggagcagaagaaatttgtaaatgcccttgtatccgtaaaggataagtcggttctgacaccggagcttgtggaaacccttatttcagggattaccctgacagcggaccggcatatggagattcagtaccgttttaacagtgataagtccactggttatacggatacattccgttttccgagaagaaccaagtggaatgaaggaggtaggacagatgtctaatctggttatgtatttaagattatctttggaggatgatgtgaagacgtccgtatcagactaacgcttatccatatgccgacaagaccatagagcttaggtggaagtttagcaacagaagcaactaaggagatgtatcagctttcggtggtaatttagccggaagctggtataatgaagaggaagaaaaaagtttaagaaaaatgttgtcaactgcttgacacaagagggattgggcgaagcggctcttgatagtctggctgatgaagcactggttcaaattgatgcattgagatatgattcagaaatgaaagaagatggaattattgatattttgaaatttggaattgctttttctggaaaaaaagtaagtgtggaatcgtcgactgcacgatcaaacatcgatcgaagcttacaagcaccaccgctcgag

SEQ ID NO: 2029 - DNA, 966 bp, unidentified
  source 1..966: mol_type = unassigned DNA; note = Bacteriophage uvig_144265 from the Index of /pub/databases/metagenomics/genome_sets/gut_phage_database (ebi.ac.uk)
aagaaaaaacgcaaggtggagggagctgataagcgcaccgccgatggttccgagttcgaaagccccaagaagaagaggaaagtctagttctgcagagggtgatgccattcgacgaacttgtttattgcagcttataatggttacaaataaagcaatagcatcacaaatttcacaaataaagcatttttttcactgcattctagttgtggtttgtccaaactcatcaatgtatcttagtaccgcattcatttcagtgagagcttactcatcagagttcgaggataatcctacttttacactgaatttaaagccccgaatcccgcgtatttaggggctttttcattagcgacaacatttatgggcgcaagaactggctcactcacgcccaaaaacgttctcgcttatttttcttccttattataatgcgtttctacagcgtttctgcgtatttactggatatcttaatccagccctcgccggactttaatctgccatacggcatcttctcaacggtcttcgtttccgtgatcgtatagaccgattccggtgctttctttccagtgtaatctttgccgggagacgtccgtatcagactaacgcttatccataacagctacacagcaaaacaagttcaccaacaacattacaaacaaattattagaattacagtaaaatactaaaaaatccccggtgttaccagcaccagggaaaacaagaaaactatagggtgtttggaacacagtacaattctctctatcacaaagattattgtatcacaaaaatccggcaccgtataggtgttatttttatacgcaaaattaagcaacctcacacatatactaaggaaaggtgatacatatgcaatatgaagaatatcttatctatctccggaagtcccgaagtgatgcggaatcgtcgactgcacgatcaaacatcgatcgaagcttgttaaccggaggtgatgag

SEQ ID NO: 2030 - DNA, 966 bp, unidentified
  source 1..966: mol_type = unassigned DNA; note = Bacteriophage uvig_597427 from the Index of /pub/databases/metagenomics/genome_sets/gut_phage_database (ebi.ac.uk)
aagaaaaaacgcaaggtggagggagctgataagcgcaccgccgatggttccgagttcgaaagccccaagaagaagaggaaagtctagttctgcagagggtgatgccattcgacgaacttgtttattgcagcttataatggttacaaataaagcaatagcatcacaaatttcacaaataaagcatttttttcactgcattctagttgtggtttgtccaaactcatcaatgtatcttagtaccgcattcatttcagtgagagcttactcatcagagttcggtagcagtgcccccgcaaatttcgttttggatgttttcccgcgtctcaagtgagatgggggttatcatagtgtcgagtatggatattcgatacaaagatacccccacaccaaaagccctgccggatggcagggctttcctttattttttgacgatatcccgatagtagacttccgtcttgtcgtcccgtgcgtccttgtcgttcagccacgcttttgccagctcggcaaaaaagtcgggcgttttgacgccaaacttctttgcgacctcgctgtaatcgctatacatagcgttgaccatggacgtccgtatcagactaacgcttatccattttccttgctgatgggcactatgtcagctacttccgctgggacgacgacggcgatttatgcgactgcatcgtggccttgggcggtgatgatcaggcgatcatcgtatatatcgaccttgaggatgacgctctgctcgacctgcaaggcgagctgcgcgattgcatcgcctccagcatccggtacaccggtcaataacttgctccccagcccgcaggtgcgggcattatcatatacagaggtggtgatcctatggccttttgcatgtatctgcgcaagtcccgcgcagatatggaggcggaggaatcgtcgactgcacgatcaaacatcgatcgaagctttaggacggattgacatgag

SEQ ID NO: 2031 - DNA, 966 bp, unidentified
  source 1..966: mol_type = unassigned DNA; note = Bacteriophage uvig_593889 from the Index of /pub/databases/metagenomics/genome_sets/gut_phage_database (ebi.ac.uk)
aagaaaaaacgcaaggtggagggagctgataagcgcaccgccgatggttccgagttcgaaagccccaagaagaagaggaaagtctagttctgcagagggtgatgccattcgacgaacttgtttattgcagcttataatggttacaaataaagcaatagcatcacaaatttcacaaataaagcatttttttcactgcattctagttgtggtttgtccaaactcatcaatgtatcttagtaccgcattcatttcagtgagagcttactcatcagagttcgagctacggatttttgggaaagatacgcgaagaaataaatcctgctcaaagaaattgacatgaaaaacgctatcaaagaaatctgatcggaactgatatgggcaactatatgagtgcagacgaactggccggaagaaaaaacctgatcaacctgatcgccgaatccgtcgcacacgacatcgaacaagaaaaaaacaaccccgctgtatctgataacatcatcctgttagtgcccccagaaaaacgaaaaaatgaaatctaccatttacgcccgctacagcaccgacaaacaacgcgagtcgacgtccgtatcagactaacgcttatccattggataaggacggggaaaagatgaaaatcatccggcggcacaaggacttgtaacccatgctgaaaccatgagcatttgacaaacaacgcgctggcggggcatactggaaacctctctaatcctattggcggtcgttccgccccgtcagacagcggctttttttatgcccaaaatgggctgttacctatcactggtcggggtagagaccggatatacaacacccgaaaggggaaatccggacgcggtaccaataggccgagagtgcgcccgaccgcccgcatcgaaggcggcttctctctcggaatcgtcgactgcacgatcaaacatcgatcgaagcttgccttctcctacgagtgag

SEQ ID NO: 2032 - DNA, 966 bp, unidentified
  source 1..966: mol_type = unassigned DNA; note = Bacteriophage uvig_55768 from the Index of /pub/databases/metagenomics/genome_sets/gut_phage_database (ebi.ac.uk)
aagaaaaaacgcaaggtggagggagctgataagcgcaccgccgatggttccgagttcgaaagccccaagaagaagaggaaagtctagttctgcagagggtgatgccattcgacgaacttgtttattgcagcttataatggttacaaataaagcaatagcatcacaaatttcacaaataaagcatttttttcactgcattctagttgtggtttgtccaaactcatcaatgtatcttagtaccgcattcatttcagtgagagcttactcatcagagttcgtttgaaacatcccgaaaggaacagatatactgcaaccgtaaatgttatatggcggcacacagaaaatcatcaaaggagaagattaagtgatggagaaagaaaccgcagaaatgaaataccgcatcggtgagctgattttttatctatacgcggagaaaggcataatcacaccgtcagaatatgaggaattgcgtaacaagctaatagacacctatcacccggtggttggtgaactggagaggaatatgtcatgggaaataagaaagtcactaaaatagacgccacaataaaaatagcctcgacgtccgtatcagactaacgcttatccatgtctgcatttgaccttctgcttgaaggacggtactcaaattgaatataattaaaaaagacacacagccgtgaagctgtgcgccttgggattaacctttcttaacgagtccctggacgatggatgcaatgctatctaattgtttgtcgtccagtctctttaggtctttaataagctcgttcaatttttcagggttctttgcatcggtgtcaaagaagtccttgggagaaagctgtaaatattcgcagatatagaaaaatccagacatcgaaggaagcgcttttccggtttcgatgttgtttggaatcgtcgactgcacgatcaaacatcgatcgaagctgagttgtcgtatatggtgag

SEQ ID NO: 2033 - DNA, 966 bp, unidentified
  source 1..966: mol_type = unassigned DNA; note = Bacteriophage uvig_120053 from the Index of /pub/databases/metagenomics/genome_sets/gut_phage_database (ebi.ac.uk)
aagaaaaaacgcaaggtggagggagctgataagcgcaccgccgatggttccgagttcgaaagccccaagaagaagaggaaagtctagttctgcagagggtgatgccattcgacgaacttgtttattgcagcttataatggttacaaataaagcaatagcatcacaaatttcacaaataaagcatttttttcactgcattctagttgtggtttgtccaaactcatcaatgtatcttagtaccgcattcatttcagtgagagcttactcatcagagttcgatttatggggcgggctgctcgatcacattgtggtgaaggcggacgggcagatagttgttatcgtcaagggcggggttgagattggtgtgggaggataatttctccatttatttatatgcatttggataaatgtgcaaaaaaatgtacatcacctatgctatactctttgtgtaagcaagacgagagggagatagtacgatgtatggtgcgaacaagaaaatgctcaatctgctgattttgagggtgctgcaggagcactcggatgcagatcatcggctgacgccgagcgggatcattcgcgacgtccgtatcagactaacgcttatccatacaaagtctactgcgcttcctgcggcagcaagtgtgagcgggatacatggacgaaggggactaaggtgtggtcttgcagtcagccacgcacaaagtgccaactgaggagattgcccgaatccgagctgagggaagctgcggcatccttctttggcaatggctacgagggcaagatcgttcagaacgtcgagcggatcatcatatccgacgatgaagttgttttccatttgaaagaaggaggcgcataccgatggcaaagaccgtgcgggtaatccctgcaagccctaaaatctttcgttcggaatcgtcgactgcacgatcaaacatcgatcgaagctagatacctctcgagcgtgag

SEQ ID NO: 2034 - DNA, 966 bp, unidentified
  source 1..966: mol_type = unassigned DNA; note = Bacteriophage uvig_441833 from the Index of /pub/databases/metagenomics/genome_sets/gut_phage_database (ebi.ac.uk)
aagaaaaaacgcaaggtggagggagctgataagcgcaccgccgatggttccgagttcgaaagccccaagaagaagaggaaagtctagttctgcagagggtgatgccattcgacgaacttgtttattgcagcttataatggttacaaataaagcaatagcatcacaaatttcacaaataaagcatttttttcactgcattctagttgtggtttgtccaaactcatcaatgtatcttagtaccgcattcatttcagtgagagcttactcatcagagttcgaaatcctgctatttctttttcattttaaaatcaaagtcttttcaatttttttgcaaagcaacaatggctacttgatgtatgtcaagtgcaatgaactaaaaatagtgattgtggaaaaaaatcaagagaacgtactcttatagtatagagcagcaacgctcatgcaaggatggcaagtgtaccagtgtttttgtacatttcccttatgaatttgccccttgtacaatgaaagaacaaggaggcgttcgaaatgacagactatattgggaattacaagaatcgaccgcgcagggtggtgttgacgtccgtatcagactaacgcttatccatgtttgtggaaagatatgcgtgtggatatatttctggtaaaaaaagaaaattgaaaaagttgtggaaaaaatccgattcgctgttctcttatgtattaggaggttccaaacctccgaaaaagtgaatagcgtcctctgctgtaccgcattggggaagcagcgccatgactggattccacgagcgtgccaagatgcgagaaaacatatcgcatggctgcaaagcgatgcgaggcaaagcgccgggaagggttgcctgtctggaatttgcagagggagagaaacgcacagctataacgacagaggaatcgtcgactgcacgatcaaacatcgatcgaagcttggcaacacagcaccgtgag

SEQ ID NO: 2035 - DNA, 966 bp, unidentified
  source 1..966: mol_type = unassigned DNA; note = Bacteriophage uvig_210070 from the Index of /pub/databases/metagenomics/genome_sets/gut_phage_database (ebi.ac.uk)
aagaaaaaacgcaaggtggagggagctgataagcgcaccgccgatggttccgagttcgaaagccccaagaagaagaggaaagtctagttctgcagagggtgatgccattcgacgaacttgtttattgcagcttataatggttacaaataaagcaatagcatcacaaatttcacaaataaagcatttttttcactgcattctagttgtggtttgtccaaactcatcaatgtatcttagtaccgcattcatttcagtgagagcttactcatcagagttcgagtatacaaaggcaaatcgttttaaagatattgtttgcaaaatctatatatagttcgagagggaagcatttgcttccctttcttttatctctcgattaggactaaatccctgaaataaaaaaggatttagtcctttttttatataaaaatattttaaaggagattgattatgaaagtatatgtagtagcaaatttaaaaggtggcgttggaaaaaccaccacaacagtaaacgtagcttatacattttcggaaatgggtggaagagtattagttatcgacctggatccacaatgtaactggacgtccgtatcagactaacgcttatccatgtggaattggaagtacagggagaaaataaagaaataaattttacgaaagatgtacaacaagaagcaattatattagctgcttatcagtacataaaagatttatttgaagagggaaaaataacaaaacatgaacttaataaagtgaagaaaaagtacaatatagatattgaataaattgacatattaagttataataaataccatactaaggtacatctagtatggtatttattggtttaagaggtgtatcatgaaaagaaaaattgcaatatatgctagagtttctacggaacatgaagcggaatcgtcgactgcacgatcaaacatcgatcgaagctggtgcgttatgtaatgtgag

SEQ ID NO: 2036 - DNA, 966 bp, unidentified
  source 1..966: mol_type = unassigned DNA; note = Bacteriophage uvig_236827 from the Index of /pub/databases/metagenomics/genome_sets/gut_phage_database (ebi.ac.uk)
aagaaaaaacgcaaggtggagggagctgataagcgcaccgccgatggttccgagttcgaaagccccaagaagaagaggaaagtctagttctgcagagggtgatgccattcgacgaacttgtttattgcagcttataatggttacaaataaagcaatagcatcacaaatttcacaaataaagcatttttttcactgcattctagttgtggtttgtccaaactcatcaatgtatcttagtaccgcattcatttcagtgagagcttactcatcagagttcgttgtggtcgaattcaaatgcggcgtggcaatcgagcaggaatacgtgaaatgagaaaacgaaccgccggtgggaaaagcacaacccgctggcggttatcattttggcgtttttccataggttttcgtatcattacggcgctctttcacatcgtaaaacgaatctttttcccgttctcctttgtgtgtactgccctaagcaaaactgtttttaatgcctttccatccccggtaaaaatcagatcttttttctttccttccttatcttccgtgtagactccggtggataagagagacatattgacgtccgtatcagactaacgcttatccatgcgtcaaaatgcagatcactgacatcagtgaaaagatatctgaacgcagggcaaaacgtgtgcccgaaagcgagtatgtgccgattagagaattcagcgaagaaaaaacaaaacgatttctatcgaaggtcgtcgtgacaatgttcacggtgaccttcgtgttctataacggagcgaaaattacacgcacctacaataatggtcagcccggaaacaaagtcgggtggaacaaaaagaaggaggagtcataatggcaacggcgacaagaagagtagtacgaactatgccgcagatgtttatggaatcgtcgactgcacgatcaaacatcgatcgaagctagttccgaatggaagctgag

SEQ ID NO: 2037 - DNA, 966 bp, unidentified
  source 1..966: mol_type = unassigned DNA; note = Bacteriophage uvig_393304 from the Index of /pub/databases/metagenomics/genome_sets/gut_phage_database (ebi.ac.uk)
aagaaaaaacgcaaggtggagggagctgataagcgcaccgccgatggttccgagttcgaaagccccaagaagaagaggaaagtctagttctgcagagggtgatgccattcgacgaacttgtttattgcagcttataatggttacaaataaagcaatagcatcacaaatttcacaaataaagcatttttttcactgcattctagttgtggtttgtccaaactcatcaatgtatcttagtaccgcattcatttcagtgagagcttactcatcagagttcgctggaacctcatacaagttctggcgctgctggagtgcctgcaccgggaacggcaatccctgtagggggcacaacctgcgcgaaacactcctcgaacaagcctgcgcagacatgctcggcacccagggtttcgaccccgtccaggttggcgagcagatcgtgatgatcgaggccttcgagcatcagctcaccttccacctcgcggatggaaccatgacaccagtggggttaaccagtgaggggaggctggcatgaaccgcaccgtcaccgcgatacccgcaacaaagaaacttgggaatctgacgtccgtatcagactaacgcttatccattccggttcgtgttccgcaccggtgaacaggtgaggattgccctgaaagggtgatgctcatatcagttgacgtgcacggttaggtacacctcccagaaataaagtaaggttacccttatctaataaggatggtgtttgcgtggacgatattgtaatggatcaggttgttgaaggcgagtatgggtcggcgaaggaaaaatctgtcgctggccagaacgcgatccgtcagctatcgcagccagtgaaaggcaaactgtttgtcgcgcaggtcttagcgttcgcctctggtgtgttggctatcggaatcgtcgactgcacgatcaaacatcgatcgaagctacgaattaaggaccattgag

SEQ ID NO: 2038 - DNA, 966 bp, unidentified
  source 1..966: mol_type = unassigned DNA; note = Bacteriophage uvig_55768 from the Index of /pub/databases/metagenomics/genome_sets/gut_phage_database (ebi.ac.uk)
aagaaaaaacgcaaggtggagggagctgataagcgcaccgccgatggttccgagttcgaaagccccaagaagaagaggaaagtctagttctgcagagggtgatgccattcgacgaacttgtttattgcagcttataatggttacaaataaagcaatagcatcacaaatttcacaaataaagcatttttttcactgcattctagttgtggtttgtccaaactcatcaatgtatcttagtaccgcattcatttcagtgagagcttactcatcagagttcgcggaagaaacacttatcgcactctgcaacgatgttcttggccttgtggagttcaacgagcagatttttataaacaaggtttcccaaatacgcatccttgataacaaccgagtgcagttccttctttccaatggcaaaaccgaagaacgcacttggaaagaccgctcaaggtcggaaagctggacggacgaaatgaaggaaaccgcacggcaaagaacactgcaacgctacgcatcgaaagaggtggaatgatggcaagagaagtaagagtaatccctgcaagtgtacacaaatttacgacgacgtccgtatcagactaacgcttatccatatgaaactgacatccgcttcactttcaaggatggaacggaatacagagtataagcgtataaaacgaactcctcactaccattacggtggtgaggagtttttcaatctattcgataaattggaatttgacggtattacaacagctttatctcattggcaatcatagccacggttttggcgttggtatcaattttaatggtacccaatgcttgatacatcggtattcttgctatgcttcgctcaattatatcttcagaacggatacctctttctacatccattgccaatctttcacacagagggaatcgtcgactgcacgatcaaacatcgatcgaagcttactgaggctcggagttgag

SEQ ID NO: 2039 - DNA, 966 bp, unidentified
  source 1..966: mol_type = unassigned DNA; note = Bacteriophage uvig_227545 from the Index of /pub/databases/metagenomics/genome_sets/gut_phage_database (ebi.ac.uk)
aagaaaaaacgcaaggtggagggagctgataagcgcaccgccgatggttccgagttcgaaagccccaagaagaagaggaaagtctagttctgcagagggtgatgccattcgacgaacttgtttattgcagcttataatggttacaaataaagcaatagcatcacaaatttcacaaataaagcatttttttcactgcattctagttgtggtttgtccaaactcatcaatgtatcttagtaccgcattcatttcagtgagagcttactcatcagagttcgataatttagaactcttaaaacgagaatacaacaaaattcatgacgaatacgacttttatcacagcaaagcagtaatcgtaacagaatcaggctcccgctatcatacatatagctgctatcattgggactatcctatctggatttataataaagaggctgctatctccgaaggctataccccttgcaaagattgcaaccctccccaataaaccccttctcatacattttataaataaaggaggtcttttttatgattatcgcagcagcctatgtccgtgtctccacagatgagcaaaccgagacgtccgtatcagactaacgcttatccattaatctacaataaacacaccaacagcctagagctgtttttaattgacggataaacctataccatgattcaatatgggggtgcttacttcattaagatatatctgcataaaaataacaggatagccttagccgtcctgttatttgtcttttacgaatcccgtcctttttgtcttatgatgcccttgacattcttcatgtaaattattctttccgtctgctcaaaatctgtctagtatcgtatatcaaatcacaaatattgtcaaaatggattctctcggacttgaaccgaggaccgtccggggaatcgtcgactgcacgatcaaacatcgatcgaagctggcctgcggagtaacttgag

SEQ ID NO: 2040 - DNA, 966 bp, unidentified
  source 1..966: mol_type = unassigned DNA; note = Bacteriophage uvig_285944 from the Index of /pub/databases/metagenomics/genome_sets/gut_phage_database (ebi.ac.uk)
aagaaaaaacgcaaggtggagggagctgataagcgcaccgccgatggttccgagttcgaaagccccaagaagaagaggaaagtctagttctgcagagggtgatgccattcgacgaacttgtttattgcagcttataatggttacaaataaagcaatagcatcacaaatttcacaaataaagcatttttttcactgcattctagttgtggtttgtccaaactcatcaatgtatcttagtaccgcattcatttcagtgagagcttactcatcagagttcggagcccctacagggcgtataagtacccttatatgataaagtgtaagggtaaagaggtaaaagggctgtatgaggcaaatagagggcttattcatgtgagagcgtgggtaggctcttttttagtgcgtaaaaataattatatagcccctgtataatttttccctaaaaaatgaggagggctgtgattatgtttattaaggctaagtagagacacaggataataaacaggatcataaaggaggatatacaggatgatagataattgtgcaagagctgtattttatgccagagtatccacacagacgtccgtatcagactaacgcttatccatcagagtgtctttgcccatctggcggcggaagcgaacctggcagattattttgaaattgattccgcggcgacaagccgcgaagaaatcggaaacacaccacatttcatagcctcatacaggggctaaataagtaatacaggaggatttacaggatgaacaaaagaaagttaaggagagtggcaatagtagccttagtgctggtattgttatgtaacacgctgggagtacaggcaagtactaagaaagatgatcctacagttattgtaaaggattatggatcactgtatacagcgatagcggggaatcgtcgactgcacgatcaaacatcgatcgaagctgccgtgtagtcgtacttgag

SEQ ID NO: 2041 - DNA, 966 bp, unidentified
  source 1..966: mol_type = unassigned DNA; note = Bacteriophage uvig_224805 from the Index of /pub/databases/metagenomics/genome_sets/gut_phage_database (ebi.ac.uk)
aagaaaaaacgcaaggtggagggagctgataagcgcaccgccgatggttccgagttcgaaagccccaagaagaagaggaaagtctagttctgcagagggtgatgccattcgacgaacttgtttattgcagcttataatggttacaaataaagcaatagcatcacaaatttcacaaataaagcatttttttcactgcattctagttgtggtttgtccaaactcatcaatgtatcttagtaccgcattcatttcagtgagagcttactcatcagagttcgaacttggcttggaaacggaagttgagtatgaagcacagaacattgtttcatgaaaaaagcgctgtctgacagtgcgctcattcagcctctctaattgacagaaattccgaaacacgctaaaatagtcacagaaagtgtgctgtaggaatttgatggagatatgacccctgatgctcgtgggggtgcttaaccgatcactcgggagagcgcttgaatggcattcaagaggtcagcggttcgatcccgcttatctccaccaaaacagggtattttcgatgaaaataccctgtttttataactgacgtccgtatcagactaacgcttatccatattcagttcaccagcgatgggtacttgggtggtaccacctaagctgccacccaagctgcccaagcgcgattttaccggatcggaggccgtttctttgttgcttatatttcgaggttttgatagctattcaacctgaaatgtgagataatcaaggtggcaaaatgccgtgtactttgaaaagtgaatacatgaaaaggtgtatctgaacctctcacatttctaaatcattcattgagaggaaggatacattatggctgaaagagtttgttgttcttatcaaaatgtactcagcatccagaaggaatcgtcgactgcacgatcaaacatcgatcgaagcttagattctacacagcaacag

SEQ ID NO: 2042 - DNA, 966 bp, unidentified
  source 1..966: mol_type = unassigned DNA; note = Bacteriophage uvig_395773 from the Index of /pub/databases/metagenomics/genome_sets/gut_phage_database (ebi.ac.uk)
aagaaaaaacgcaaggtggagggagctgataagcgcaccgccgatggttccgagttcgaaagccccaagaagaagaggaaagtctagttctgcagagggtgatgccattcgacgaacttgtttattgcagcttataatggttacaaataaagcaatagcatcacaaatttcacaaataaagcatttttttcactgcattctagttgtggtttgtccaaactcatcaatgtatcttagtaccgcattcatttcagtgagagcttactcatcagagttcgtacataagggcgacacaggcagctatcaaggaacagcgccaataaaaagttgacgcagcagcgtaggtaaaacaactgatataaatacggtcacacagtccgttgggattgtgtgaccgttatttttgccatgcaaaagcatggcaaaaataagaaatgtgccatttcctcgcccctgtggggcaaccggaaatgatgcacaaaaacttcatgcgccggcatttgcgcatttccgtggtgcgatgctcaggcatgaagttttttgcccattttcagctgaatacaccgcaaatcaagccggacgtccgtatcagactaacgcttatccatgaaaatatctgcgcaggcagcgagatgcgagataattcgcacatttgtaaaggaggcatacaatgaataaaattgaaatgagcaaaaatccggactattgttttgccgccttaaagctcatagagcagctttataaggacggtaaaataccgaattttatgtaccgaaatatactgaatgaatatgcagacattgttgatgttacggctttcgtcatcggaaattcaaataaaaaggaggatgcgacagcatgatcaattctgattttgtaaaaaagcgagtggtaatttatgctcgtgtggaatcgtcgactgcacgatcaaacatcgatcgaagctgcaatgtgctgtggtaacag

SEQ ID NO: 2043 - DNA, 966 bp, unidentified
  source 1..966: mol_type = unassigned DNA; note = Bacteriophage ivig_749 from the Index of /pub/databases/metagenomics/genome_sets/gut_phage_database (ebi.ac.uk)
aagaaaaaacgcaaggtggagggagctgataagcgcaccgccgatggttccgagttcgaaagccccaagaagaagaggaaagtctagttctgcagagggtgatgccattcgacgaacttgtttattgcagcttataatggttacaaataaagcaatagcatcacaaatttcacaaataaagcatttttttcactgcattctagttgtggtttgtccaaactcatcaatgtatcttagtaccgcattcatttcagtgagagcttactcatcagagttcggagagaactgtctgaacacatacgctaagcgtggcagtttgaggttaagtcaaaatgtgggaataaggtgtttcgacaccatggtaattcgtatgtgaatgtttagcgatacggaattagatgattatagaaaagaatttagaaaaataggactctcattcactgatgaagagatgcgtgaaatattaggttatttatatgtttatgggagtatgatgtatgatatgttggataatgaattagtttaattatgatgagggtaaagaaaacagatacttccaaagacagagttgcggttatgacgtccgtatcagactaacgcttatccatccagtgaagtatccgctttagtggagaataacggaaactcgtttttatggtaatggtttggttattagtatattattttgtttcagttttttctgtttgcaatctttgtttcagttttattccttttgctaattgggattaattgttttataattaatattttatcttgtcctttctgttgatctgatcttttgtatttttgtaataaactaaaaaatgaacttatgagatcggtgtatgatttttcgttagctgaattgaaaaatttggatcaacaatctttcgagtatttgataagtcggaatcgtcgactgcacgatcaaacatcgatcgaagctaccggtagctcgcaagacag

SEQ ID NO: 2044 - DNA, 966 bp, unidentified
  source 1..966: mol_type = unassigned DNA; note = Bacteriophage uvig_537547 from the Index of /pub/databases/metagenomics/genome_sets/gut_phage_database (ebi.ac.uk)
aagaaaaaacgcaaggtggagggagctgataagcgcaccgccgatggttccgagttcgaaagccccaagaagaagaggaaagtctagttctgcagagggtgatgccattcgacgaacttgtttattgcagcttataatggttacaaataaagcaatagcatcacaaatttcacaaataaagcatttttttcactgcattctagttgtggtttgtccaaactcatcaatgtatcttagtaccgcattcatttcagtgagagcttactcatcagagttcgcttccgcgccgccggcatcctcctcatcatcgtcgccgcactcatcgagccacagctcctgaggatactcggcgagcgtctgcgagagcatgccgcgtatgcctgccgatatatggctcacctgcgtgcagatgagcgaattccagtcggtggtgagcacgctctgaatccacatcatatacatctgtgtcatagtcgaacctatatatagctactcatatatttgaaatattttcactaactttgcgatatggaaaagaaagttatagcaatcatacgaacatctaccacccagcaagagacgtccgtatcagactaacgcttatccattagtagcgcggaaagtagttattccgctagataatacaactataccactgtaataagggtatggggtaaaattttagggctaaaacgcgcctaaccccactccaccgactttttcacgatttttgaatttcaaaattcaaaaaggcactaaaaaagctccaactgattaggctggagcttttgttatgaatgttgttagtattggaatattggtctgccttcaattctatcaaacgcataaaaggaagattctccatcaaatgtatagtatttgtatttactctgaagtaccttcatttcggaatcgtcgactgcacgatcaaacatcgatcgaagctcaactagcgcctgtgcacag

SEQ ID NO: 2045 - DNA, 966 bp, unidentified
  source 1..966: mol_type = unassigned DNA; note = Bacteriophage uvig_449731 from the Index of /pub/databases/metagenomics/genome_sets/gut_phage_database (ebi.ac.uk)
aagaaaaaacgcaaggtggagggagctgataagcgcaccgccgatggttccgagttcgaaagccccaagaagaagaggaaagtctagttctgcagagggtgatgccattcgacgaacttgtttattgcagcttataatggttacaaataaagcaatagcatcacaaatttcacaaataaagcatttttttcactgcattctagttgtggtttgtccaaactcatcaatgtatcttagtaccgcattcatttcagtgagagcttactcatcagagttcgtgtacgataaagaacacggaaaactaaaatgctattattatatttcaatttaacccggaaaacccatgatgcgcggctttccgggtacttatctgtttccgcactatggtcctccttattgtaaaaacagataacgcattaaggcctctggctgtatactctgacagtgcgaaaatataattatgagggagagaagggggaaaaatgaaccgaacagatgaattatttttttgagataattgagacctaccagcggcacgcccaggctgccagaaacgcaaagtatcaggagactcgcgagacgtccgtatcagactaacgcttatccataaacgtattattccaacagtgtagctcagaaactagagcaaatggttaatgctgccaaatcactcatgcaggaagtttctgtcattgactataatagagtagcataaaacgcaaaaccgcccgcttgccagaatactccagtagatataatcaatccgacacttgaattatatcatttccaaagtgccctggcaaggggcgtattttttgcactcttttcacgtacatttaatcaaggaagtgatatatcatgaaaaaagaaacagagtacttacaaataggtgccgcatacatccgtgtggaatcgtcgactgcacgatcaaacatcgatcgaagctcgatgttattctgtgcacag

SEQ ID NO: 2046 - DNA, 966 bp, unidentified
  source 1..966: mol_type = unassigned DNA; note = Bacteriophage uvig_287167 from the Index of /pub/databases/metagenomics/genome_sets/gut_phage_database (ebi.ac.uk)
aagaaaaaacgcaaggtggagggagctgataagcgcaccgccgatggttccgagttcgaaagccccaagaagaagaggaaagtctagttctgcagagggtgatgccattcgacgaacttgtttattgcagcttataatggttacaaataaagcaatagcatcacaaatttcacaaataaagcatttttttcactgcattctagttgtggtttgtccaaactcatcaatgtatcttagtaccgcattcatttcagtgagagcttactcatcagagttcgcatgcctgctatattgcttatcggtttgggggtgtccgccatggataagaggtcgtttcagaatgaaacaaccttccaggtgacaatgcatctggcaaggaaaatgatggcggcaaagctcatcacagagaaggagtaccgggatttcgaacaggcgatgattcgccaatatcagccattttcaggggacttatacacttgataattgtatcaaacagagtgatatatagtgttgaaaggagctgatttgatgcggactatccgtaaaatcgaacgaagcataccaaatttaaagaaacggacgtccgtatcagactaacgcttatccataacagatgaaagccctgcgaaaggagcgtggtgaaaattggcaaagacagtaagagccattccggctaccatcagccgttatacagcgatctcgattaacagccggaagaagcggagagtagctggctatgcccgggtttctacggatcatgatgaccaggttaccagctatgaagcgcaggtggactactacacgaattacatcaaggggcgggacgattgggaggttgttgctatctacacggacgaagggatttctgcgaccaataccaagcggcgcgagggcttcaaggcgatggtggaatcgtcgactgcacgatcaaacatcgatcgaagcttggctgacatagcgccacag

SEQ ID NO: 2047 - DNA, 966 bp, unidentified
  source 1..966: mol_type = unassigned DNA; note = Bacteriophage uvig_189213 from the Index of /pub/databases/metagenomics/genome_sets/gut_phage_database (ebi.ac.uk)
aagaaaaaacgcaaggtggagggagctgataagcgcaccgccgatggttccgagttcgaaagccccaagaagaagaggaaagtctagttctgcagagggtgatgccattcgacgaacttgtttattgcagcttataatggttacaaataaagcaatagcatcacaaatttcacaaataaagcatttttttcactgcattctagttgtggtttgtccaaactcatcaatgtatcttagtaccgcattcatttcagtgagagcttactcatcagagttcggaacaataaaggtgataacgaaattcggaacagaagcaaccgaaactgtataaatgaaagccggcagtctgactgtcggctttttacataggcaaatgaatttcttgcatttacggttgatttaatgtataataacaaacaagaaaaccaatgcgattaaacaatgggaattgtgctatttcgtcccgacaaatatgagagacgaatagatatatgcaatgagccgaaaagtgcttgttttaagggttgaaacgcattgtgcgatttcgtcgtacaggcacagaaaaaccgctgtaagccgacgtccgtatcagactaacgcttatccatagcgattttatgccgattaaaaaagccatatattcaaatatatcggataaatttgactgctgcacattagatacagctaaggcttttaataccgtgcttgcctattatttcggtaaaaagcaaataaccgaagaaatcaatcttcaggtacttcgcgacacggtagataaaatcatagtaagtaaggacggcaccgtaaacgtaaggttcctaaacggtgcggaaatttcaaaggataaggagaatagcaatggaaacggctgtgacggcaccgagacagaaaacagtaactaaaatagaggaatcgtcgactgcacgatcaaacatcgatcgaagcttcaggagagtctcgtcacag

SEQ ID NO: 2048 - DNA, 966 bp, unidentified
  source 1..966: mol_type = unassigned DNA; note = Bacteriophage uvig_437676 from the Index of /pub/databases/metagenomics/genome_sets/gut_phage_database (ebi.ac.uk)
aagaaaaaacgcaaggtggagggagctgataagcgcaccgccgatggttccgagttcgaaagccccaagaagaagaggaaagtctagttctgcagagggtgatgccattcgacgaacttgtttattgcagcttataatggttacaaataaagcaatagcatcacaaatttcacaaataaagcatttttttcactgcattctagttgtggtttgtccaaactcatcaatgtatcttagtaccgcattcatttcagtgagagcttactcatcagagttcgtttaatatatttacgtttatattagctgtgatcatgtacgttggatttggaatacaagcttattatcaggcaagacaaaaacaattagaactacaaaactaaaaaaatcctctcagcaccacctgagaggatatgacagaatgcagatacaccacatatctgcagtacagaaaaagtttatctaccacgatatatgctttttctgtacccattttaccaaatttagatatgaaaagaaaggatgggtactatgttttactatatcatgtatttacgtaaatctcgtgcagacgatccaaagacgtccgtatcagactaacgcttatccatacgaaaaaggctgtacatccgaagatatacagcttgaaattttactaaaataagtaggtatcatacggcagtctattcataggcatctagatgatacctccttccttttatgtaaatttaaggattcatctttccatactatgcgtattataacataaacggaaatatagataatactcatatgacatttgatgttataactaattaaaagagccgctaaaaatggctctatatccttattttgatgttagggtctaacgtactaaagctctcgataatctcatcctcatcattggatctggaatcgtcgactgcacgatcaaacatcgatcgaagctgctactgtatcagtatacag

SEQ ID NO: 2049 - DNA, 966 bp, unidentified
  source 1..966: mol_type = unassigned DNA; note = Bacteriophage uvig_535546 from the Index of /pub/databases/metagenomics/genome_sets/gut_phage_database (ebi.ac.uk)
aagaaaaaacgcaaggtggagggagctgataagcgcaccgccgatggttccgagttcgaaagccccaagaagaagaggaaagtctagttctgcagagggtgatgccattcgacgaacttgtttattgcagcttataatggttacaaataaagcaatagcatcacaaatttcacaaataaagcatttttttcactgcattctagttgtggtttgtccaaactcatcaatgtatcttagtaccgcattcatttcagtgagagcttactcatcagagttcgagcatattgaaatcaggataagttttagaatgaaaatcgacaagaggttataaagcctctgccgattttcttttttataggaaacagcagaaaagaagagcgtgcagagcgtaaaaactctggcacgcttatttttttacaacgaaagagaggtacggagaatggaaagagtgacatttgaagagtatgaggcagcaaaagcggcagtattgtacgggaaagaatacgaagaaacatcaagcatggaaaataacgtcattcataagcagtatgtatgcaaggacggtagcgggatattttgacgtccgtatcagactaacgcttatccataatgagattgaagcgcagattactgaattgcttcatcgaagaagtctgtatgaaaaagaatttcatattgatgaaggatgggaagaaactgtcaataaatatatggctaaaagaaaacttacaaaggagcttgtggatgcttttgtatcggaaattgttttttatgatggcaatatagaagttaagctcttgtatgatgatttcctaaaggagttgcttaaagtggcagaagaaagagaggtgagcagcaatggataagacgatagctctctatatgagattatcagatgaagatgacaaggaatcgtcgactgcacgatcaaacatcgatcgaagctgagtatctgcgtaagtacag

SEQ ID NO: 2050 - DNA, 966 bp, unidentified
  source 1..966: mol_type = unassigned DNA; note = Bacteriophage uvig_102394 from the Index of /pub/databases/metagenomics/genome_sets/gut_phage_database (ebi.ac.uk)
aagaaaaaacgcaaggtggagggagctgataagcgcaccgccgatggttccgagttcgaaagccccaagaagaagaggaaagtctagttctgcagagggtgatgccattcgacgaacttgtttattgcagcttataatggttacaaataaagcaatagcatcacaaatttcacaaataaagcatttttttcactgcattctagttgtggtttgtccaaactcatcaatgtatcttagtaccgcattcatttcagtgagagcttactcatcagagttcgtgaacacccaaccgctcgacgagaacgctgccagaagcctgatctgcaagctggcacaggaacagtacgatgccatcggcaacgaagaatacgaaaccgagcgcctgcggcggctgttcacgacctttgaatactcggcagagctcaacgcagagctgctgcaaagcaccgtctacgccgtcctggtgacgcgccagacggtgcggttgcagctcaaaaatggacagatcatcggaaaggacgatttggtatgacagacgaaaaaccgcgcgtcattatcattccgccaaagccggaattgacgtccgtatcagactaacgcttatccatttctggtgcggatcaagagcggcgcggaaatcaaacagcgattggagcgatgaaaatgatttacgcaaccggcgaccttcacggaaacattctccgattccagccgcaatactttctggagcaagcggagatgaccaaagacgactacatgatcgtctgtggcgactttggctgcgtctggaacggagacaagagcgacgatccgcagctcgattggctggaatccctgccatttacggttctgttcgtggacggcaatcatgaaaactttgacgctctgagcgaacatccggtggaacaggaatcgtcgactgcacgatcaaacatcgatcgaagctcgaccgaatccaataagcag

SEQ ID NO: 2051 - DNA, 966 bp, unidentified
  source 1..966: mol_type = unassigned DNA; note = Bacteriophage uvig_318842 from the Index of /pub/databases/metagenomics/genome_sets/gut_phage_database (ebi.ac.uk)
aagaaaaaacgcaaggtggagggagctgataagcgcaccgccgatggttccgagttcgaaagccccaagaagaagaggaaagtctagttctgcagagggtgatgccattcgacgaacttgtttattgcagcttataatggttacaaataaagcaatagcatcacaaatttcacaaataaagcatttttttcactgcattctagttgtggtttgtccaaactcatcaatgtatcttagtaccgcattcatttcagtgagagcttactcatcagagttcgagatagttgttaataaagaagctgatactattgatattcattacttcagctagttttatcccattaaacaacaaggatgaccataacgtttaatgggtaaaatataaaaaacagggttagtactattgctaaccctttatttatttcacatataaatcggcttcataagcgcaatatcctttactgcacctaataagatttagtgaatggtatctttttagatttagtaggtcttctactgcaaaaccaaattgcttaaactcttgttctaaataattgaagtttgccttatctgtacctgacgtccgtatcagactaacgcttatccattctgatgagcatataattgatgctaaaaaagatgcatactttaataactacctaataaaactatttagtttatctaagtgtgctgcaaaaactagattagatttttatgattatgatttaaaaaactctttattcccccgttctgtagagttaaaaaaacaatgcgctatgtttataaatatgtcaaaattaggaattacattagggcatagatcgtgcctagatttaaatattaatagaaggtgattacatgaatgcagcattatatattcgtgttagtacagacgatcaattagaattggaatcgtcgactgcacgatcaaacatcgatcgaagctcttccacgttggcttagcag

SEQ ID NO: 2052 - DNA, 966 bp, unidentified
  source 1..966: mol_type = unassigned DNA; note = Bacteriophage uvig_284065 from the Index of /pub/databases/metagenomics/genome_sets/gut_phage_database (ebi.ac.uk)
aagaaaaaacgcaaggtggagggagctgataagcgcaccgccgatggttccgagttcgaaagccccaagaagaagaggaaagtctagttctgcagagggtgatgccattcgacgaacttgtttattgcagcttataatggttacaaataaagcaatagcatcacaaatttcacaaataaagcatttttttcactgcattctagttgtggtttgtccaaactcatcaatgtatcttagtaccgcattcatttcagtgagagcttactcatcagagttcgggttatctataatagattatataacccttgataaagactataatatgaaaatattttttatttaattttttggtactttttaactttaccagatgataatgttaaaaagtactatctttattataataattaaagcaatctaccatgcccttttgatatacctttttaaatatatttgaaaattccattacaatatttttttcattttctgttaatccttccactaatttttttaatgttacatcttttccttcatttatttttatcatatacaatccgtctcctttgtaataattcttagacgtccgtatcagactaacgcttatccattattatcagaaggagatttagtaatagtccacgaccaagatgatgtggaaagtggtcaaacagccgtaattcttataaatggtgatgaagccacagtaaaaaaagttattaaaaccgttgatggaatagaattacatgcaatgaatccttattaccctgttaaaaaatttacttttcaagagatgaaaactatacctgtaaaaattataggtagagtaaaggaagcaaaaataaaaggagcttttgaataatggaaaataaaacaaatgtcgaagaagtagctttgtatgttcgtgttagggaatcgtcgactgcacgatcaaacatcgatcgaagctgtccattctattagaggcag

SEQ ID NO: 2053 - DNA, 966 bp, unidentified
  source 1..966: mol_type = unassigned DNA; note = Bacteriophage uvig_495062 from the Index of /pub/databases/metagenomics/genome_sets/gut_phage_database (ebi.ac.uk)
aagaaaaaacgcaaggtggagggagctgataagcgcaccgccgatggttccgagttcgaaagccccaagaagaagaggaaagtctagttctgcagagggtgatgccattcgacgaacttgtttattgcagcttataatggttacaaataaagcaatagcatcacaaatttcacaaataaagcatttttttcactgcattctagttgtggtttgtccaaactcatcaatgtatcttagtaccgcattcatttcagtgagagcttactcatcagagttcgaaatcagcttccaaaacggtatttcactaaaatttttgtatgcagctaaataaaacgaaaagaccgcaaaccattgaacttgcggtcttttctattacttttcgtcttcatcgtccgtcctgtctacaataagcattgcatcaccaaagctaaaaaatctgtacttctcttcaaccgctatcttataagcgttcatagtgttctcgtatcccataaatgcagaaacaagcattataagcgtgctttcaggcaggtgaaaattagtaacaagtccgtcaagcaccttgaactcaaagccaggacgtccgtatcagactaacgcttatccatcgaaacaaagcagaaaagtggctgagtgcagaaaagcgtttcatcaccgacatatacgaaagagcaaagccagaagacaaatacgttgtctgggctttgctccaaagatacttaaagaatgatatagaagtagaggcgttcaggagcctcttagagacgcttgaaaaatagtatagtaattatattaagaggcacaaggaaacgcattagaacgtccttgtgcctcgtttaatctgtgtgaggtgatatgatgataaacattgatgaaaagctatcaaagaaaaaggctgctggctatatggaatcgtcgactgcacgatcaaacatcgatcgaagctaaggcatggaacggaggcag

SEQ ID NO: 2054 - DNA, 966 bp, unidentified
  source 1..966: mol_type = unassigned DNA; note = Bacteriophage uvig_151327 from the Index of /pub/databases/metagenomics/genome_sets/gut_phage_database (ebi.ac.uk)
aagaaaaaacgcaaggtggagggagctgataagcgcaccgccgatggttccgagttcgaaagccccaagaagaagaggaaagtctagttctgcagagggtgatgccattcgacgaacttgtttattgcagcttataatggttacaaataaagcaatagcatcacaaatttcacaaataaagcatttttttcactgcattctagttgtggtttgtccaaactcatcaatgtatcttagtaccgcattcatttcagtgagagcttactcatcagagttcggtaatgttcatttaagcgtagtaacacacgttatacctcctgaaagtaccaagaagaaaaagagcaaaaataaataagctagtttgtaagtgcatatttttcacagataaatttttcattacatttttaacaataatcgcttaagtataatacaaaatttactgctcaaaatatgcacctgcctcgccctttactaactaaaatttagcaacattttaaattggcgaggcagaaatgaattttgctttgacaaaattcataaccccctatgagttttgacattctatcaaaactcggggggacgtccgtatcagactaacgcttatccatttaatattgcttatgtagaaccacataaggttgaaattaaaggtaaaacatatttattctttaattatcacgattatttctacataaatgatttaactaatcaatatccactctcaagtttaagagaatttatcaaggctaactgatactaaaagttatttttgtttttgtaaagtataacgtaaaaaaggtgttagttagcaaataagctagtctaacgccttttttgttagagaatggaggttatttgatggaatataatgaacaaaataacactgaaaaaaagaatgttgcaggaatggaatcgtcgactgcacgatcaaacatcgatcgaagctatgctcattgacggcggcag

SEQ ID NO: 2055 - DNA, 966 bp, unidentified
  source 1..966: mol_type = unassigned DNA; note = Bacteriophage uvig_61202 from the Index of /pub/databases/metagenomics/genome_sets/gut_phage_database (ebi.ac.uk)
aagaaaaaacgcaaggtggagggagctgataagcgcaccgccgatggttccgagttcgaaagccccaagaagaagaggaaagtctagttctgcagagggtgatgccattcgacgaacttgtttattgcagcttataatggttacaaataaagcaatagcatcacaaatttcacaaataaagcatttttttcactgcattctagttgtggtttgtccaaactcatcaatgtatcttagtaccgcattcatttcagtgagagcttactcatcagagttcgacggtcttactcatacattttactataaggacacagaaaaaccagaggcataaacctctggttttattgtctgaattacattacaaatgtaagatgtaggtactattcgataaacatcgcatctccaaaagagaaaaatctgtacttttcctgcactgcagtctcataggcatcatggttcaattggtgttttggaatttgttctccgctgccagtattcgtgaactgttccctcctctttgctcatgttgacattcatttgggacatggaagcaagaaatactttgtcatatgtgatgtgacgtccgtatcagactaacgcttatccattacctttcttacattcgtaaaaacaggaggaatccagatggcaagtaatagctatgagattgtaaccgaaaacaaaagaaaggaagaatttaagctcgaactgcaaagacttcttgcctgctatcagctcgcatcacatgatgatcgtcgcgtagtatgggctgtgcttaataagtatgcagtcgatgtagactgaaattgcccctatttggggctttttctgtttgagtgataaattgtaggcatatctatgaataaaaaccaagaaagaccaaagaaagcagctttatatgttcgagtggaatcgtcgactgcacgatcaaacatcgatcgaagcttagacaagaacatcgcgcag

SEQ ID NO: 2056 - DNA, 966 bp, unidentified
  source 1..966: mol_type = unassigned DNA; note = Bacteriophage uvig_393944 from the Index of /pub/databases/metagenomics/genome_sets/gut_phage_database (ebi.ac.uk)
aagaaaaaacgcaaggtggagggagctgataagcgcaccgccgatggttccgagttcgaaagccccaagaagaagaggaaagtctagttctgcagagggtgatgccattcgacgaacttgtttattgcagcttataatggttacaaataaagcaatagcatcacaaatttcacaaataaagcatttttttcactgcattctagttgtggtttgtccaaactcatcaatgtatcttagtaccgcattcatttcagtgagagcttactcatcagagttcgatattgtagtttatccagatggaaatttgaaaataaattttttaggatattgattttatttgcactaacaaatactaaccagatggatgattatgagctaattcctatagtcttgtttgatacctgcagctgcgattaagcgttgtacatattctcgaccattccaagttggggcgcctaccaatggatacgctgaaccatcccattgaacccatccgtaagctggaccgcctatttgctcggtatctgggttcatacttgagccaacttcaccttgaacatttccgagaatacctgcaggacgtccgtatcagactaacgcttatccatctgaaaatattcgaactatgtcgcaagctatgcaagaaaaatatggttctggctatgtaataagtgttttgaatcctgaaaatacagagaacactctgttaatggtaaaggatggaaatgtaacttataacttcgcagataaactataaaaaataacgcaccctccgaccaagaagttgtgcgttaaaaatagaaccaaaataggcttattttgttacgcctattttaccaaaaataatgaggtgaaacaatggcaaatgaaataaaacaagtagcgttatacatacgtgtgtctacagaggaatcgtcgactgcacgatcaaacatcgatcgaagctgaacacgctgtgtgtcgcag

SEQ ID NO: 2057 - DNA, 966 bp, unidentified
  source 1..966: mol_type = unassigned DNA; note = Bacteriophage uvig_53595 from the Index of /pub/databases/metagenomics/genome_sets/gut_phage_database (ebi.ac.uk)
aagaaaaaacgcaaggtggagggagctgataagcgcaccgccgatggttccgagttcgaaagccccaagaagaagaggaaagtctagttctgcagagggtgatgccattcgacgaacttgtttattgcagcttataatggttacaaataaagcaatagcatcacaaatttcacaaataaagcatttttttcactgcattctagttgtggtttgtccaaactcatcaatgtatcttagtaccgcattcatttcagtgagagcttactcatcagagttcgtagtaaagttttatgatgcaggtatatttgatgtagcagtacctgttatggtcggtaaaaagtaataaacaaattgacttttattaaaaaaaatggtataatttagcatcaaatggaggtatatatggaagaagcaatgaaactaatgaccaaatttattaattcgggacttgatccaatgttttttataaaagaatcttttcttggatataaatacagaaaaagtaaaaataaattatattcaaacgatgcagaaatacctacaactcttataaaagcttattatttaataaattgggagacgtccgtatcagactaacgcttatccatagataagttatacttattcttcaatgaacaaaaacatttttatatagggaatttaaagaagaaaatcccattgtctgaattatcagagtacatagcaaggcattaatgaattggtgagtttatatactcccacaatattggttgtttttgtcgtataaataactaatatgttcaaaggtgtccttgttatgtgacacctttttactttggtgcctttcaaaaatccaagaaagaaaggagattgataattatggataatgaaagaaaaattgcaggagtttatattcgtgttagttccgaggaatcgtcgactgcacgatcaaacatcgatcgaagctcggttggtgatcaggtgcag

SEQ ID NO: 2058 - DNA, 966 bp, unidentified
  source 1..966: mol_type = unassigned DNA; note = Bacteriophage uvig_342637 from the Index of /pub/databases/metagenomics/genome_sets/gut_phage_database (ebi.ac.uk)
aagaaaaaacgcaaggtggagggagctgataagcgcaccgccgatggttccgagttcgaaagccccaagaagaagaggaaagtctagttctgcagagggtgatgccattcgacgaacttgtttattgcagcttataatggttacaaataaagcaatagcatcacaaatttcacaaataaagcatttttttcactgcattctagttgtggtttgtccaaactcatcaatgtatcttagtaccgcattcatttcagtgagagcttactcatcagagttcggtaaaataacaatcaatccagaccgaggcatcagctatacgctgaacgtataaattttttggatttgagtattaccttgtttattgaatccgaacgggttatataaactatgtaatacaaggcccgccccattatgaggcgggtctgttttacaattccatcattttccgcatgacactatcatacgctttcgggtatgccgctttgagcgtatccatcaagtcatccatgatattccacgcggcagagctgtcttttccgttaacagcacgaagaaaatcgctatcacctgatacattcgacgtccgtatcagactaacgcttatccataaagcaaaatatctacatcaatcagctaaatgaaaagcttagaatttacaaaaaaatactaaatatttcaatagccgtcattttcattttgcttgtttcctgtgggtttattttgttttgtaagcccatacagcttgcatagaacttttgttctataaatatatcgcattttgatttgaatcgcaataatgaaatcacacagaaatataatcaaaatttctacaaggagcgttgcacggaaacgtgcaacatggaagccatgaaaagagcagcactatatgtccgtgtcagcacggaagaggaatcgtcgactgcacgatcaaacatcgatcgaagctccaacgatcaatcgctgcag

SEQ ID NO: 2059 - DNA, 966 bp, unidentified
  source 1..966: mol_type = unassigned DNA; note = Bacteriophage uvig_173210 from the Index of /pub/databases/metagenomics/genome_sets/gut_phage_database (ebi.ac.uk)
aagaaaaaacgcaaggtggagggagctgataagcgcaccgccgatggttccgagttcgaaagccccaagaagaagaggaaagtctagttctgcagagggtgatgccattcgacgaacttgtttattgcagcttataatggttacaaataaagcaatagcatcacaaatttcacaaataaagcatttttttcactgcattctagttgtggtttgtccaaactcatcaatgtatcttagtaccgcattcatttcagtgagagcttactcatcagagttcgggagataaattattgactatagaaaatggtgctataacttataactgtcaagaataatacaattaaaaaagtcccctgctaccaacagaggacccacactgacaatccaatgctaccaacaaaggattgtcaaagtaccatacaaggcagatgccctgatataatacactaacaaagatattatatcacttaagcacctgttttgtaaaggtgttatttttatacccaaaatacaggagagtgatataatatgaaaaacaaaatagcaatatatataagagtatcaacaacacatcagatgacgtccgtatcagactaacgcttatccataatcaatgacattcagaaacggtattacaaatacatttgtctatgatgattagaagttataaatatttatttttatgaataatactggttaccataactgttggtgacgctatgtttttaaaaacaaatgcacccaaaacaggtaagttcagggtttaaagattgagttgaataaacatataaccaaattattcattaaaagtaggtttaaatcgccctatttttacaaaagtttgattgaataaaaactttatattttgtatatttataaaaaggagattgcttgaaataaccaatctcggaatcgtcgactgcacgatcaaacatcgatcgaagctgacaagttacgtcacaccag

SEQ ID NO: 2060 - DNA, 966 bp, unidentified
  source 1..966: mol_type = unassigned DNA; note = Bacteriophage uvig_13498 from the Index of /pub/databases/metagenomics/genome_sets/gut_phage_database (ebi.ac.uk)
aagaaaaaacgcaaggtggagggagctgataagcgcaccgccgatggttccgagttcgaaagccccaagaagaagaggaaagtctagttctgcagagggtgatgccattcgacgaacttgtttattgcagcttataatggttacaaataaagcaatagcatcacaaatttcacaaataaagcatttttttcactgcattctagttgtggtttgtccaaactcatcaatgtatcttagtaccgcattcatttcagtgagagcttactcatcagagttcggaattgttgtaacaaatgaggatgatttttttgtttatccaatttcgccataataatattaacctgccggaaagcgaacgccccggagctgggagagtaccacaccttcgatatagccgtatacggccagctctggcgggaacccgtcaccgtgcttcgggacgtcgcattggatggggatctggtgtttcgcatggtccgaacgttcaacaggtgtcacctctcaccgttacacctgaaggacgctgtactggacatgctcgaatagtctcttgccgggtaggggttgccgctcctgccgacgtccgtatcagactaacgcttatccatattacttttgcttcaaccccgttttcaatctcacttatcgcgctttgtgatacgccgcattcttcggcaagccacttttgggttactccaagttcggcccggcgttctctaattcgattttttaccatagggcacctcccagtctattttgctggtagagtacccaaaaaagcaaaaaaacacccccggcgctaccaacacctaggtttgacgaatccatatcacttaccagaggtaggaggaaaaagcaatgccaaagcggacgcgaattgaagataccggtattcagcgcgcggcactggaatcgtcgactgcacgatcaaacatcgatcgaagctagtcaatgtccgcgtaccag

SEQ ID NO: 2061 - DNA, 966 bp, unidentified
  source 1..966: mol_type = unassigned DNA; note = Bacteriophage uvig_313242 from the Index of /pub/databases/metagenomics/genome_sets/gut_phage_database (ebi.ac.uk)
aagaaaaaacgcaaggtggagggagctgataagcgcaccgccgatggttccgagttcgaaagccccaagaagaagaggaaagtctagttctgcagagggtgatgccattcgacgaacttgtttattgcagcttataatggttacaaataaagcaatagcatcacaaatttcacaaataaagcatttttttcactgcattctagttgtggtttgtccaaactcatcaatgtatcttagtaccgcattcatttcagtgagagcttactcatcagagttcggaatccggcaaatcaaatccttctactcaaaccatcaagtccatctgccgggaatttaacatccgggaagaatggatccgaacaggcgagggcgatatgcacatagcgcaggccaaggatgaagaaatcagccggtttttgcatgacgtattaggcgttttcaaggggagttgcacaaaatgcggtttgcaaacattgtacgcatttattgtacatcaacccccaatcaaaatcaaggggggattgaaaaatgagagtagcactatatgctagagtgtcaacggaggagcaggccgtgcagacgtccgtatcagactaacgcttatccataaatctccatcgaggatgatggagagataaattttaccgtcagtgtaccataatttactgttagggtgctcatagtaaaatatagtataatgcataattcgataaggtgactacaaaacgtagtcaccttatcacttactcaactattgcgtggtagtagttggccagcttctcagttggcccgcctccatcccggtcaaacaaaaaggctttcgccatttcgccgtaaaaatccggtttgctacatccgctttttgtagcaacaccggaatagtcagaatataccatattcattgctacggaatcgtcgactgcacgatcaaacatcgatcgaagctgcctgacataatctggccag

SEQ ID NO: 2062 - DNA, 966 bp, unidentified
  source 1..966: mol_type = unassigned DNA; note = Bacteriophage uvig_212380 from the Index of /pub/databases/metagenomics/genome_sets/gut_phage_database (ebi.ac.uk)
aagaaaaaacgcaaggtggagggagctgataagcgcaccgccgatggttccgagttcgaaagccccaagaagaagaggaaagtctagttctgcagagggtgatgccattcgacgaacttgtttattgcagcttataatggttacaaataaagcaatagcatcacaaatttcacaaataaagcatttttttcactgcattctagttgtggtttgtccaaactcatcaatgtatcttagtaccgcattcatttcagtgagagcttactcatcagagttcggaagcggtcgctcctggaggtcgatgacaaaatctacaaagccattgtcaaagagctattctgagcaaagaaaaacgccccgccagtcatggcggggtgctttcgttttctctctgttcctgatgctgttatatggtgatggtgatggttatggtgatggttatggttacatcggattttccacggattttcctacggactgtcctatggactgtccggtggattgtcccaggacgcaggaggtcataggatgaaaaagaagcgcgtcgccgacgtggtaaacggccagaagtcggcactgacgtccgtatcagactaacgcttatccatgaggtcagagccagccggtcgaatatgcgccggcatccgtccgcgaagcgatgaggattatttatattcattccagcgaaacgtcgctgtgtgtggctgtaatccgttgtgacgggcagcagagcccgttatgagaaactgaggcccgtgttgtcctcgaactcgtcgatggcagcggcgaggtacttcctgtacacatcgccatgtgcctcaaagtagacgtatgtgtcaagccagttgtgatagctcgaaatgtcctcatcagggtcgaggtcgcggagcgcgtcgagctcatcgcctggaatcgtcgactgcacgatcaaacatcgatcgaagctaatctctctgataggtccag

SEQ ID NO: 2063 - DNA, 966 bp, unidentified
  source 1..966: mol_type = unassigned DNA; note = Bacteriophage uvig_34482 from the Index of /pub/databases/metagenomics/genome_sets/gut_phage_database (ebi.ac.uk)
aagaaaaaacgcaaggtggagggagctgataagcgcaccgccgatggttccgagttcgaaagccccaagaagaagaggaaagtctagttctgcagagggtgatgccattcgacgaacttgtttattgcagcttataatggttacaaataaagcaatagcatcacaaatttcacaaataaagcatttttttcactgcattctagttgtggtttgtccaaactcatcaatgtatcttagtaccgcattcatttcagtgagagcttactcatcagagttcgtgtgattctcgcagacgcatatcgcagggcagacgatgaccacaagaacatcgtctggagcgtgctggactcctaccttacgccagaggaaaaaacattcgtatcgcagccaaagcaagacgcgacagccggataaaacggcagcagtctgccttggtgattgacttcgtacaattcaagaaccgcaataccgagaaagccgacctcgctgccagcaaggacggctttcatactatggaggtgaacaaggatggggaagatagctgataagctgaaacagatacgggtagcaatctacgtgacgtccgtatcagactaacgcttatccatggcgcttcgttgattacaggcgtctcttaaaggaaaccgaccccgaatcctgaaggaatttataaactcggtaagctccaacttttgtataaaaaacgggcgaatcgagtccataaccttcaaaaacggcataattcacgaatttgtgtacgccgacgaagaacctgttgccgaggcttcagagggctaaaaacaccgaaaaatccccgaaatacgctgatttcgaggatttttcttttggctcaaggaccttctaaaaaactgttatcgaatgaacatcgcgtcccccatgaccacgggggaatcgtcgactgcacgatcaaacatcgatcgaagcttggagtcgctacacgtccag

SEQ ID NO: 2064 - DNA, 966 bp, unidentified
  source 1..966: mol_type = unassigned DNA; note = Bacteriophage uvig_463416 from the Index of /pub/databases/metagenomics/genome_sets/gut_phage_database (ebi.ac.uk)
aagaaaaaacgcaaggtggagggagctgataagcgcaccgccgatggttccgagttcgaaagccccaagaagaagaggaaagtctagttctgcagagggtgatgccattcgacgaacttgtttattgcagcttataatggttacaaataaagcaatagcatcacaaatttcacaaataaagcatttttttcactgcattctagttgtggtttgtccaaactcatcaatgtatcttagtaccgcattcatttcagtgagagcttactcatcagagttcgattgaagcttttgtaaatttagtttctgttgatgtagcagaatatgctcgccaacattttactaaatctgtaaaaaagacgcttactattcctcaatggttaaacgatgaagcaaaacgtagaagcataaatttttctaaagttctgcaggttgctttaatgaatgaaattaaaatcaataatatacaataaataaaatgcaaaaagaggtaatagtttattctattacctcttttttaggaggaaaatcatgagaaatgtagccatatatgtaagagtttctactatgcatcaagctgagacgtccgtatcagactaacgcttatccatgttctaatgcatatactaaaccagttcttaaaatacgtataattttacgctaattttaaatgtattataaaaagttgtatcggcgttcaaatcgaagcattgattgattatgttcacctcttttatcaagaaaatacagcagaagctcgcaaagatatcttaattgaacaacgcgaccgcttacaaaaacaaattgataccatgaatttagttattgagcgcttaaataaaaaagtagatcgttatgaagaaatcattattcctgctgaaaaaaaattattaagcaaataaattaaaattggaatcgtcgactgcacgatcaaacatcgatcgaagcttcaggagccgtgatgtccag

SEQ ID NO: 2065 - DNA, 966 bp, unidentified
  source 1..966: mol_type = unassigned DNA; note = Bacteriophage uvig_346035 from the Index of /pub/databases/metagenomics/genome_sets/gut_phage_database (ebi.ac.uk)
aagaaaaaacgcaaggtggagggagctgataagcgcaccgccgatggttccgagttcgaaagccccaagaagaagaggaaagtctagttctgcagagggtgatgccattcgacgaacttgtttattgcagcttataatggttacaaataaagcaatagcatcacaaatttcacaaataaagcatttttttcactgcattctagttgtggtttgtccaaactcatcaatgtatcttagtaccgcattcatttcagtgagagcttactcatcagagttcgattgagttatcgaagtttaaaacgaaaaatcgtatgtctgacagcgaaaaaatacatcatatcaaccgcataaaaaagcaagcggacattgtaaacacttttgacgatatagcctgtactgtccgcaacatggaaataaaagctacagaaaaagacctcatcataaatctactagattatatctgtcaatcgtatatgcttcgtaaatccgacctagaactatatgacagaatacaaagggcaaaagaaaatgactagggttgctttatatataagagtctcaacgtctgaacaagttatgacgtccgtatcagactaacgcttatccatactatatagaagtaggcacaaacagggatgatataacaatacacttcaaataaaaaaaggggcatttctgccccctttggtagtacctagagactgtagccattaggcaaggtgttctaggtactactattcttttacttcgggcaatccagcgacacttgttaaaagcgacaagataccgcttaagattgacgcagacactacgattttccaatctacttgtgaaagaactgcgctagttcctatagttgcgattgctgtctgtgacactgttttgactgctctaacgagggcgcatttggaatcgtcgactgcacgatcaaacatcgatcgaagctcctgccaagcgcttgatcag

SEQ ID NO: 2066 - DNA, 966 bp, unidentified
  source 1..966: mol_type = unassigned DNA; note = Bacteriophage uvig_375837 from the Index of /pub/databases/metagenomics/genome_sets/gut_phage_database (ebi.ac.uk)
aagaaaaaacgcaaggtggagggagctgataagcgcaccgccgatggttccgagttcgaaagccccaagaagaagaggaaagtctagttctgcagagggtgatgccattcgacgaacttgtttattgcagcttataatggttacaaataaagcaatagcatcacaaatttcacaaataaagcatttttttcactgcattctagttgtggtttgtccaaactcatcaatgtatcttagtaccgcattcatttcagtgagagcttactcatcagagttcgataacataatagtatttccagatggcaatataacagtaaatttccttatataatttatgtgtactaacttatatattccggaaggataatataggttagtacacgtataaaaatatcttttatattgacacaatttatttaacaagtataataataattgaaagtgaatttaaacaaatatacaccataaacacaacgtacctgcgaatacgttgtgtttttttctttttcaaaaaaagacgcttaccgctgcgaaacagtaagcgccattgtcggctctaatgtttatctagccaatgagacgtccgtatcagactaacgcttatccatatcaactacattcgcattttagaaaaaacgaagtcaataaagttaatcaacgaaaagaattctttaaagtatctcttgatgaaattgaaaaagttgttttagaaaattataacggaactgtatcttttactaaactagctcaagctgaacaatacagaagatcattagaattaacagatgtgtagtaaaaagattagccttcgggcttttcttttacaacgataagaacatacattcgaaaggagataacatgaaacgagtagcattatatatgagagtatcaactgaacaacaagccaaggaatcgtcgactgcacgatcaaacatcgatcgaagctttcgtcggatcttaactcag

SEQ ID NO: 2067 - DNA, 966 bp, unidentified
  source 1..966: mol_type = unassigned DNA; note = Bacteriophage uvig_324806 from the Index of /pub/databases/metagenomics/genome_sets/gut_phage_database (ebi.ac.uk)
aagaaaaaacgcaaggtggagggagctgataagcgcaccgccgatggttccgagttcgaaagccccaagaagaagaggaaagtctagttctgcagagggtgatgccattcgacgaacttgtttattgcagcttataatggttacaaataaagcaatagcatcacaaatttcacaaataaagcatttttttcactgcattctagttgtggtttgtccaaactcatcaatgtatcttagtaccgcattcatttcagtgagagcttactcatcagagttcgcattaaaacgcaattatcaaccaagtagtaaacaaaatattcacgggttttgagcggttattaaaatcagccgtgcggggaaagacaagcttgcctgtacgcgcacctgtagcatttggcaggcctgctgcaagcaccgctgtggaatccccaccttggattacacggttgcgataatccggcagagtcattgttgtactaccgttgccgttaccatatttgtatggctctgttgaagggctgcttgtccacaggtttttatcagtcgctattttagccgggcgaacataatcagcacgggacgtccgtatcagactaacgcttatccataaaaatctgttaatttaaaagatgtttcaaattcagcttttttatttttctttttgtaatcgtcaaagaataatttagcttgaataccgacaaaaacagcagaaatgcaaacacaaatattagcaattgaagttatccatttactattatctgataaccaacacaaaatataatccattattacatctccatcttttagaaattccaataaatacataataaattataaataaaaggaggcaattttgcaatgttaaaatatttaaaaaacgataatgaaatagttgccgtatactgtcgggaatcgtcgactgcacgatcaaacatcgatcgaagctatagagactatgcgactcag

SEQ ID NO: 2068 - DNA, 966 bp, unidentified
  source 1..966: mol_type = unassigned DNA; note = Bacteriophage uvig_527025 from the Index of /pub/databases/metagenomics/genome_sets/gut_phage_database (ebi.ac.uk)
aagaaaaaacgcaaggtggagggagctgataagcgcaccgccgatggttccgagttcgaaagccccaagaagaagaggaaagtctagttctgcagagggtgatgccattcgacgaacttgtttattgcagcttataatggttacaaataaagcaatagcatcacaaatttcacaaataaagcatttttttcactgcattctagttgtggtttgtccaaactcatcaatgtatcttagtaccgcattcatttcagtgagagcttactcatcagagttcggccgaaaaccccgatgagtgtatggttaaggtttataaaacaaaatacaacctgcatcctggcaccgaaattattaagacctaccttggccggcagtataaggttactatcgcggaaattaatgattttatttacaacggacagcattataaaactctgtccgctatagccaaagaaatctgcggtataaaggtctccggttatgactttttcggattaaataacaaacgggtattaaaggagacagctcatggttagaataaactgcgcgatctatgtccgcaaatccaccgaaaaggggacgtccgtatcagactaacgcttatccataaaacctgagctttgaagagcaggaaaatttaatttataatcgtttgatctaatattgctttaattcttggggatgtaagattaatacctctgattatgttttgaacatattttcctttgtatacattatttttaattattttttgtttacactccacattttcaatgaccatagaaactagattcccctgactgtctaagataggtgaaccagaacatcctcgcacatgttccttatcaggattatccggggactcaaactcaagtatatcaccatcggttcttttgaattttagattaggaatcgtcgactgcacgatcaaacatcgatcgaagctcagttggatagtcgtctcag

SEQ ID NO: 2069 - DNA, 966 bp, unidentified
  source 1..966: mol_type = unassigned DNA; note = Bacteriophage uvig_450121 from the Index of /pub/databases/metagenomics/genome_sets/gut_phage_database (ebi.ac.uk)
aagaaaaaacgcaaggtggagggagctgataagcgcaccgccgatggttccgagttcgaaagccccaagaagaagaggaaagtctagttctgcagagggtgatgccattcgacgaacttgtttattgcagcttataatggttacaaataaagcaatagcatcacaaatttcacaaataaagcatttttttcactgcattctagttgtggtttgtccaaactcatcaatgtatcttagtaccgcattcatttcagtgagagcttactcatcagagttcgataaaatattcatatgtgaggacggcacctgtgaagttgtgtggaatatataataaaaagcacctattttcgattatgaaaataggtgcttaattttataaatatctgcctgtaatactttttttgttcaattttatttcatgcggtgttccgcttgcaatgattttaccgccgttttcaccgcctccgggtcccatatctataacataatcggcattgcgaattacgtcaaggtcatgttcaataacgattacggttgcaccgttatccaaaagtgcctgaaaaactctgagtaacactgacgtccgtatcagactaacgcttatccatctttaacaattctcccctaccaatttgcgggagtatttagacaaaccatacacagcataaaataaactaaaaacggaggtaatcataatgtcggaatacacggatataagaaacaatacatatcaaatacatcagcgttcgcttgtgaatacttctcaagcggagcaacaaaagcaagaaattatagaagaattgtatcgtatctttgataagaaataattttattaaaatctgaaaggaggaagcaaagatggcgattgcgttatacgcaagaaaatcaatagaacgtgaaaacagtatggaatcgtcgactgcacgatcaaacatcgatcgaagctcgcaggtcataggcattcag

SEQ ID NO: 2070 - DNA, 966 bp, unidentified
  source 1..966: mol_type = unassigned DNA; note = Bacteriophage uvig_42449 from the Index of /pub/databases/metagenomics/genome_sets/gut_phage_database (ebi.ac.uk)
aagaaaaaacgcaaggtggagggagctgataagcgcaccgccgatggttccgagttcgaaagccccaagaagaagaggaaagtctagttctgcagagggtgatgccattcgacgaacttgtttattgcagcttataatggttacaaataaagcaatagcatcacaaatttcacaaataaagcatttttttcactgcattctagttgtggtttgtccaaactcatcaatgtatcttagtaccgcattcatttcagtgagagcttactcatcagagttcgttgatattatcctagatgcagacaaaattactaatatggttatgggccaatagcacattgaaagaatacctgttaaaaggctttattcttgacacggacctttaaaaaacaacttttacacctcaagcaaatcctccataccacaattcaaggccttagccaaccgccaaactgtctctgcactagccttattgatattcttatggcgctgttcatacatttggatggagcgagaattaacaccagaaactctagccagctcattttggcttaatccattcgtacttctaaagcttttaagacgtccgtatcagactaacgcttatccatgtcattaaacaaaatttacaaatcactcgcgatcaaaaaatttaccgaacttacaagtgagtacaagggccgggtaactcaatattgggagcaagatcattaccaattaaccgagttttaactgtatataatgtattttattaatatttagaggtgaaaagatggaagaaaaatacgaaataatagcaaaatatttactaaagcttcttttagagtctgaaccccccatcaacgatgaggaggctgcgtaatggatcgggctgtaatatacgcgcgttacagtagcgataatcagcgcgaggaatcgtcgactgcacgatcaaacatcgatcgaagctatacaccaggcggagttcag

SEQ ID NO: 2071 - DNA, 966 bp, unidentified
  source 1..966: mol_type = unassigned DNA; note = Bacteriophage uvig_396773 from the Index of /pub/databases/metagenomics/genome_sets/gut_phage_database (ebi.ac.uk)
aagaaaaaacgcaaggtggagggagctgataagcgcaccgccgatggttccgagttcgaaagccccaagaagaagaggaaagtctagttctgcagagggtgatgccattcgacgaacttgtttattgcagcttataatggttacaaataaagcaatagcatcacaaatttcacaaataaagcatttttttcactgcattctagttgtggtttgtccaaactcatcaatgtatcttagtaccgcattcatttcagtgagagcttactcatcagagttcgcagatttcttaggcagcgaaccaattgaggaaaatgagcttaaaaaaaaataagctctttattgcctcttttatccaaatcgtcgcaatttagtacaattagcacctgcatctaatatagcttcataacaagattgacaagccccagcgaatataattagatcatcataacttctttcataatctcttaagacccctacagtcttaacaaaatatttagagtttctatagttatttatatctgtataattttccgtttcttttaatacagcatcatggcctgttatgactacgatatcaggacgtccgtatcagactaacgcttatccatctcaagtttaaataaaatttgagtattttatttatcttttacagaaaaatttaacatatatgtaaaattagcgaccatttgagagccattgagcaccgaccctttaaataccattgattttaaaatgcatggttgatatattaaattaagaagccctaagaggcacttaataaaaccctacgaggttcccgaagcctatgcatttttgtattagacttctttttatataaaattaataggaggtggctatatgatagctgcaatttattcacgaaagtctaaattcacaggcaaaggtgaggaatcgtcgactgcacgatcaaacatcgatcgaagctgtacgctccgctacgaatag

SEQ ID NO: 2072 - DNA, 966 bp, unidentified
  source 1..966: mol_type = unassigned DNA; note = Bacteriophage ivig_4126 from the Index of /pub/databases/metagenomics/genome_sets/gut_phage_database (ebi.ac.uk)
aagaaaaaacgcaaggtggagggagctgataagcgcaccgccgatggttccgagttcgaaagccccaagaagaagaggaaagtctagttctgcagagggtgatgccattcgacgaacttgtttattgcagcttataatggttacaaataaagcaatagcatcacaaatttcacaaataaagcatttttttcactgcattctagttgtggtttgtccaaactcatcaatgtatcttagtaccgcattcatttcagtgagagcttactcatcagagttcgctgaagaagcagaacttaaactatatgagcctggagaaataaaaaaaaattaactaatagcttgtacttaaatggtaacatgcaaggtgaaaacaatatgttgcattttagaacaccttgcatgcccagtatctaaaagaacaatattttctgcaaattcccttaaagcacataatggcttttaaaatatccttatatgaaaatttctgtttacatttagcacatgtcataatatttctccttcttaaacttaataaaaaatataatactattatgaaacaattgtaacatatattgtaagacgtccgtatcagactaacgcttatccataatttgaaattcaagatagagtcataaaatcaaaaggtcttcctgacgacattctagttaccgaactagaaaaagatttaaataatagttaaggtagttttgctacctttttattttaggcaaattattgacacgttattttttaatgaatcccctgcttaatatattattatgtaggggaatatttttatgtatatttttaacatagaagtctattatataaatataaataaacccaaaggagttaataatgaaaatagcaatatattcgagaaaatcaaaatacactggtgttggtgaggaatcgtcgactgcacgatcaaacatcgatcgaagcttacaacactggctgcaatag

SEQ ID NO: 2073 - DNA, 966 bp, unidentified
  source 1..966: mol_type = unassigned DNA; note = Bacteriophage uvig_591587 from the Index of /pub/databases/metagenomics/genome_sets/gut_phage_database (ebi.ac.uk)
aagaaaaaacgcaaggtggagggagctgataagcgcaccgccgatggttccgagttcgaaagccccaagaagaagaggaaagtctagttctgcagagggtgatgccattcgacgaacttgtttattgcagcttataatggttacaaataaagcaatagcatcacaaatttcacaaataaagcatttttttcactgcattctagttgtggtttgtccaaactcatcaatgtatcttagtaccgcattcatttcagtgagagcttactcatcagagttcggtgggcctcaattatgacggtgctcctgattgcgtttgcagttatcctattggcctatatcgtgtgggatctctcgcaccccgggcaaggcattttgcgataaaaaaagcccccggtgtccgagcaccgagggcttttttgcagaggatcagggagataccaaatagacaccagatcaacggaatcaatttggaggaatctgcgtatatattataccgcagttcatccgcgaaatcaaggaggaattgcaatgcgtgtagcattatatgctagagtgtcaacagaagagcaggctatacagacgtccgtatcagactaacgcttatccattctccgtcgatcaggacgggggaataaattttgaattagttggccatatttgacattaggagtactcacagttaattatagccaaacaatagaggggcggttatccgcccctctacctatatactccgcagtcgctccatcacactgcgatacgcttttggcatagctactctgagcgtgtccatgagatcatccatgatatccattactgcctgattgtcgcggcccgaaacagtacgtaaaaaatcgctgtcaccggaaacatccactacaggcgcagcggaatatgagtatggcgcaggaatcgtcgactgcacgatcaaacatcgatcgaagctcagtgcctactgtgtaatag

SEQ ID NO: 2074 - DNA, 966 bp, unidentified
  source 1..966: mol_type = unassigned DNA; note = Bacteriophage uvig_39360 from the Index of /pub/databases/metagenomics/genome_sets/gut_phage_database (ebi.ac.uk)
aagaaaaaacgcaaggtggagggagctgataagcgcaccgccgatggttccgagttcgaaagccccaagaagaagaggaaagtctagttctgcagagggtgatgccattcgacgaacttgtttattgcagcttataatggttacaaataaagcaatagcatcacaaatttcacaaataaagcatttttttcactgcattctagttgtggtttgtccaaactcatcaatgtatcttagtaccgcattcatttcagtgagagcttactcatcagagttcgcgaaaattgttattgtcaagggtaacgtggagatacagttaaaagaattttagcagtagctaataatcattgggacagcataagttgaaaaccgtactcccagttcggtattgaaatggtcgattgccttgatcagaccgatacagccaatctgaaatagatcgtctacgttttcccctgcagaggaaaagcgtcggatgacgctcaaaacgagccgcagatttcccttgataaactgttcccgtgcctcggcgtcgccctgccggatctggataaaaagcgcgtctttttcttcattgggacgtccgtatcagactaacgcttatccataaatgtgtcggaaagaactgtgaacagaaaaataaaggacataaggcttaaagttagcagattggagtaaaaaatggcaaaaatgacgttaaacgggaaagaaatttccccagaagatgtgatcctgcccgaaaaagtattggagctcatagcgaattgcttagattgacacctcttgtagcaggatgtagaatgtgccgtgaacatgataaacacggcacattctttttagagaaaaggaggaacggcaatggaatgtgtcgcttacttaagggtttcaaccgaaaaacaggcggaagaggaatcgtcgactgcacgatcaaacatcgatcgaagcttcttgttggcaggctaatag

SEQ ID NO: 2075 - DNA, 966 bp, unidentified
  source 1..966: mol_type = unassigned DNA; note = Bacteriophage uvig_460722 from the Index of /pub/databases/metagenomics/genome_sets/gut_phage_database (ebi.ac.uk)
aagaaaaaacgcaaggtggagggagctgataagcgcaccgccgatggttccgagttcgaaagccccaagaagaagaggaaagtctagttctgcagagggtgatgccattcgacgaacttgtttattgcagcttataatggttacaaataaagcaatagcatcacaaatttcacaaataaagcatttttttcactgcattctagttgtggtttgtccaaactcatcaatgtatcttagtaccgcattcatttcagtgagagcttactcatcagagttcgccattgtcttccgaaatggtcttgctgcaacatttgaatattccagtatataaaaacgcccgacaggtgtatgcctgccgggcgttttttgtggccgacataaatttcggtcagttacatttgtaagaatttggtctacaaaatgatcatcgcatccggcatgattctttttacaatcaaaaacttacttatataaggtaggttctcgatcaaaaaatatcggctcaatgccgatgcgcattaaaattccctgttgtgtaatgctattctatcacagcagggaattttttcaatgtttttgacgtccgtatcagactaacgcttatccatacagtatttatatcttctgtgtaaaaggaagctcagaggggcgttctggttctttaggaagtaagtggaaatattatgtattgaaatcctcttccataccgcttgccgttcaaaggcttgggtatatctcatacgatgggcttcttactttgaagccacggcaatgccgccgaaaaagattggataaaacaatattggaagtgatggccgcttgatctcaggcggctttcattttacgaaaggagcattgatggaattttcaaaattgacaagagtagcgatatacattcgtgtttccacggaatcgtcgactgcacgatcaaacatcgatcgaagctagatagtgatgccgcgatag

SEQ ID NO: 2076 - DNA, 966 bp, unidentified
  source 1..966: mol_type = unassigned DNA; note = Bacteriophage uvig_288194 from the Index of /pub/databases/metagenomics/genome_sets/gut_phage_database (ebi.ac.uk)
aagaaaaaacgcaaggtggagggagctgataagcgcaccgccgatggttccgagttcgaaagccccaagaagaagaggaaagtctagttctgcagagggtgatgccattcgacgaacttgtttattgcagcttataatggttacaaataaagcaatagcatcacaaatttcacaaataaagcatttttttcactgcattctagttgtggtttgtccaaactcatcaatgtatcttagtaccgcattcatttcagtgagagcttactcatcagagttcgataccttatccgttgtttcagcgagaatggtatatctttccgatgcaggagtgccagaagataaaattaacgaaattctcggaacaaattctgatacagaataaacttaaaaaatcccccttcccgctaccaacaggaaaggagattcatatagcggtcataccgtggtataatccgccctcgacaagcagattataacacaagaccgctttatttgctatacccaaaatcaaataaaggaggtctgaatatgttaaaagcagcattatacgcccgtgtatcctctgaggaacaggcgaagacgtccgtatcagactaacgcttatccattccataaaattcttatatatagggataggtgggaggttgttttctatatatagcggttttatatacacccaaaattgataggtgcatgaccgccgatgttatttgtctgttgtttgccgtttgacacagaatcatctcctttcataaatatttattatagcataagggagtaaatttagcaaaacggtttttgttatagtctgctgcgcaatcgaaatttgtatcataggaggtaaaaaacatgaagaaaatcgaaggtttatatcgcagctactgccacgaaagagaactagaaatgcaggaatcgtcgactgcacgatcaaacatcgatcgaagctgttaacgagtgttaccatag

SEQ ID NO: 2077 - DNA, 966 bp, unidentified
  source 1..966: mol_type = unassigned DNA; note = Bacteriophage uvig_296879 from the Index of /pub/databases/metagenomics/genome_sets/gut_phage_database (ebi.ac.uk)
aagaaaaaacgcaaggtggagggagctgataagcgcaccgccgatggttccgagttcgaaagccccaagaagaagaggaaagtctagttctgcagagggtgatgccattcgacgaacttgtttattgcagcttataatggttacaaataaagcaatagcatcacaaatttcacaaataaagcatttttttcactgcattctagttgtggtttgtccaaactcatcaatgtatcttagtaccgcattcatttcagtgagagcttactcatcagagttcgctcgggttgacgaagataccgttgaaaccgtagcgatcctcgggcgccgctagcccaccccagtagatttttgggacaatcgcctgctcaagatcacgccggtcgacatgttcccccataccgaccacaccgagacggtagcggtcttaacccgagaaaaatcggtcaagagttatgcctatgtgaacatctctccgtccgagcttggcatgggcggcaaggtaaaaaagccgacgtataagcagattcaagaatacgttctgaagaatcatggcttgaaggtctcgtcgctgtacatcggacgtccgtatcagactaacgcttatccatgctgtacggtatgaagcgctccgagttctgcgagcattttggaatccctatacgctcgctgcaacattgggagattggagaccgcaagccggctccgtttctgattttccttattcgcaaggtgtacgacctcgaacaggagaataaatacttgcaagagtgcatcgacacactcgaccgtcaaaacgatgagctgaaagcacttattaagtctcaggcaaatacacagtaataaccgaggtggattttcatgagtacaaataaagaattacgcgagggggtggccgacaaggcaaaaacggaatcgtcgactgcacgatcaaacatcgatcgaagctcactgcgttatcattcatag

SEQ ID NO: 2078 - DNA, 966 bp, unidentified
  source 1..966: mol_type = unassigned DNA; note = Bacteriophage uvig_151499 from the Index of /pub/databases/metagenomics/genome_sets/gut_phage_database (ebi.ac.uk)
aagaaaaaacgcaaggtggagggagctgataagcgcaccgccgatggttccgagttcgaaagccccaagaagaagaggaaagtctagttctgcagagggtgatgccattcgacgaacttgtttattgcagcttataatggttacaaataaagcaatagcatcacaaatttcacaaataaagcatttttttcactgcattctagttgtggtttgtccaaactcatcaatgtatcttagtaccgcattcatttcagtgagagcttactcatcagagttcgcaaaaaatggaagattccataaagaacgatcccgtcatcctcggttcgaagattgcggagaaaaagccgaagcctcttctgcacggaacgcggctggtgcgaatatggaagggaaaaaagtatgaggtgactctctgcgacgagggtaaatttgaatacaacggcatcttcttcaaatcgctctcggcggtggcaaaagcaatcacgggaacgcactggaacgggaaaaccttcttcggagtgaaataatatggataaagaaaacaaggcagtacgttgcgcaatctatacgcggaagaggacgtccgtatcagactaacgcttatccataaaccgagggcatgaaaaaccttatgatggagatggaacatgaacacaattaaaactctgccggatgggaacatccaaatcaccgtcgattatgttttcgtcaagcgttccggacgcaaagagattatcatggaggaggagcagggaagaactgaaaatcttgacatgggcgtcatccgtgcattggcacgggcaaaatactggaatcggaaactggatcgcggtgaatattctaccatccatgatatttccgaggcggttggaattgacgaatcatacgtggcgcgaattatccggctcggaatcgtcgactgcacgatcaaacatcgatcgaagctccgaggaactacaggtatag

SEQ ID NO: 2079 - DNA, 966 bp, unidentified
  source 1..966: mol_type = unassigned DNA; note = Bacteriophage uvig_539135 from the Index of /pub/databases/metagenomics/genome_sets/gut_phage_database (ebi.ac.uk)
aagaaaaaacgcaaggtggagggagctgataagcgcaccgccgatggttccgagttcgaaagccccaagaagaagaggaaagtctagttctgcagagggtgatgccattcgacgaacttgtttattgcagcttataatggttacaaataaagcaatagcatcacaaatttcacaaataaagcatttttttcactgcattctagttgtggtttgtccaaactcatcaatgtatcttagtaccgcattcatttcagtgagagcttactcatcagagttcgttcagaaaatcgacttgtctgacgacaaaattaatattgtatggaagtattaattttatcttgttttatcctcgttgtatttttataactaatgttgacagtttagactggaaaaatctatctgcggcagacatcaccgcccgcgttaccaaccgggtgaaacccgggtctgttatgctgttccacaacggcgccaaaaacacgccggaggctttgccgcaggtgattgaaaagcttcaggccgatgggtttacctttgtaaaagcttcagacctgatttataaagacaattacaccatagacgtccgtatcagactaacgcttatccataaatatatttaataaatggaaaatccgaaacgatttatattcctattcagaatttaaataataaaagcattgggaaaattaaagcgtttatttgggataatacagaaaatttagttcctgtatcaaatgttaaaacttattaaattattttttcaataagcgtggactgtaaatgaggttaaattgatatgcaatgcaaaaaatgtagaaaagaaatcccggacaaaagaaatactcaaaggagcacacaatggtagcaatatacgcacgtcagtcaatagataaaaaagacagcatctcggaatcgtcgactgcacgatcaaacatcgatcgaagcttaccactgatgcatgtatag

SEQ ID NO: 2080 - DNA, 966 bp, unidentified
  source 1..966: mol_type = unassigned DNA; note = Bacteriophage uvig_57166 from the Index of /pub/databases/metagenomics/genome_sets/gut_phage_database (ebi.ac.uk)
aagaaaaaacgcaaggtggagggagctgataagcgcaccgccgatggttccgagttcgaaagccccaagaagaagaggaaagtctagttctgcagagggtgatgccattcgacgaacttgtttattgcagcttataatggttacaaataaagcaatagcatcacaaatttcacaaataaagcatttttttcactgcattctagttgtggtttgtccaaactcatcaatgtatcttagtaccgcattcatttcagtgagagcttactcatcagagttcgaagatattcctccaatttgggctgaacaacgcaaactttatggggtaatctagttttgcacagtattttgcacagtattattttcttatttttgctttataatacctacacaatagtcgttttctatttgttgttgtgttttaagtagcttgtttatcagcagtttaaatttgaaaataaacctctaatcaatagttttagaggtttatttatgaagccccccatttttaacggactacccgagtacgtccgaataacaatcttgtcgcaagttcggagattgttatcaaccccattgttgacgtccgtatcagactaacgcttatccataattacggtttggcggattggatgctaaaaccaaatcccttcttgaaaatatggataaatcactcttgcctgaaaaaacattatccataggcacagaaattgtcagaaaatttaagggcgagacatatcgcttgcgtgtggtcaatggtggttttgaaatggacaacgagttttacaaatctctatctgcggtggcatataaaattacaggacgtaaaatctctggcaaagaattttggggaatatagttatggaagaagttaaatgcgcaatttataccagaaaatcaacagatgaaggggaatcgtcgactgcacgatcaaacatcgatcgaagctcgtggcttgatagtgtatag

SEQ ID NO: 2081 - DNA, 966 bp, unidentified
  source 1..966: mol_type = unassigned DNA; note = Bacteriophage uvig_577393 from the Index of /pub/databases/metagenomics/genome_sets/gut_phage_database (ebi.ac.uk)
aagaaaaaacgcaaggtggagggagctgataagcgcaccgccgatggttccgagttcgaaagccccaagaagaagaggaaagtctagttctgcagagggtgatgccattcgacgaacttgtttattgcagcttataatggttacaaataaagcaatagcatcacaaatttcacaaataaagcatttttttcactgcattctagttgtggtttgtccaaactcatcaatgtatcttagtaccgcattcatttcagtgagagcttactcatcagagttcgaaaaacataagacaaacacacttgatatcaacagtattcattttaaattttaatagcagttgtgtcactatttaggtggcacctgtaccacccatagttacccttcttctaaaatttgctcatcatatactttcacaaacggataataaataatgacatcgactacgattaatacaatcgctaaaacgaacgaccaaaaagcaaaaccggtacccatcacgatagcgaaaggaccaggtgttgtccaaggtaaaaatatactaaaactattcatgccaatgacatcaacaaaaaatttgagacgtccgtatcagactaacgcttatccattactaaagacgtatttgaacaattcgaaaaacgtatcgacgacaaactagattcattaccagatagaatggctgataaaatggatgctaaaataagtaagtttgaagctagacaaacaaaatggtttgttggagttggagtaggactaataggtgttttattaaaagttttcggtattatttaaattcaatattttctagggtagcacgcctacccttattattttttactttttttaggagatgaaacaatgaaagttgctatttacactagagtttcgagcgctgaacaagcgaacgaggaatcgtcgactgcacgatcaaacatcgatcgaagctcgctggacgttagactatag

SEQ ID NO: 2082 - DNA, 966 bp, unidentified
  source 1..966: mol_type = unassigned DNA; note = Bacteriophage uvig_365918 from the Index of /pub/databases/metagenomics/genome_sets/gut_phage_database (ebi.ac.uk)
aagaaaaaacgcaaggtggagggagctgataagcgcaccgccgatggttccgagttcgaaagccccaagaagaagaggaaagtctagttctgcagagggtgatgccattcgacgaacttgtttattgcagcttataatggttacaaataaagcaatagcatcacaaatttcacaaataaagcatttttttcactgcattctagttgtggtttgtccaaactcatcaatgtatcttagtaccgcattcatttcagtgagagcttactcatcagagttcgaagcacttctttagtgacaaaacgaaagaaaaagataatggacaaaattcttgagtttctgaaaggagatgtttgtttgacaactatttacgtgaacggccaacgtgtcgacaagaaagatcttgaaaaaatggaaattcacattgaaagtgtaaaaaagattctttctgagaaattgacaaaaaataaatagcagtgtaggattgacctgaatagagttcaggtcaattttattaaagggggaattgacatgaacaaattgaacgtaggatacctgcgggtgtcgactgaggcgcagacgacgtccgtatcagactaacgcttatccataaaaagtagtcataactgatggtgacatcgacattcattttaatatttcttaattttttctccttacgaacttcatcccgatgaacgcggtaaggagaaaacacaacatattgaccagaactctattcaaataacaatatattgtgaaaatattactatttgctgacggtttgaccgtctttttttatgcgaaaattcaaccataaggaggcggtcgaaatgttttcagatgctttattaacaaagatattttccgatgatcgtctcaggcatgtaccactcgaataccagtcaacagtcggaatcgtcgactgcacgatcaaacatcgatcgaagcttctagctgccaatagagtag

SEQ ID NO: 2083 - DNA, 966 bp, unidentified
  source 1..966: mol_type = unassigned DNA; note = Bacteriophage uvig_57063 from the Index of /pub/databases/metagenomics/genome_sets/gut_phage_database (ebi.ac.uk)
aagaaaaaacgcaaggtggagggagctgataagcgcaccgccgatggttccgagttcgaaagccccaagaagaagaggaaagtctagttctgcagagggtgatgccattcgacgaacttgtttattgcagcttataatggttacaaataaagcaatagcatcacaaatttcacaaataaagcatttttttcactgcattctagttgtggtttgtccaaactcatcaatgtatcttagtaccgcattcatttcagtgagagcttactcatcagagttcgacaagatcgtgattactgacggaaatatagacatctattttaatttgctatgatttccctttcctataatcgttccgatgatcattggagaaatccggaggttcatccgggacaataattcgatccgtgttagcaggtcacttcgtgatacggcatataaagccatttacgcgaaagaaaattatgtcaaagtaaaccagaaagaacctactgttcaggaaattgcagaggaaatcgggatcgcaaaggaagagatcgtctatgcgctggatgcgatccagatgccggtcagcttaaatggacgtccgtatcagactaacgcttatccattagatttccaaggctatagaagattggcgatgaaaaaattgcgtgatcttagattaaaaaaggaggaagaaagtggttaggatatacgtaaatgggatccttacaaaaagagaagatttggaaaaaattgaaataaaaaatgaaaatataaaaaagattcttgccagtaaattgacggaaaagaagtgatgatatagaattgaccttgatagaatctcggtcaattcttttttagagaggaagagttgacatgaagaaaatgaatgtaggttatctgagggtatccacagaaaaccagacggaatcgtcgactgcacgatcaaacatcgatcgaagctcaacgagacaattacagtag

SEQ ID NO: 2084 - DNA, 966 bp, unidentified
  source 1..966: mol_type = unassigned DNA; note = Bacteriophage uvig_586504 from the Index of /pub/databases/metagenomics/genome_sets/gut_phage_database (ebi.ac.uk)
aagaaaaaacgcaaggtggagggagctgataagcgcaccgccgatggttccgagttcgaaagccccaagaagaagaggaaagtctagttctgcagagggtgatgccattcgacgaacttgtttattgcagcttataatggttacaaataaagcaatagcatcacaaatttcacaaataaagcatttttttcactgcattctagttgtggtttgtccaaactcatcaatgtatcttagtaccgcattcatttcagtgagagcttactcatcagagttcgctaaaattgttattgccaatgacaacattgaaattcagttgaagaatttttagcagtaactatacgtcgttccaatggcatatagttagtgcaaacgccgtatttatcgcattttttaacacctaaaaattgaatatctgaacttgatgtcgcttttatgtcgcttatgtgtcgctttaagcggctttttttatgccaaaatttaagcataaggaggacggaaatctatgttttcagatgaaattttagagaaaatttttgcacggaaagaattacagcggttggacttgcaaacacagtgacgtccgtatcagactaacgcttatccatttgccggcgtacgattgatagaaagatttacaacataaaatctaaaattaataaaattgaggtagaaagaaatggtaaagattactattgacggtaaagatgtcaagccggcagatgttgttcttcccgagcagattttgaaaatcatcgcggaagctgtcggcggttgacaaaaccgtaacttaagtgtagaatgtgccgtaaatgcgataaatgcggcacattctttttagaaaggagattataaactatggaatgtgttgcttatataagagtttcgacagaaagacaagcggaggaggaatcgtcgactgcacgatcaaacatcgatcgaagctacgtccaacctgcgtagtag

SEQ ID NO: 2085 - DNA, 966 bp, unidentified
  source 1..966: mol_type = unassigned DNA; note = Bacteriophage uvig_135914 from the Index of /pub/databases/metagenomics/genome_sets/gut_phage_database (ebi.ac.uk)
aagaaaaaacgcaaggtggagggagctgataagcgcaccgccgatggttccgagttcgaaagccccaagaagaagaggaaagtctagttctgcagagggtgatgccattcgacgaacttgtttattgcagcttataatggttacaaataaagcaatagcatcacaaatttcacaaataaagcatttttttcactgcattctagttgtggtttgtccaaactcatcaatgtatcttagtaccgcattcatttcagtgagagcttactcatcagagttcgaagatatagtggttgacaaggacgaaattacgattcgttttgttactttataatatacttcaactttctaagtatcgctggaccgaaatatagaaagttgaaattcataaatggataggtttttattctgttttactaataatatactgataatttgcgataatttgacggtttaaccgtctttttttatgcgaaaatttaagtggaaggaggatgaggtatgttttctgatgaagttttagaaaagatttttgccagagaagaattgcagagacttgatttgcaaactcagtctgccgtgacgtccgtatcagactaacgcttatccatgtcgctttccagcataaccaaaaagaagaaaattgttttcagaaaaataattgattttttggaggtgtttgaaaacatgactacaatttatgttaatggacagcgtgttacaaaggaagatctgaaaaataatgaaattaaaatagaaagtgtaaaaaaaatacttgctgagaaattgactaagacaaagtgatgttgtagactatggctagaataaaaacctagccattttcttttaggaggatggcctatgagcaaattgcaggtggcatatttgagagtatcaacagaaacacagacggaatcgtcgactgcacgatcaaacatcgatcgaagctatccggtcgtccgtaggtag

SEQ ID NO: 2086 - DNA, 966 bp, unidentified
  source 1..966: mol_type = unassigned DNA; note = Bacteriophage uvig_256011 from the Index of /pub/databases/metagenomics/genome_sets/gut_phage_database (ebi.ac.uk)
aagaaaaaacgcaaggtggagggagctgataagcgcaccgccgatggttccgagttcgaaagccccaagaagaagaggaaagtctagttctgcagagggtgatgccattcgacgaacttgtttattgcagcttataatggttacaaataaagcaatagcatcacaaatttcacaaataaagcatttttttcactgcattctagttgtggtttgtccaaactcatcaatgtatcttagtaccgcattcatttcagtgagagcttactcatcagagttcgctgtgtccagtgtgaataaaaagaaaagacgaatcatgcttaaaatcaataatctcatggaggtaatagatcaagtgaccacaatctatgtaaatggtaagagggttacgaaagatgaattaaaaaattacgagatacaaatagaatccgtaaagaagatactggcagataaattgacgaaaagtaaatgaaatgttatgctatggctagagtaaaacctagccattacttatatgggaggatggctaaaatgaaaaagatggacgttgcatatctgagagtatcaacagaaacacagacgacgtccgtatcagactaacgcttatccatataaaatagtgattatgaatggaaatgttgaaatacatttccatactatttgatttacattttcccctatctattttggctcccgtagcgtaggaaaggggaaaaagataaaatggctaggttttactcgattattacttgatatttacgtgtttaagacggtttgaccgtcttattttattggataatttagatacaggagatgatcgtatgtttaaagatgaaattcttgaaaaaatatttgcagacaatgaaatgcagaaaattcctatcggatgccagtctacagcggtaaatgttggaatcgtcgactgcacgatcaaacatcgatcgaagctcatatacgtatctgtggtag

SEQ ID NO: 2087 - DNA, 966 bp, unidentified
  source 1..966: mol_type = unassigned DNA; note = Bacteriophage uvig_150631 from the Index of /pub/databases/metagenomics/genome_sets/gut_phage_database (ebi.ac.uk)
aagaaaaaacgcaaggtggagggagctgataagcgcaccgccgatggttccgagttcgaaagccccaagaagaagaggaaagtctagttctgcagagggtgatgccattcgacgaacttgtttattgcagcttataatggttacaaataaagcaatagcatcacaaatttcacaaataaagcatttttttcactgcattctagttgtggtttgtccaaactcatcaatgtatcttagtaccgcattcatttcagtgagagcttactcatcagagttcgttgaactgtaccccaaaattcggacaataaaaaaagctgggataggagattgcaagcgactacttcgacttttcgagcgggcaaatcaacatagtcgccaacttcaaatctagttgtcccttctatgctctttttgtagagattacgcctctttatccgacccaaaccacgggactctttcaacattagcgaacttacatcgcttagcgctgttatatcttcatctccctccactgccaacaacgatgccgcttcactccccgcactccccatgcttatctcatatagcgactccgtcgcgacgtccgtatcagactaacgcttatccatttcataagaagtttaaaacaaatctcatatcaattgatggttttgaaaggattatagatttaaagctaaaaagagactcaagacttccaatgcctggagcaattcttacgaaaatccacaatggcaagaatataatagtcaaagttcttgataaaggctttgaatttgaaaacaaaaaatataattctctttctgcgattgcaagagaagtaatgggaagcaactggaacggatataaattcttcggattatgaaaaaagaaaaaacatatcgctgtgcaatctatacaagaaaatcagtggaatcgtcgactgcacgatcaaacatcgatcgaagctttcagagttctgaaccgtag

SEQ ID NO: 2088 - DNA, 966 bp, unidentified
  source 1..966: mol_type = unassigned DNA; note = Bacteriophage uvig_541260 from the Index of /pub/databases/metagenomics/genome_sets/gut_phage_database (ebi.ac.uk)
aagaaaaaacgcaaggtggagggagctgataagcgcaccgccgatggttccgagttcgaaagccccaagaagaagaggaaagtctagttctgcagagggtgatgccattcgacgaacttgtttattgcagcttataatggttacaaataaagcaatagcatcacaaatttcacaaataaagcatttttttcactgcattctagttgtggtttgtccaaactcatcaatgtatcttagtaccgcattcatttcagtgagagcttactcatcagagttcgaaaaaataataataaaagggagcgacatagaagtcagcttcgttactttttaatatatttctgcttcctatattcattcccgcgattataggaagacgaaaaagctgaaatggctagtttttattctatttttacagtttgtatatagttattttgctgatataggacggttttgccgtctttttttatgccaaaatgtaagcagaaggagggagaaaagaatgttttcagataaaattttagaaaagatttttgcccggaaagaattgcagagacttgatttacagacacaatcagaaggacgtccgtatcagactaacgcttatccattgtgcgtttccagcattaccaagaagaaaaaaatagtcagacgtaaaataaaagagtttttggaggtatctggcaatatgactacaatctatgtcaatggtaagcgtgtgacaaaagaagaactcaaaaacaatgaaattcagatagagtcagtaaaaaaaatactgtcagagaaattgacgaaaagtaaatagaattgtagaatatggctagaataaaaactagccatttcttttaggaggaatggcatatgagaaaacttaatgtcgcgtatctaagagtatctacagaagctcagacggaatcgtcgactgcacgatcaaacatcgatcgaagctgagaatccggagaatcgtag

SEQ ID NO: 2089 - DNA, 966 bp, unidentified
  source 1..966: mol_type = unassigned DNA; note = Bacteriophage uvig_484218 from the Index of /pub/databases/metagenomics/genome_sets/gut_phage_database (ebi.ac.uk)
aagaaaaaacgcaaggtggagggagctgataagcgcaccgccgatggttccgagttcgaaagccccaagaagaagaggaaagtctagttctgcagagggtgatgccattcgacgaacttgtttattgcagcttataatggttacaaataaagcaatagcatcacaaatttcacaaataaagcatttttttcactgcattctagttgtggtttgtccaaactcatcaatgtatcttagtaccgcattcatttcagtgagagcttactcatcagagttcgataaagtgattgtaggcaaggacgatatagaaattcagttaaaaaacttttagcacctacataatacagttcctatgataataggggaatgtaggagatatctgagagacaacaatgcgataagggtgtcacgttccctccgcgatatagcgtacaaagcgatatatgcgaaggagaatctgcaaaagactagggataaggaacctacgatagaagagatagcggaggagataagtatacctaaggaagatatcgttatgtcacttgacgcaatatcagcccctttgtcactttatgagcgacgtccgtatcagactaacgcttatccatgagccgagcggttgacaagtatctgatagacaaaagcttaaaggcaaaggcagagtatcggaggaaaagcagatgaatgttgtggttacacaaagtggtaaaaaagtgaatattactgatattgttctacctgatgatgtggcgagaacaatagctagcatgatcggttgacaagtgaataaatgataagtagaatgtgccgtagaatgtagtgtatatgcggcacattttacgtaggaggacaataaaaatggaatgtgtggcatatataagagtgtcaacagaaagacaggttgaagaggaatcgtcgactgcacgatcaaacatcgatcgaagctggagcgctacgatagtgtag

SEQ ID NO: 2090 - DNA, 966 bp, unidentified
  source 1..966: mol_type = unassigned DNA; note = Bacteriophage uvig_287622 from the Index of /pub/databases/metagenomics/genome_sets/gut_phage_database (ebi.ac.uk)
aagaaaaaacgcaaggtggagggagctgataagcgcaccgccgatggttccgagttcgaaagccccaagaagaagaggaaagtctagttctgcagagggtgatgccattcgacgaacttgtttattgcagcttataatggttacaaataaagcaatagcatcacaaatttcacaaataaagcatttttttcactgcattctagttgtggtttgtccaaactcatcaatgtatcttagtaccgcattcatttcagtgagagcttactcatcagagttcgctttgacgttcaagaatggaatatctcataagttcacctatctcgcaatataaaaggcccggagccgctttcatgtggttctgggccttttgctgtattcgattcaaacgtcccggctgaccatgtgataggcgtaccagtggccccgccgctggaacaggcgataccagcttgtgaactcctgtcctgtgcagtcatagccggtttcatcctgccagtacttgaagatgcttttcccggttttcttgtgttcatactttgcggatgcagtggagcttgcgacgaaagattttccaaaatgacgtccgtatcagactaacgcttatccatcgctccattccggtggaaaagcgttccatgtgcaaggactttttgcgcacccacgttgcggtcgtcactgatcctgccgtggatgccgaaaagaaagagtaaaatataagaggtgtgctatggtttcgcaggaagaattcattcaggagcttcaaacgctgcttgctgcatatcaggcggccagcgtagaagatcgtgaaaaggtcatgcggattttggcaaaatacgttccgaaagataaggcccagcaatgagaaagaagaaaatcgacgcgccaaaagaaaagccgcagagggcggcggaatcgtcgactgcacgatcaaacatcgatcgaagctgagtgcttacattactgtag

SEQ ID NO: 2091 - DNA, 966 bp, unidentified
  source 1..966: mol_type = unassigned DNA; note = Bacteriophage uvig_138265 from the Index of /pub/databases/metagenomics/genome_sets/gut_phage_database (ebi.ac.uk)
aagaaaaaacgcaaggtggagggagctgataagcgcaccgccgatggttccgagttcgaaagccccaagaagaagaggaaagtctagttctgcagagggtgatgccattcgacgaacttgtttattgcagcttataatggttacaaataaagcaatagcatcacaaatttcacaaataaagcatttttttcactgcattctagttgtggtttgtccaaactcatcaatgtatcttagtaccgcattcatttcagtgagagcttactcatcagagttcgtcaggacatagatattataactgaaaatgttttctttgacttagttgaaaataattaataaaaaaagtcccctgcttccaacagaggacctaggggaaatctaatgcttccaacaaaagatttccaaagtattataaccttttcgataaaaaagtgtaatataatacccaccgcaatggttattatatcacactttttaacaccgttcaaggtgttatttttgtaccaaaaattaaggagtgagataataatgacaaaattaaaaaaagcagccttgtatatcagagtttctacaaggtagacgtccgtatcagactaacgcttatccattaaccaaaataaaatttataaacggtatcgaacattcatttattcgtaaataaaaataacacccctattttgagtaatcaacttaaaatgggggtgtttttatgttattttcaaatatttttttaatcgtgtaatgtgcttatttattggtcttttttaacttctgtcctactcacacactagggcagccaaaagtctgaatgcacatagttttctttcttccctctgtttcttcaaacttttcatttatgctacggattttagctatatattcctgttgctttttaagttcttcggcagggaatcgtcgactgcacgatcaaacatcgatcgaagctttgacacaagactgaactag

SEQ ID NO: 2092 - DNA, 966 bp, unidentified
  source 1..966: mol_type = unassigned DNA; note = Bacteriophage uvig_378326 from the Index of /pub/databases/metagenomics/genome_sets/gut_phage_database (ebi.ac.uk)
aagaaaaaacgcaaggtggagggagctgataagcgcaccgccgatggttccgagttcgaaagccccaagaagaagaggaaagtctagttctgcagagggtgatgccattcgacgaacttgtttattgcagcttataatggttacaaataaagcaatagcatcacaaatttcacaaataaagcatttttttcactgcattctagttgtggtttgtccaaactcatcaatgtatcttagtaccgcattcatttcagtgagagcttactcatcagagttcgaaatcatcgcatacccagacggtacgttttcatttgtgttgcgtaatatataatatgtgttgcctggtggtaatgcatgttatatattacagttgatttccatggcatgagtttttgtacggccataaacgcattttgggacagggggaatgtccggctgctggaagagctgctgggataccacatcccggacaagccatacgcgggagaattcatagatattttagccggctatctgcgttctcccaggttcggcgcagaggcataaccataaaaatctcccccgccagccatagccaggacgtccgtatcagactaacgcttatccattaaaaaagcgttccacggttcgtctggattttcgattacagttggattctagtaagattatcaaacgtttgggacgcgtatcggatcgagaccgacttctgctgacgatgcgtggacaaatcagaacctgatataattggcagacaactgaggttgtctgctttttttgttacatactatagaacgcgcaaatttggtatgtaaaagcagcgttttttaagtcgatcaacattttgccaacgccggcaaaatgactgacattggctccggatcatctgatatttatttggatctatacctggaatcgtcgactgcacgatcaaacatcgatcgaagctcagataatcaggagcactag

SEQ ID NO: 2093 - DNA, 966 bp, unidentified
  source 1..966: mol_type = unassigned DNA; note = Bacteriophage uvig_598266 from the Index of /pub/databases/metagenomics/genome_sets/gut_phage_database (ebi.ac.uk)
aagaaaaaacgcaaggtggagggagctgataagcgcaccgccgatggttccgagttcgaaagccccaagaagaagaggaaagtctagttctgcagagggtgatgccattcgacgaacttgtttattgcagcttataatggttacaaataaagcaatagcatcacaaatttcacaaataaagcatttttttcactgcattctagttgtggtttgtccaaactcatcaatgtatcttagtaccgcattcatttcagtgagagcttactcatcagagttcggacgagagataacagctaaacagttatttgaacaggccaatcaacataaatagatacagtatcagctctaggtaaaaggctactgccaacatgcggtagcctttaagtttcggaactgcgaaaacgaaattttgagcatgggcggaagaaattcttgaaataaacggggaaacggaaaacgagcatttaagatttaagtaaaataaaaaatccacgacgagaaaaaagttcatcgtggattgtatctaattaatttacactagagtacggagagggaggccgtacaacgcacgtcggggcgacgtccgtatcagactaacgcttatccatggtatatctcccaaatatgtgttaaagcgcatagaacaggctcaaaagggttttaatcagccccaccgaaaactctatttcaaagcaggtacaaaactcatacgttcctataaagggacaaaatatgaggttttagtagttgatgcggggttcctttacaaaggggatatatacaagagtctttcagctatagcccaactaattaccggagttcattggaacggtaaagtgttctttggaggcagtaaatatggccgaggaacataagatattgcgttgtgcgatctatacccgcaaatcggaatcgtcgactgcacgatcaaacatcgatcgaagctcgtgtgtaagtaactactag

SEQ ID NO: 2094 - DNA, 966 bp, unidentified
  source 1..966: mol_type = unassigned DNA; note = Bacteriophage uvig_289409 from the Index of /pub/databases/metagenomics/genome_sets/gut_phage_database (ebi.ac.uk)
aagaaaaaacgcaaggtggagggagctgataagcgcaccgccgatggttccgagttcgaaagccccaagaagaagaggaaagtctagttctgcagagggtgatgccattcgacgaacttgtttattgcagcttataatggttacaaataaagcaatagcatcacaaatttcacaaataaagcatttttttcactgcattctagttgtggtttgtccaaactcatcaatgtatcttagtaccgcattcatttcagtgagagcttactcatcagagttcgtgcagcgcatcgaggcggatgataacggtgcgttttttgtaacgccagtttaggcatattttctcttagcattaggcaacagcaaatatacctaaaacgaaaacgtgagctaaaccggcggttatatgtcgatttagcccacgtctttgattaaatcctatctattttgcgcatgacattatcatagacgcgcctgttggtgattgcaaggctgtccatcaactcgtccatgatgggccacagcttatcaggcgacttcctggcgacagcctggagaaagtccgtgtcaccgtactgggcgacgtccgtatcagactaacgcttatccatcagcctggacaaaatatttggaatcgtgccggatgacccgggagatgagcctactccgtccgagcgtgagttgatggaacggcaactcaaagtcgagcgtgagaagcaggatttgctggagcgaagcgtgaagatgctgcgtaggatcgtgtttggcttgatagttgttgttgcactgatcgccatgtatgcggtcacgctggataattgtgcgtctacagtcggtttttttagagggtgaggttaccacatgaaacaaagagctgcactctacgtcagggtgtccacggaggaacaggcggaatcgtcgactgcacgatcaaacatcgatcgaagcttctcaccttgcatctactag

SEQ ID NO: 2095 - DNA, 966 bp, unidentified
  source 1..966: mol_type = unassigned DNA; note = Bacteriophage uvig_57389 from the Index of /pub/databases/metagenomics/genome_sets/gut_phage_database (ebi.ac.uk)
aagaaaaaacgcaaggtggagggagctgataagcgcaccgccgatggttccgagttcgaaagccccaagaagaagaggaaagtctagttctgcagagggtgatgccattcgacgaacttgtttattgcagcttataatggttacaaataaagcaatagcatcacaaatttcacaaataaagcatttttttcactgcattctagttgtggtttgtccaaactcatcaatgtatcttagtaccgcattcatttcagtgagagcttactcatcagagttcgtatctatcgagttcaagaacggcgtcgtacatcgcttcttgtaccgtgaatgatccacaacatacttgcaatcgcccctacattcgtatatactatgtatatacggaggtgatagtaatgttagcaacgatttctaaatggggaaatgggcatggcatccgtctttctcgaaaattgatggaagaagccaatctttcgtcgtctgataagctggaggttatagtcaaagcagacaaatctatcatcctgcgccacgtaccaaagacaaaagcggctcgctttatggatctctttggtgacgacgtccgtatcagactaacgcttatccattcattttatttcatacgccacaacatatggtatagcattgattatacagccaacatattgtataataagagtaagcaaagccacgataagccggaaagcggcgtatctcgaatatcatcttcggacgtgttgagacgttcttcggaacgtcttttccgtgattcgtggttcctgtacgcgcttcggaaacgaagcgttttttattgctcatcttctctttcagcaaagccacttctataagggaagtgtgatgagaatgaaactccatcgagaagaagaacatcggaaagctgctctgtaggaatcgtcgactgcacgatcaaacatcgatcgaagctcagtagtacatcgcagctag

SEQ ID NO: 2096 - DNA, 966 bp, unidentified
  source 1..966: mol_type = unassigned DNA; note = Bacteriophage uvig_25407 from the Index of /pub/databases/metagenomics/genome_sets/gut_phage_database (ebi.ac.uk)
aagaaaaaacgcaaggtggagggagctgataagcgcaccgccgatggttccgagttcgaaagccccaagaagaagaggaaagtctagttctgcagagggtgatgccattcgacgaacttgtttattgcagcttataatggttacaaataaagcaatagcatcacaaatttcacaaataaagcatttttttcactgcattctagttgtggtttgtccaaactcatcaatgtatcttagtaccgcattcatttcagtgagagcttactcatcagagttcggttgggacgaaacggatatgtcggagaatgtgatggtattggctaaactgtaagcgtacacaaggataacgagaatacaaatatgagggaaaaagcagtgaacaacgaaatgaaagcccacagcaaatcattagcggaagcggcgcagatgccggaagatttgccgatcccggaaaagagtatcaggcagaacgaaagcaaacagaagaaacgattgaacggaaagtaaaagtgaaaaatcctcttgaaatggcagcataaaaataagcagagaacgtcgaaaaacgatggctctctgctgacgtccgtatcagactaacgcttatccatagcgccacatcccactgaccatgcaggactgggaaacccgcctgaaccgcttcattgaaatgttcgagtacggtcttctcagggatgcgggcagggtgtctgcagaaatcgcccggctgcacgcagaaaccgaatttgagaagtaccgcgtcattcaggaccgcgagttcctgtccgactacgacaggttcctccttgagcttgaggaacacgccgacgcggcaaaggctggaccgcaggaggaaaagccatgaagcgaatgaaatgctacctctacacccgcgtctccacctccatgcaggaatcgtcgactgcacgatcaaacatcgatcgaagctacgtattgctaccaacctag

SEQ ID NO: 2097 - DNA, 966 bp, unidentified
  source 1..966: mol_type = unassigned DNA; note = Bacteriophage uvig_351737 from the Index of /pub/databases/metagenomics/genome_sets/gut_phage_database (ebi.ac.uk)
aagaaaaaacgcaaggtggagggagctgataagcgcaccgccgatggttccgagttcgaaagccccaagaagaagaggaaagtctagttctgcagagggtgatgccattcgacgaacttgtttattgcagcttataatggttacaaataaagcaatagcatcacaaatttcacaaataaagcatttttttcactgcattctagttgtggtttgtccaaactcatcaatgtatcttagtaccgcattcatttcagtgagagcttactcatcagagttcgtcatcgatcatgtggtggttaaccgagaaacttttgaaatcacttttttgtaaaaagaaaaggtgctcactcagagcaccttttttaattcatccaacattttgttatatacctcgagtctgaaaccaattagctcgtctttatgtttacttgcgatcatgtcctccggtaaatacttctcttcgtcctcagctgattcataaattgtaagatactcaggggcctcagaactgacgaccccatatgttatctcatcaaaatgatattcggccaaccaaattcctccaccagtatagaatagacgtccgtatcagactaacgcttatccatgccattttggaagcagcttataatgatctggatgacgctttaataacactggatgaaaaaaattatcagttttatccagatatgaatatgattgaagtggctgaatatttggtagatgaaggattatttggagaaatcccagaatcgattatatcttatattgattatgaaagtttagcccgtgatctaagctattctggatatgttcaaacaaattatggcgttattgaattaaattgaggtgaacagtatggaaatgataaaagttggcttatacgaccgagttagtcatgacgagcaggaatcgtcgactgcacgatcaaacatcgatcgaagctaccaggcggtaagatcctag

SEQ ID NO: 2098 - DNA, 966 bp, unidentified
  source 1..966: mol_type = unassigned DNA; note = Bacteriophage uvig_155989 from the Index of /pub/databases/metagenomics/genome_sets/gut_phage_database (ebi.ac.uk)
aagaaaaaacgcaaggtggagggagctgataagcgcaccgccgatggttccgagttcgaaagccccaagaagaagaggaaagtctagttctgcagagggtgatgccattcgacgaacttgtttattgcagcttataatggttacaaataaagcaatagcatcacaaatttcacaaataaagcatttttttcactgcattctagttgtggtttgtccaaactcatcaatgtatcttagtaccgcattcatttcagtgagagcttactcatcagagttcgtatcggccagccaacaaaaactaatagccaacatgtacattcctccggaaaacagaaacaacttaccgccaaccggtacaaggattgtccgcgagtatcttggtgtagaacacattgtcacagttctacgcgatggttttgaatacaatggaatgaagtataccacgctatcagcagtagcaaaaaaaattaccggaagaaagatatccggacggtattttttcgcattagataaataaaaggatcaaccatggaagaacaaaaacaaataagatgcgcaatttacacacgtaaatcgacgacgtccgtatcagactaacgcttatccattcccttactcatgggaagatcaaagacgtgaactcggttttaacccagcataaaataataaacaaattgctctttttatatctatgtatgcgtgaaaaacatacatagatatttaattttataaatttttcaaccggttattgaaaaaaaactaaactaatgaatatatggccttttgtattaaacattaacaaaaggttaaaaatgaaatatttatttgatggactaccaccaaaggtaattacttatatcaagattcatttgcgatatatttattcaacagggctttttgatagccaaggaatcgtcgactgcacgatcaaacatcgatcgaagctgtggttcgaccggtatctag

SEQ ID NO: 2099 - DNA, 966 bp, unidentified
  source 1..966: mol_type = unassigned DNA; note = Bacteriophage uvig_321891 from the Index of /pub/databases/metagenomics/genome_sets/gut_phage_database (ebi.ac.uk)
aagaaaaaacgcaaggtggagggagctgataagcgcaccgccgatggttccgagttcgaaagccccaagaagaagaggaaagtctagttctgcagagggtgatgccattcgacgaacttgtttattgcagcttataatggttacaaataaagcaatagcatcacaaatttcacaaataaagcatttttttcactgcattctagttgtggtttgtccaaactcatcaatgtatcttagtaccgcattcatttcagtgagagcttactcatcagagttcgatataagaatgggattgtgaatccaaactttaagtatgtacagtcgattcgtaatctttcattgacaactttggaaaagatgtatgtagatgtgtttcagccatcattaatgggaaagaataggggtgaaacgcatgaatactcaatttaaaaaaggtgttttagagttgattgtattaaaggctattgtatcggatgatcggcagtactgccatctacacatttttttctttgaggaggacattaatttatgaagagaattatagctatgtatttacgagtatccactttagaccaagcgacgtccgtatcagactaacgcttatccattctttgattttgatgaacaaattgtactcagtattcagtttaaaaagaagtgattcttattggttatagaatacttgaatctcaaatcattgccctatggggatcgtatttgaaagttcaaaaataataaaatgctcaaattatgtttgaaatataacatatcacactgctatactaggcattgttggatgagccataaatcataacacttgtaaatcaatatcatccaacacttttattccatgagctggcgtttaaccctttctgccagctccttttttgtgcctttccaattagaaaggaatcgtcgactgcacgatcaaacatcgatcgaagctggtctcgtgatgtagtctag

SEQ ID NO: 2100 - DNA, 966 bp, unidentified
  source 1..966: mol_type = unassigned DNA; note = Bacteriophage uvig_151301 from the Index of /pub/databases/metagenomics/genome_sets/gut_phage_database (ebi.ac.uk)
aagaaaaaacgcaaggtggagggagctgataagcgcaccgccgatggttccgagttcgaaagccccaagaagaagaggaaagtctagttctgcagagggtgatgccattcgacgaacttgtttattgcagcttataatggttacaaataaagcaatagcatcacaaatttcacaaataaagcatttttttcactgcattctagttgtggtttgtccaaactcatcaatgtatcttagtaccgcattcatttcagtgagagcttactcatcagagttcgtccggcggatcgatatcacaaatgaagatgttttttctgttactcctatttagccatataacaactaacctgtatgttaattataatatggctaaataaaaagcccccaggaaaattcccgggggctgtctttctgtcaatcgcttttcttaggttcggtataagaaagcgcctggctggaatcgcttaggccgcttgtggtggggtcgtttaacaggttccatacagataccagaacagacaccacgattacagggctctggacggcctgtaagagcacgtttcctacagcctgccagcgacgtccgtatcagactaacgcttatccatccaccctcctttccaggagggaaaaagaaagtataacgtccctcctaaagagaaagggactaaccgcctaccgttgcgataacaccttacgctgtgaattatagcatttggctttttatttgtccagtaaacatgatggattttaattgcaccggattcgaggcaattaaacagggcaataaaaaatcccccaccggttgcagccgatggggaaagctattattaaagtgcatcaaaacaggaggaaactatgcaaagagcggctttgtatattcgagtaagttcggaagaacaggctatggaatcgtcgactgcacgatcaaacatcgatcgaagctgcgacattctagtggtctag

SEQ ID NO: 2101 - DNA, 966 bp, unidentified
  source 1..966: mol_type = unassigned DNA; note = Bacteriophage uvig_522525 from the Index of /pub/databases/metagenomics/genome_sets/gut_phage_database (ebi.ac.uk)
aagaaaaaacgcaaggtggagggagctgataagcgcaccgccgatggttccgagttcgaaagccccaagaagaagaggaaagtctagttctgcagagggtgatgccattcgacgaacttgtttattgcagcttataatggttacaaataaagcaatagcatcacaaatttcacaaataaagcatttttttcactgcattctagttgtggtttgtccaaactcatcaatgtatcttagtaccgcattcatttcagtgagagcttactcatcagagttcgagctaccgcacgggcaacctgaatggagcttatacacaaaaacaaaaagataagcgggtgtaataatgaattgcattatatatgcaaaaaacgcaaacaacataaccgtttttgaacagcataatgtttgtgcagaaaaagccaaaagatacggctattccgttgcacatagaatttttgatataagaggggatagatttacagaagctataaacaaggtcattgcaaataatgatattgaaatcctgcttgtttataataaatgggtggtatttaaagattatgacgaatttcttttttgacgtccgtatcagactaacgcttatccattaagccgtgcaacgataagtaattatgaggtcgggcgtcgttcaccgcatttatccgatttacgccgttttgctgaattttacggtgtagggcttgattatttcggcgtaacaacagaaaatgaaagttttgaattgttaagccgtgcaaaaaatatttttctcaattcagatattccaaaagaggaacgggaacggctataccgtgagattatgaaaatgtatctgcaaatgtagaaaaggggaaaagaatgtataaacgaatagggttatatgcaaggtattccgatacaaaacaagaggaatcgtcgactgcacgatcaaacatcgatcgaagctttaccgttgctgcgctctag

SEQ ID NO: 2102 - DNA, 966 bp, unidentified
  source 1..966: mol_type = unassigned DNA; note = Bacteriophage uvig_517329 from the Index of /pub/databases/metagenomics/genome_sets/gut_phage_database (ebi.ac.uk)
aagaaaaaacgcaaggtggagggagctgataagcgcaccgccgatggttccgagttcgaaagccccaagaagaagaggaaagtctagttctgcagagggtgatgccattcgacgaacttgtttattgcagcttataatggttacaaataaagcaatagcatcacaaatttcacaaataaagcatttttttcactgcattctagttgtggtttgtccaaactcatcaatgtatcttagtaccgcattcatttcagtgagagcttactcatcagagttcgtgctctggtctgaccagcgtaagctctatggttttgaagaaaggaaacaataatgaacaataccaatcaatctgcccgccgccgttttgatgccgattttaccgtcggtgccagaattcgacaaatgcgtaatctgctcggacgctcgcaaatggatgttgccagagctctcggactcacgtttcagcaacttcaaaagtatgagaaagcgcaaaaccgaatatcagccggacggcttcaccagcttgccgttgaatattcctgcccggtagcgtggttctttggcgattacgataattcgacgtccgtatcagactaacgcttatccatgtctggattttgctgcccgctatcgtctgggaaaatccctgccgcattattccgatacgcttgctttgtccgcaaacggagagaccaacggtctgcaaaatctgtttgaagatatccgctttgggcagatcgatggcgtcataattgaagatacaaccttttttggcgaaaattctactcgtttaatacagattatggactttttcgccgctcaccaaacccgcatccaagttgtcagggagaccgtatcatgtccgaaaaaataatcaattgcgccatttatacccgtaaatctaccgaggaatcgtcgactgcacgatcaaacatcgatcgaagcttacaattcgcctggttctag

SEQ ID NO: 2103 - DNA, 966 bp, unidentified
  source 1..966: mol_type = unassigned DNA; note = Bacteriophage uvig_11457 from the Index of /pub/databases/metagenomics/genome_sets/gut_phage_database (ebi.ac.uk)
aagaaaaaacgcaaggtggagggagctgataagcgcaccgccgatggttccgagttcgaaagccccaagaagaagaggaaagtctagttctgcagagggtgatgccattcgacgaacttgtttattgcagcttataatggttacaaataaagcaatagcatcacaaatttcacaaataaagcatttttttcactgcattctagttgtggtttgtccaaactcatcaatgtatcttagtaccgcattcatttcagtgagagcttactcatcagagttcggaaaaagaataggaatatcatcagcgacaatgacgaaaatttctaaaaatgagtatgtatctttaaaagtaatagaatctatatgtagagaattagattgtcaacctggagatataatggaatacattccagataataaataataaatagctagggaaaaataattctctagctattttaatgctaaaaaagggaaaactttttataatgtataatatagcaatatattcaagaacaaggaggattaaatatggtttttgcaatttattcaagaaaatcagtctttacaggcaagggggagacgtccgtatcagactaacgcttatccattagaaaatatagataattatggtaaaaagtcgcatttttgtaacgataagtgaacgtatcgtaataaaagaacgacttttaaacccaatttaacaagttcattttcaaatattattccagaaatagatctagatttatcacattttaataatagacttagacatgcaagattagatttaggattaactattaaagaagtctctgaaatttgcaatatagataaaagctcacttgacggattagaattaggaagatatgttttaacaatagaaaatttaaaagaattagaacaggtatttgggaatcgtcgactgcacgatcaaacatcgatcgaagctcgccgataacggacaattag

SEQ ID NO: 2104 - DNA, 966 bp, unidentified
  source 1..966: mol_type = unassigned DNA; note = Bacteriophage uvig_285452 from the Index of /pub/databases/metagenomics/genome_sets/gut_phage_database (ebi.ac.uk)
aagaaaaaacgcaaggtggagggagctgataagcgcaccgccgatggttccgagttcgaaagccccaagaagaagaggaaagtctagttctgcagagggtgatgccattcgacgaacttgtttattgcagcttataatggttacaaataaagcaatagcatcacaaatttcacaaataaagcatttttttcactgcattctagttgtggtttgtccaaactcatcaatgtatcttagtaccgcattcatttcagtgagagcttactcatcagagttcgcttcggccagtcgttccttcttgagcaaaatctcagccaaagcgccaaatgtcaaaaaggtcgcaatcgcaccgataggaaccaaaatcatcaaacagtacaaaggccgcgattatgtcatccgcgttcttgaaaacggctatgaacttgacggacaaagatttaagagcttgtccggcatggccaagaaaattaccggtatgaaaatctccggtagtgcattctttggatttaatttgcgaggcaaataatggaagagcagaaaaaagtcagatgtgcaatttatacccgaaaatcaacgacgtccgtatcagactaacgcttatccatcaattcctgcctcgtggtcagagcagcgtactaaatatgggtttaactcttaataaatccacaacccatattagaaaaagtttggcccaatagaactatcatttgaaaatgtaagcctttctaacattttgaaaggtttacataaatgtatgacaaactttttgacggcataccagactatgtccgtattaccattttttcttgtgtaagaaaattatccacctttgcaaattttaataatcacgaagatattcaagatttggttcaagaattgcttttgttttacatagagcatttccaggaatcgtcgactgcacgatcaaacatcgatcgaagctaggaagctaatcgcaattag

SEQ ID NO: 2105 - DNA, 966 bp, unidentified
  source 1..966: mol_type = unassigned DNA; note = Bacteriophage uvig_325705 from the Index of /pub/databases/metagenomics/genome_sets/gut_phage_database (ebi.ac.uk)
aagaaaaaacgcaaggtggagggagctgataagcgcaccgccgatggttccgagttcgaaagccccaagaagaagaggaaagtctagttctgcagagggtgatgccattcgacgaacttgtttattgcagcttataatggttacaaataaagcaatagcatcacaaatttcacaaataaagcatttttttcactgcattctagttgtggtttgtccaaactcatcaatgtatcttagtaccgcattcatttcagtgagagcttactcatcagagttcgtccgagatgacgaggcacacgttgaaaccgtagcgatcctcgggcgccgctagcccaccccagtagatttttgggacatgccttaaaatctaccggcacaagctcgggttcgccgctttttttgttttcaaacacaaaaggaggcgaagcctatgaacaacatcgtcgaaacggctccctgtgaagagcacgacgacaagaccgaagcgttgctcgaacgcgagtgtcttttccgcgagcttgaggtcgctcgcaccgagatgagcgtccttggctggtgcatcgctcgcatggagcacggacgtccgtatcagactaacgcttatccatgttcgatgttgaaggcgaagcggttgagcttttcttcaaaaagggaggggattacaaactcattgagggctattggaacgagctgttcgagcaggccaacagaacgggcttcaaggtcgtggtgcgcgatttcgaaaaagagaacagcatgaaagaggcattgaaagcagaaaggcaacgttggctagacaacgttgagtaggtgacgcgaaatgttgtcacgtagagaattacgggagggggtgaacctatggcacgaaaaaatcccaagacgttagatgccgcccatccactctcctgggaatcgtcgactgcacgatcaaacatcgatcgaagctcctatgatgaagccgattag

SEQ ID NO: 2106 - DNA, 966 bp, unidentified
  source 1..966: mol_type = unassigned DNA; note = Bacteriophage uvig_205806 from the Index of /pub/databases/metagenomics/genome_sets/gut_phage_database (ebi.ac.uk)
aagaaaaaacgcaaggtggagggagctgataagcgcaccgccgatggttccgagttcgaaagccccaagaagaagaggaaagtctagttctgcagagggtgatgccattcgacgaacttgtttattgcagcttataatggttacaaataaagcaatagcatcacaaatttcacaaataaagcatttttttcactgcattctagttgtggtttgtccaaactcatcaatgtatcttagtaccgcattcatttcagtgagagcttactcatcagagttcgttaacaagataatgatcactaaagatggaatccaagaaattgaatttaattaaaaaatagagttaagaccgaaatcttaactcttttatattgggctttttgtagtagcgtccaccaatattactaatataaacaatactagaataaatgagaatccgccaccattttggttaactccgccattatttccttggcaacaagtatttgacaaaatatcacctcgatatattttatgcaaggtttactattttggttatttactttgttaaagttataacacgcacaaaatcatcaaattctgacgtccgtatcagactaacgcttatccatgactacattgaatatgtagataaatatgatttcacaaagtaagttaaaagatggataataaaaaagaagtcctaaagcttcaaattgtccttgaactaatcaaactgcaacgagatttaatcaagacgattaatgaagcaaacaagagaggcaagtaagcctctccccttaaatgggggacttcttctactattattttaacatcttttacaataaaatcaattcaaagaaataagataggtgtttaaaaatgaaggcagctttatacactcgtgtttctacagatgagcaagctgaacaggaatcgtcgactgcacgatcaaacatcgatcgaagctcgtagtcggacgatcattag

SEQ ID NO: 2107 - DNA, 966 bp, unidentified
  source 1..966: mol_type = unassigned DNA; note = Bacteriophage uvig_119010 from the Index of /pub/databases/metagenomics/genome_sets/gut_phage_database (ebi.ac.uk)
aagaaaaaacgcaaggtggagggagctgataagcgcaccgccgatggttccgagttcgaaagccccaagaagaagaggaaagtctagttctgcagagggtgatgccattcgacgaacttgtttattgcagcttataatggttacaaataaagcaatagcatcacaaatttcacaaataaagcatttttttcactgcattctagttgtggtttgtccaaactcatcaatgtatcttagtaccgcattcatttcagtgagagcttactcatcagagttcgctcaaccagaagtgccaaacggcaaaatagcatgtgttgaaattgacaatgaacgggtatgcattaagcggttttataagacagatacaggggttatgcttgtgtccgaaaatccgaaatatgcaccgcttcaattcagtgagtcgaattgtacggattttaaggttttggggttggcggtgttaaaacaaagcgaaatacattaaaaaagccccgcctgtgcggggtttacttatacgcggagaacaatatgaagaataaacgagtagccttatatatacgcgtaagcaccgaagagcagacgtccgtatcagactaacgcttatccatatagaatcgacctggatgaagacaacacgccgagaattaccttcctttcctaatttgcagtagtacaactagccgtcaggttagttattttacttcaaataaaaaaagacccctcgttgtgaggggtctatgtcggttatcgtgtgtagtagtcgtcgcctttatgttcggcaaccaccttgccgaatccgtcaatcacttgagttgcgaagttcgttgttccttcttctttatcgacttccaattggttctgatattcggcaaggcatgcttcctttgtgccttcgtatactacttcccggaatcgtcgactgcacgatcaaacatcgatcgaagctccgcgacctacctctattag

SEQ ID NO: 2108 - DNA, 966 bp, unidentified
  source 1..966: mol_type = unassigned DNA; note = Bacteriophage uvig_115965 from the Index of /pub/databases/metagenomics/genome_sets/gut_phage_database (ebi.ac.uk)
aagaaaaaacgcaaggtggagggagctgataagcgcaccgccgatggttccgagttcgaaagccccaagaagaagaggaaagtctagttctgcagagggtgatgccattcgacgaacttgtttattgcagcttataatggttacaaataaagcaatagcatcacaaatttcacaaataaagcatttttttcactgcattctagttgtggtttgtccaaactcatcaatgtatcttagtaccgcattcatttcagtgagagcttactcatcagagttcgaaagcggaacaagtacacccgaacaggtatcggttccatacaagagtgtaagcaattgggagctgtgggcgttcaggacgcacctaaaagtgcctaacgttgtatggttaggggccgtttgtttggtctttgttctgtgtcttttgatttatttcattttgaagtagaagtgctgaaagcggcaaaacgaagccatcagaacccgcagaataaggatgcgcaaaataagacttgggataggaagatgcacatgacgcgcgtcgcgttatatatccgtgtgtcaacggaagatcagaaaatgacgtccgtatcagactaacgcttatccattaaaaaaaatcgtcatcacacaaaatgatgactttttaattgaaccgtattagccatttttgcattaacagacctgttaatataattatggtgaaatataacaggctgcctttttaatagggcagcctgttgtgttcatatcacaggttccgaagtttccgcatgatattttcgtacagacgcgggttgacgatatgcaggctgtccatcagctcatcgatgacggaaagggttttcttcatatcctttttttcgatcgtttgcagaaaatcgctgccgccctccgggatgctgtcctctggaatcgtcgactgcacgatcaaacatcgatcgaagcttcaaggcagcttcttattag

SEQ ID NO: 2109 - DNA, 966 bp, unidentified
  source 1..966: mol_type = unassigned DNA; note = Bacteriophage ivig_3513 from the Index of /pub/databases/metagenomics/genome_sets/gut_phage_database (ebi.ac.uk)
aagaaaaaacgcaaggtggagggagctgataagcgcaccgccgatggttccgagttcgaaagccccaagaagaagaggaaagtctagttctgcagagggtgatgccattcgacgaacttgtttattgcagcttataatggttacaaataaagcaatagcatcacaaatttcacaaataaagcatttttttcactgcattctagttgtggtttgtccaaactcatcaatgtatcttagtaccgcattcatttcagtgagagcttactcatcagagttcgaagcttatagaggatcaaaaagacgaaaagagcaatattttatagtcttctattgcatacaggtcgtttacgttgtataatcagcctataaatttaaaaaatccggcgcaaaacgcaccggattcatggttacttatcaaccgcaggaacggctaataatcaccgcaacaattagattatagcatacatcctgtcgattgtatagggtgtattttttataccctttttaaacagaaaaggaggctaacaaatgaaaaagagagttgcgctttatgttcgcgtaagtacgcaggaacagaagacgtccgtatcagactaacgcttatccataattatataagcaattagacgagcagggaaagcaggctttctggaagaatattatagagattataattatatctcgcgaaacttttattgaggatattatatttttttagttttatttactgtagtaaccactgtaacccatctgcttttaatgcactacatgcatgtgcagccaggccatctgctttatagtagttactacagtatttttattttttaatttttttcacaatatcaagcgatttgtttccaaattttccattaacatcaagattgtattttttctgaaatttttcctgtggaatcgtcgactgcacgatcaaacatcgatcgaagctgttgaacaattcacggttag

SEQ ID NO: 2110 - DNA, 966 bp, unidentified
  source 1..966: mol_type = unassigned DNA; note = Bacteriophage uvig_598110 from the Index of /pub/databases/metagenomics/genome_sets/gut_phage_database (ebi.ac.uk)
aagaaaaaacgcaaggtggagggagctgataagcgcaccgccgatggttccgagttcgaaagccccaagaagaagaggaaagtctagttctgcagagggtgatgccattcgacgaacttgtttattgcagcttataatggttacaaataaagcaatagcatcacaaatttcacaaataaagcatttttttcactgcattctagttgtggtttgtccaaactcatcaatgtatcttagtaccgcattcatttcagtgagagcttactcatcagagttcggttggaatagcaacattgatgatatgcagttaaaaatatatctgaaaatataattttttacttgaatgtataaaatctttatgctatgatgtaaaatatcaacggtaatcatataactgcatattcatttgtagttcgttgattactgtttattttttcccaaacaaaacacatttgcggttgtttcttccgcttatgcgcatacggctctcggagcgtgcgacatctcctgaaactgtcgggtattggcaagccgacgcagaaaattgtcacggtgcaaaggcggaacttcaaacgcctgacgtccgtatcagactaacgcttatccatgaagttgcccgtgcgtgtggtctttccacgtcaaccgtgaattcgtggtggaatcgtggctgtgaaaatgtaagcctgcaaactttattgaagttgtcggcttcttttaattgctcgcttgaagaactcgtacacggaacgcctgaatatgttgtcacttactctacgaatgaatatacggagaaagaacttgaattgatatatctttatgccctatttttgaaaagtttgcgcacaaggggtggtgttgatgataattaaaaaggtcgctttgtatcttcgtaaaagcagaaaagacgaggaatcgtcgactgcacgatcaaacatcgatcgaagctaccacatgaccactgcttag

SEQ ID NO: 2111 - DNA, 966 bp, unidentified
  source 1..966: mol_type = unassigned DNA; note = Bacteriophage uvig_161644 from the Index of /pub/databases/metagenomics/genome_sets/gut_phage_database (ebi.ac.uk)
aagaaaaaacgcaaggtggagggagctgataagcgcaccgccgatggttccgagttcgaaagccccaagaagaagaggaaagtctagttctgcagagggtgatgccattcgacgaacttgtttattgcagcttataatggttacaaataaagcaatagcatcacaaatttcacaaataaagcatttttttcactgcattctagttgtggtttgtccaaactcatcaatgtatcttagtaccgcattcatttcagtgagagcttactcatcagagttcgttgactatatagactttgatgctgatttaaagcctattatacattttaaatagcttgtactacaggcaacacttctaagggtaaggcttgtaagagttccggtatgagtacggccctatcggcatacaaggcctcgtgagccaagccttttttcacctgtcgcgtaaccagcgatacgaccgctacattggtcacttcactacccgtgccgcacgttgaaggcaccataatgagttcgctgcctttacaaggctgtactgtcccgtcaaagagatccgtcaagggtacacattctttcaagacgtccgtatcagactaacgcttatccataattaatggttgaacagaatctaagccaatatgacttggctcgagaaatgagaatttcggtatcagcactcaacaactggtttcatcttaaacgcacacctagaaagagctctatcaataaactatgcaaatattttaatgttgatagtagttactttttaaaagaaaatcccgattaagactatctaatgagtctgagccccgcatcaacaactgaggcggggtttgtttttactccggaggcatctatatgaacactaacaagcgagcagccctttatatccgtgtaagtacagaagaggaatcgtcgactgcacgatcaaacatcgatcgaagctctggcgtacgcctgtcttag

SEQ ID NO: 2112 - DNA, 966 bp, unidentified
  source 1..966: mol_type = unassigned DNA; note = Bacteriophage uvig_116390 from the Index of /pub/databases/metagenomics/genome_sets/gut_phage_database (ebi.ac.uk)
aagaaaaaacgcaaggtggagggagctgataagcgcaccgccgatggttccgagttcgaaagccccaagaagaagaggaaagtctagttctgcagagggtgatgccattcgacgaacttgtttattgcagcttataatggttacaaataaagcaatagcatcacaaatttcacaaataaagcatttttttcactgcattctagttgtggtttgtccaaactcatcaatgtatcttagtaccgcattcatttcagtgagagcttactcatcagagttcgaatcaatagaggttagtgtagatggatatatcactataaatttcttgccgtaatttatgtgcctaactgatactttccgctgggatgattgtgcacgcagatcgatttttgcaactgtaccttttacaggcatcttgagtcccctcctccatttaactaggtttgtctttttgtgtcgttatgttaccttcgatgctaaaaaaatacgtccaatcaaattggagcactttaccgatccgcttcgctacttctacacttggtcggcgttttcctcgttcaatcatattgtaatatgttcgcgacgtccgtatcagactaacgcttatccattttcagctggaaaagcagcggctggtgctgtgctgactggtggtattggtctgttagctggtttcgccggaaaaaaaggtaaaaatgaattcttctgcaggaaatgtaacaatacttttttgcataaataaaaaaacacgctcctccgaccaagaaagcgcgtgtttaaaataaggcaatagcttatttagctatgcctattatactaaataataggatgtgattcaacttgcaacgagtagcgatttatatgcgtgtatcaactgatcagcaagcgaaacatggtgacagtttaagagaggaatcgtcgactgcacgatcaaacatcgatcgaagctggcttgacttgagctcttag

SEQ ID NO: 2113 - DNA, 966 bp, unidentified
  source 1..966: mol_type = unassigned DNA; note = Bacteriophage uvig_236553 from the Index of /pub/databases/metagenomics/genome_sets/gut_phage_database (ebi.ac.uk)
aagaaaaaacgcaaggtggagggagctgataagcgcaccgccgatggttccgagttcgaaagccccaagaagaagaggaaagtctagttctgcagagggtgatgccattcgacgaacttgtttattgcagcttataatggttacaaataaagcaatagcatcacaaatttcacaaataaagcatttttttcactgcattctagttgtggtttgtccaaactcatcaatgtatcttagtaccgcattcatttcagtgagagcttactcatcagagttcgttcgtgagatccgcgtggatcatgagagaaatgtccgtattatttttttgtgatttttatactactaacttacaccgtcctgtcggttcatccgcaaggatcagctccggctttgtgatgattgcccgcgccaccgccgcacgctgtttttgtccaccggacacctcatacggatacttctccagaatatccacaatgccaagtttctgcgcaattggataaagccactcattcatctgcttataaggcacatttgagagcaccagcggcaggaaaatattgtccttcagcgaaaaattggacgtccgtatcagactaacgcttatccatattgtttgctgcactgctccagcttgttttctggggtgcaattgtcatcggactgatctattttatcgttaaagttattttatggtaaaaaagacgatccccactgcaatgggaaccgccttttgaaccttcattcatacttttgcaaaaagcatggtagaatgtcctcacaacaatcattctatcataaaaccgtgctttttgcattggttttattttttataccattttttagattggagttgatagaatgaaacgacaaacagctaaactaaatgataaactgctgctccgggttgcggaatcgtcgactgcacgatcaaacatcgatcgaagctcggcgacaacgagaagaagg

SEQ ID NO: 2114 - DNA, 966 bp, unidentified
  source 1..966: mol_type = unassigned DNA; note = Bacteriophage uvig_370958 from the Index of /pub/databases/metagenomics/genome_sets/gut_phage_database (ebi.ac.uk)
aagaaaaaacgcaaggtggagggagctgataagcgcaccgccgatggttccgagttcgaaagccccaagaagaagaggaaagtctagttctgcagagggtgatgccattcgacgaacttgtttattgcagcttataatggttacaaataaagcaatagcatcacaaatttcacaaataaagcatttttttcactgcattctagttgtggtttgtccaaactcatcaatgtatcttagtaccgcattcatttcagtgagagcttactcatcagagttcgaggtaattttgactataacgcaacagttaaggataaatcttcaaagttaaagaaagctgaaaaacttattcttgaaggtcaagatcttttaattatgaatgagagtttgtttttagacactataaactctcaaaattaattgaaaaataaataaaaaaaatagaggacgtgacgagcacatcccctaataaagtggtataaacacttttcccttacaggtgtattataccacaaaatggaggtataaaacatgaaaagagcagtcgcttatggcagatactcgacagatatgcaaagagagacgtccgtatcagactaacgcttatccattaaatagtgttggtgagaaatcatcagcactatttttgtatggaaatgtataaaaaatagacatagaaatcacattcctataaaatatagttgcaaccaaatattttagaagttgcataagaatagccctgcatcaagcagggcttatttttttattttacaaaattaatttttattgagtattcttcttctccgtctactgcttcataaggtctatcatagcagcctgtaagccaatcgatataagcttcttcgtctccgtcaaattcttgatagtcataagcttctactggctggatgggaatcgtcgactgcacgatcaaacatcgatcgaagctatccgacttagaacggaagg

SEQ ID NO: 2115 - DNA, 966 bp, unidentified
  source 1..966: mol_type = unassigned DNA; note = Bacteriophage uvig_299740 from the Index of /pub/databases/metagenomics/genome_sets/gut_phage_database (ebi.ac.uk)
aagaaaaaacgcaaggtggagggagctgataagcgcaccgccgatggttccgagttcgaaagccccaagaagaagaggaaagtctagttctgcagagggtgatgccattcgacgaacttgtttattgcagcttataatggttacaaataaagcaatagcatcacaaatttcacaaataaagcatttttttcactgcattctagttgtggtttgtccaaactcatcaatgtatcttagtaccgcattcatttcagtgagagcttactcatcagagttcgtcgtatcaattcggtttatgaacgggatagaacacaaatttttgtatggctgaataaacaggaaaaccccactgtatggcttttacagtggggttttaagcaatgttcacgggacgcaagaaaacttgttcattttgtgcacatttactaggtcagaaattgtagtcataaaattcatgacgaccgggtgtaaccaccattgcgccaccgacacggaagcagccgctggattcggaccagtatgcggtctttatcacaccttcgggatttcgcgcataatcgtaatgctgactgctgttggacgtccgtatcagactaacgcttatccatactggtgatggagtgtctggagcgtgcttccacggacgacattgaggtcatctggctgatactgtcaaagtacatgacagcatcagaaaagaaattgctcgacgatccggaagaacgtcagagcatagggtgatcccaaagtcactactactcaggaggtgagaacgtgtcggatcacaataatctcagaaaggttgctctgtatgtcagagtatcgacaacttatcaggttgaaaaggacagccttcctatgcagcgtgaggatctcataaactacgctaaatacgtgctgaacattgaggaatcgtcgactgcacgatcaaacatcgatcgaagctcttaccacttgcagataagg

SEQ ID NO: 2116 - DNA, 966 bp, unidentified
  source 1..966: mol_type = unassigned DNA; note = Bacteriophage ivig_1066 from the Index of /pub/databases/metagenomics/genome_sets/gut_phage_database (ebi.ac.uk)
aagaaaaaacgcaaggtggagggagctgataagcgcaccgccgatggttccgagttcgaaagccccaagaagaagaggaaagtctagttctgcagagggtgatgccattcgacgaacttgtttattgcagcttataatggttacaaataaagcaatagcatcacaaatttcacaaataaagcatttttttcactgcattctagttgtggtttgtccaaactcatcaatgtatcttagtaccgcattcatttcagtgagagcttactcatcagagttcgagtttgaaaacttttagtagccataatcttcacctcattgtctaaaataatctcacaactactttgaaatactttctagtgtcacttcacggtactaaaaacaatcagatatacactaattttgcaactagtatcatctgattcatcttcattacctacaccaaaaggataccccgcgaatgataaatagtcaacgaaatagaaaaatatttatattttttgtacctctattaagaaggagttaaaccacatgaaaagagtagcattgtatattcgtgtatcatctgacgagcaagccaagacgtccgtatcagactaacgcttatccataatccacttacgtactaactgatactgacggacgcgctagcttcaggcgctagtggtagcaataccgtggaagttcgagtcttctcggccgcatctttgagtgatctttctagatcactcttttttgttcttctgataaatatatcattgccaaaaagaacatacgtttgtacaatatatattgatagaacttctctattttgttctctgtacatgtttataattttacactgtaacttcttaattaatggaacctaatattagttttcgtatatttctataaaataagatatgttttcaggaatcgtcgactgcacgatcaaacatcgatcgaagctagtgaaggcgagacataagg

SEQ ID NO: 2117 - DNA, 966 bp, unidentified
  source 1..966: mol_type = unassigned DNA; note = Bacteriophage uvig_441476 from the Index of /pub/databases/metagenomics/genome_sets/gut_phage_database (ebi.ac.uk)
aagaaaaaacgcaaggtggagggagctgataagcgcaccgccgatggttccgagttcgaaagccccaagaagaagaggaaagtctagttctgcagagggtgatgccattcgacgaacttgtttattgcagcttataatggttacaaataaagcaatagcatcacaaatttcacaaataaagcatttttttcactgcattctagttgtggtttgtccaaactcatcaatgtatcttagtaccgcattcatttcagtgagagcttactcatcagagttcgtgaagaatttatgattatcctgaacacaggccttttaatcgtagccattctgaatctgaaaaataagaaatagcatccccgctctgacaaagtaggatgctatttcttaatccttatttcgccagaaacggataggttccagctatcgttccggctgtcttgttaagtatattatacaaacgtttgaaacatttgtcaaacacatttgtttaacaaatccttcttattatatgatatgaggtgaaccaatatgccatattgcctgtatttgagaaaatccagaactgatctggatgcagagacgtccgtatcagactaacgcttatccataaggtaaggatgattttgaattgattttataccccaaattgcctaagtcataaaatgagcagtggaaattactccactgctcctgtcttattatcatattttgatctacacatcagaaatcctgtacctctaactaagctctggatcacatcattgctgtgcacgttagtatccctgtgtataggactacttatgtgtaacgctaaaggtctttgccaaactctttattataatagtccaaaaagcattttttgcaaacgcgcccacaaatatatttaaattcaatatcagataatgcccggaatcgtcgactgcacgatcaaacatcgatcgaagctttggtccacatatgctaagg

SEQ ID NO: 2118 - DNA, 966 bp, unidentified
  source 1..966: mol_type = unassigned DNA; note = Bacteriophage uvig_112613 from the Index of /pub/databases/metagenomics/genome_sets/gut_phage_database (ebi.ac.uk)
aagaaaaaacgcaaggtggagggagctgataagcgcaccgccgatggttccgagttcgaaagccccaagaagaagaggaaagtctagttctgcagagggtgatgccattcgacgaacttgtttattgcagcttataatggttacaaataaagcaatagcatcacaaatttcacaaataaagcatttttttcactgcattctagttgtggtttgtccaaactcatcaatgtatcttagtaccgcattcatttcagtgagagcttactcatcagagttcggtttgcttcatcgttttatttattcttcagctgaaaagagccagggttcttagtttcctggctcttttttgtatcaactattcagtttatttttggtgtcattctataaacatcgcatccccaaatgaaaagaacctgtatcgctcccgaatagcctcctcatatgccttcaggatatgctctcttcctgccagagcgctgactaacatcaccagcgtagattctggcagatggaaattggtaatcagagaatccagaatcttaaaccggtatcccggataaatgaaaatatccgtccatgacgtccgtatcagactaacgcttatccatatagatatataggtaatggtactggtactggttacatcggattttcctagtgaccgtccgtcggacaatcctatggacgctatcaaaaagctattttttacagcaatctcattttttatcattatgcgaatgttctaaatccatagtgtaccaacttagctattttcaagtaacaaaacggactttttttcgtgatagtcctatggacagtccaccgggctatccataggactattttcaggagattattatgcctttcaaaaaagcaatagaaactatgccaaattgctgccatcgtgcggaatcgtcgactgcacgatcaaacatcgatcgaagcttgtaggtgcagccgaagagg

SEQ ID NO: 2119 - DNA, 966 bp, unidentified
  source 1..966: mol_type = unassigned DNA; note = Bacteriophage uvig_184056 from the Index of /pub/databases/metagenomics/genome_sets/gut_phage_database (ebi.ac.uk)
aagaaaaaacgcaaggtggagggagctgataagcgcaccgccgatggttccgagttcgaaagccccaagaagaagaggaaagtctagttctgcagagggtgatgccattcgacgaacttgtttattgcagcttataatggttacaaataaagcaatagcatcacaaatttcacaaataaagcatttttttcactgcattctagttgtggtttgtccaaactcatcaatgtatcttagtaccgcattcatttcagtgagagcttactcatcagagttcgtatcctcgattgagttcaaaaacggtatcacgttggaattcagctacgaatagcagctttttctattgttttttagtcgtaaatgacaaactgattggtgtgctgcaaagcctcattttccccaaaaaagttcagaaaacaacggcaaccagcctatacggttggttgccgttttcttgtaaaaagttcggttttctccttgcaacaacaggcacttttcatacacataggctacaaagtgtataaaatttttgcacatttcggcaaaaattctcaaaacctttttctagaaaagttctggacgtccgtatcagactaacgcttatccattcaagtttctattacggatatgttcgtagaattcttggtaatgcggatgccttcatggaggccattgaagacctaattacgtccgtttccgactcggatgaataaagtagtttccttcggcacgttccacgaaatacgaggctgtaggaagttgagacacagcatattcttccaaggactattataaacgcaagaagcgggcagaatctcctctgtccgcttctattctaaaaaggaaggaatgaacaccatggctgttactccatcaatatccaaaaaaataacagctccgaaggctgcggaatcgtcgactgcacgatcaaacatcgatcgaagctgagatgatacatacaagagg

SEQ ID NO: 2120 - DNA, 966 bp, unidentified
  source 1..966: mol_type = unassigned DNA; note = Bacteriophage uvig_111591 from the Index of /pub/databases/metagenomics/genome_sets/gut_phage_database (ebi.ac.uk)
aagaaaaaacgcaaggtggagggagctgataagcgcaccgccgatggttccgagttcgaaagccccaagaagaagaggaaagtctagttctgcagagggtgatgccattcgacgaacttgtttattgcagcttataatggttacaaataaagcaatagcatcacaaatttcacaaataaagcatttttttcactgcattctagttgtggtttgtccaaactcatcaatgtatcttagtaccgcattcatttcagtgagagcttactcatcagagttcgacaaagaaaatgacacactaaatgcttactattatctcgcaaaacctcagtaaaatcaaggatttgcagtggttgtatgttcttgcaattgggttgacacagtggggttctaaggcactcggcgaccaaggatactcacctattgaaattctgcgctactactacggtgacaatatgtacattaatactgctcaggaaatttccggcgtaccttcctcgtggcctggctataccctttccaatggttcttccggggacaaagttcgtcagatgcaggaacaactcaatgtgattgccggtgacgtccgtatcagactaacgcttatccatgatacattgacttaaattaatttttagcaactgccccgacacagttcggggcacaacaaaatagtatgcttacataagacaacaaaaaaccgtccctactttacatagagacggctaatacacccgaagatgtacagtaattctgaacaaatatattgtatcatcttcggaaacacccgtcaacggaacatattttcgttgggtgttatttttatacatttttttaatatatatagacgaggtgatatgaatgaaaacaggagcattatatatacgtgtaagtacacacatgcaagacgaggaatcgtcgactgcacgatcaaacatcgatcgaagctctaaccttcgctgtcagagg

SEQ ID NO: 2121 - DNA, 966 bp, unidentified
  source 1..966: mol_type = unassigned DNA; note = Bacteriophage uvig_577010 from the Index of /pub/databases/metagenomics/genome_sets/gut_phage_database (ebi.ac.uk)
aagaaaaaacgcaaggtggagggagctgataagcgcaccgccgatggttccgagttcgaaagccccaagaagaagaggaaagtctagttctgcagagggtgatgccattcgacgaacttgtttattgcagcttataatggttacaaataaagcaatagcatcacaaatttcacaaataaagcatttttttcactgcattctagttgtggtttgtccaaactcatcaatgtatcttagtaccgcattcatttcagtgagagcttactcatcagagttcgtctataatgaattatccaatattgataagcgtacactttggcatagtgtaattaagcgtataatcataaaagataagcaaatacaggaaataatattcaaataaaaatagccccaagcgttgaatttaacgcctggggctttagtatgtacttatttaactattccattgggtcccaaaagcccaacaatttctccttttttaaaatataaatttagcttatctaaaacaagtttatttttgtatgcaatagataaatttttaatctctaacattagtccacctcccaaaatttatcaaggacgtccgtatcagactaacgcttatccatagttattcttactatttatgtttacggtggaaattgtatgtatcttaatatgtttaaagaattagaagttactaaagatattccgcttcaatacaaagtagaaattaatcaataaaaaagccatagggtgttggcgcactctatggcaaggaaagtaatttttcataccgcaaagtaagaaatatataaagtctttccgtctatattataccataaacggacggactttttcaatgaaaagggggtctatatggatataataagggccgcactctatataagggtatcgacggaagaacaggaatcgtcgactgcacgatcaaacatcgatcgaagcttcaatcgtggaaggcggagg

SEQ ID NO: 2122 - DNA, 966 bp, unidentified
  source 1..966: mol_type = unassigned DNA; note = Bacteriophage uvig_476025 from the Index of /pub/databases/metagenomics/genome_sets/gut_phage_database (ebi.ac.uk)
aagaaaaaacgcaaggtggagggagctgataagcgcaccgccgatggttccgagttcgaaagccccaagaagaagaggaaagtctagttctgcagagggtgatgccattcgacgaacttgtttattgcagcttataatggttacaaataaagcaatagcatcacaaatttcacaaataaagcatttttttcactgcattctagttgtggtttgtccaaactcatcaatgtatcttagtaccgcattcatttcagtgagagcttactcatcagagttcggattacatcttcgggcgaactgagaagccacaggggaagctctacaattatcagccgaaacccgctgttgattcggacgaaatgcgcaagtttgttgagatgtgtttcgacccgaaatcccccatgaacgagcgactaaagcaggtccttgtggacctgctacaacaatcaaaaaatgacagccgggtctgatttgatttagcacatactatatgcagtgctgctctggcaacccggcggaaggagtagtatgaaagcagtaatttacgcaagatattcaagcgacaatcagcgcgaggagacgtccgtatcagactaacgcttatccatgtaaaattatgcctgtaaatggctctgctatgcggtttcggtgtctgaattgacaccccttttgacacccctagctaaataatcgttgagcttttccatgcttctattttggtgttccgaatcgagatgagtgtaaatatccatagtcacctttatgtcagaatgccccgcctgctgctttgctgtgagcacgtcaacaccggctaagtacatatttgtaatgaacgtatgccgcagccagtgagccgtaattcggggaatcatgaacggtatattttccgggtcgaagcgtgttccaggggaatcgtcgactgcacgatcaaacatcgatcgaagctctaagcagaaggagctgagg

SEQ ID NO: 2123 - DNA, 966 bp, unidentified
  source 1..966: mol_type = unassigned DNA; note = Bacteriophage uvig_382772 from the Index of /pub/databases/metagenomics/genome_sets/gut_phage_database (ebi.ac.uk)
aagaaaaaacgcaaggtggagggagctgataagcgcaccgccgatggttccgagttcgaaagccccaagaagaagaggaaagtctagttctgcagagggtgatgccattcgacgaacttgtttattgcagcttataatggttacaaataaagcaatagcatcacaaatttcacaaataaagcatttttttcactgcattctagttgtggtttgtccaaactcatcaatgtatcttagtaccgcattcatttcagtgagagcttactcatcagagttcgtatattgattccgtaaatgacttatacaaatacaaaaatcagttaatagaagttgtaaaaagatacttataaatagaaaaaccgcccggtactggtaataccggacggcttaacatacatccgaagatgtacgacatgattgacaactatattgtatcatcttcggacagctatcgcaatcggaacatatattcgatagctgttatttttatacttatttttaatataattaacgaaggagtgatataaaatgcctgaaaaaattttgagatgtgctatctatatccgtgtatctaccttgacgtccgtatcagactaacgcttatccataacagatacaccttaatgatgattgcacaataaaagaggtagattttttgtaaattattttgtactaattatattgccccatttggtgtggtcaattcaaatgtcgctcgatccagtgttacatttcccgctttcagctgtgaatcttccgattccatttgtactcttgtcattgcccgcagccgtgccaacaactcttttgcgtgaaagggttttgtcagatagtcattcgctcccgcatcaagtccctctaccttatcatcaacttctccttttgctgtcaacagcaaaaccggaatcggaatcgtcgactgcacgatcaaacatcgatcgaagctttgccaggtgcgtcttgagg

SEQ ID NO: 2124 - DNA, 966 bp, unidentified
  source 1..966: mol_type = unassigned DNA; note = Bacteriophage uvig_512136 from the Index of /pub/databases/metagenomics/genome_sets/gut_phage_database (ebi.ac.uk)
aagaaaaaacgcaaggtggagggagctgataagcgcaccgccgatggttccgagttcgaaagccccaagaagaagaggaaagtctagttctgcagagggtgatgccattcgacgaacttgtttattgcagcttataatggttacaaataaagcaatagcatcacaaatttcacaaataaagcatttttttcactgcattctagttgtggtttgtccaaactcatcaatgtatcttagtaccgcattcatttcagtgagagcttactcatcagagttcgaggaggaataaaaaaataaaaaaattattagcaacaattatggcaattacaacagagtaatatctgcaatgcttgttatggtatttgtcacctgatggctgtacggaaatgaccaaggatcaagccgaacagtcaggatacgaagcttgtaaagtctgcggcggataaataaaaaacgccgtccgagctttgctggtgctcggacggcaataaattatgcaattaaaaccactgcaaaggaggtcaaaaaatgccctactgcatatatctgagaaaatcccgaaaagacatggagttggagacgtccgtatcagactaacgcttatccatcggataggtatcaccaaaacctcgcagagatcgatattgagcttgtattttaaagcgatgaagttatgtatatcattgaggagctaattcttctgttcctacatctgtcaatatagcctgaacttctctgcacggcgctgcataacgctgattaagataccttaatgaagctcccaattcgccgtccgggccgccaagctgactgataattacctttgcaagcgcaggattagggttcttgatgttaaccggatattccagtttcttttcatactgccacattaactttcacccctttccggaatcgtcgactgcacgatcaaacatcgatcgaagctttgttgacacgagtcacagg

SEQ ID NO: 2125 - DNA, 966 bp, unidentified
  source 1..966: mol_type = unassigned DNA; note = Bacteriophage uvig_156529 from the Index of /pub/databases/metagenomics/genome_sets/gut_phage_database (ebi.ac.uk)
aagaaaaaacgcaaggtggagggagctgataagcgcaccgccgatggttccgagttcgaaagccccaagaagaagaggaaagtctagttctgcagagggtgatgccattcgacgaacttgtttattgcagcttataatggttacaaataaagcaatagcatcacaaatttcacaaataaagcatttttttcactgcattctagttgtggtttgtccaaactcatcaatgtatcttagtaccgcattcatttcagtgagagcttactcatcagagttcgtatctctaaagaatatagtgagacaagtccccactcctacaagcaaggtttaagaaatttcaatacataaatctaaaataaacatctatattttgagcaatgcttatatctttgcatttactcacaaaaaataggtgtttttttgagtttaggcacttaaatacactttaactaataaatatttaagttttttgcaaaaaaaagaagccgcccagctcaacagctgaacagctatagccccgctaatgcggggagattgccctattactaaaacatctcaggaaagaaagatagtataaggacgtccgtatcagactaacgcttatccatgacacagtctggattccgacgtcatgtcgacatagagtataaaaatgcattagataaacataatcgtggatatgtatacaaaccacgaaaaaataaaaatgttgagcaataagacaattttatctataaaaaacgcccctaccctgcgccaacaggataggggcaatgcctatagtatatacaggcaaaccaacacaataacattatacctgtatatcctataaatttcaatacttataggagaatttttatgagcattaaagcagtaagctattgcagatatagcacagacaaccaaacggaatcgtcgactgcacgatcaaacatcgatcgaagctcgcatcgctgtaattacagg

SEQ ID NO: 2126 - DNA, 966 bp, unidentified
  source 1..966: mol_type = unassigned DNA; note = Bacteriophage uvig_594437 from the Index of /pub/databases/metagenomics/genome_sets/gut_phage_database (ebi.ac.uk)
aagaaaaaacgcaaggtggagggagctgataagcgcaccgccgatggttccgagttcgaaagccccaagaagaagaggaaagtctagttctgcagagggtgatgccattcgacgaacttgtttattgcagcttataatggttacaaataaagcaatagcatcacaaatttcacaaataaagcatttttttcactgcattctagttgtggtttgtccaaactcatcaatgtatcttagtaccgcattcatttcagtgagagcttactcatcagagttcggcgtccataggaaacacacaggtatcgtttggtctgataacctctgttgcaccgggcaaaactgcgtatactgatacggtcatgttcgattccgagatacatgatgactatcatataagcagttatgacagtatatcttttaaattagacatgtgtcctacaacgacttatgacaacatctactcaggcgagatcactttaactaaatagcaacaacgacaacaacaaaacaacgggaggaaaattgaatatgaaaaggatattacgggctgcgctgtatatccgcgtatcgacagaagagacgtccgtatcagactaacgcttatccattcttaaagggcataaccgttgaaaagactcacgttacgggtcttattttttaaaagactgctgtaccctctaacgctacatacccaaatggctgtgtatcgttagagggtacacaacccgtttatgataacacgggaaatgatcgatagcaaggagacaatgaaagcaaaatgccctcagctgtatgttcaggctgagggcataacatttactttgtgaagtatttagctactttataaggctttgcgtccgcgtcggttatgaagtctttagcgatacagaagtagaagtctgtgtcatggaatcgtcgactgcacgatcaaacatcgatcgaagcttgtcgagtagatcaggcagg

SEQ ID NO: 2127 - DNA, 966 bp, unidentified
  source 1..966: mol_type = unassigned DNA; note = Bacteriophage uvig_366074 from the Index of /pub/databases/metagenomics/genome_sets/gut_phage_database (ebi.ac.uk)
aagaaaaaacgcaaggtggagggagctgataagcgcaccgccgatggttccgagttcgaaagccccaagaagaagaggaaagtctagttctgcagagggtgatgccattcgacgaacttgtttattgcagcttataatggttacaaataaagcaatagcatcacaaatttcacaaataaagcatttttttcactgcattctagttgtggtttgtccaaactcatcaatgtatcttagtaccgcattcatttcagtgagagcttactcatcagagttcgacggtcaattcggggaatcatacttaaaacaatatcaaatcacaacaaaataaaaaaatccccactttatttcatataaaacggggaaatattcggggaaaatgacttgaaatgacaaaatcacgaatattcagtgtgatttcatttgtaataagtgctatattctaaaacaaaaatccacagtctttcagcaaatttgcataaaactgtggattgggtggtcgaggtgacaggacttgaacctgcggcatcttggtcccaaaccactaaataaatgtgcaaaaagttcagtgtttatcggacgtccgtatcagactaacgcttatccataatcacggttgcaatgccgagaaaaaaatataatacaaaatcagatacttacggaattccaaaagtagaaaaaacttccgaatcgcttttggattcggaattctatgagtcggcaagccatttaatatatgagattataaaaaattagtatataaggctgtcaatcaaccctgttttttgacagcctttaaatcccaaaaggaaggagaatatttattatggacggaaaaaaataacagccgcttgctatatgagatacagttcacacgcacaggatgacggcttttctattgaagcacaggaatcgtcgactgcacgatcaaacatcgatcgaagctcttacttgctaaggtgcagg

SEQ ID NO: 2128 - DNA, 966 bp, unidentified
  source 1..966: mol_type = unassigned DNA; note = Bacteriophage uvig_573612 from the Index of /pub/databases/metagenomics/genome_sets/gut_phage_database (ebi.ac.uk)
aagaaaaaacgcaaggtggagggagctgataagcgcaccgccgatggttccgagttcgaaagccccaagaagaagaggaaagtctagttctgcagagggtgatgccattcgacgaacttgtttattgcagcttataatggttacaaataaagcaatagcatcacaaatttcacaaataaagcatttttttcactgcattctagttgtggtttgtccaaactcatcaatgtatcttagtaccgcattcatttcagtgagagcttactcatcagagttcgttctcacgaaccctgtaagaatagagagttgttcgtacaaatgtacaaatggtggcaccctgtataattagcggaatcattccgctaagcttcacccaccatgcattagcgtttgacacatcgcctgcaataaccccaacaccaggctcattgatagccccaatagccgtacgtacttctgctgccgtcgctttaccaagtacaccgcgcatgaattttgacagactggcaagagatgctgcgttagctcctgtgaagtaaggtaatttatcaactgatggactgagtccgcctaatgctgacgtccgtatcagactaacgcttatccatctgccgtggagtgccgcaccgtttcattaaactgaaaaagtcagggagggatatataaaggaagctattggacatcaaggcaaagtgaaaacaaaataaaaagcccctgccatatcgcgaaatatgacaggggaatgcagcccggcattaccagtaccaggttgcggttataatccactcatccaaggaggcagattatgtgtatattatatcataaagcctcccaatgccaaagaaggaggctctttttatgcctaaaacagaagaaaaacaggccgcaaaggccgtcatatatgccagggaatcgtcgactgcacgatcaaacatcgatcgaagctagctactatgcagttgcagg

SEQ ID NO: 2129 - DNA, 966 bp, unidentified
  source 1..966: mol_type = unassigned DNA; note = Bacteriophage uvig_191392 from the Index of /pub/databases/metagenomics/genome_sets/gut_phage_database (ebi.ac.uk)
aagaaaaaacgcaaggtggagggagctgataagcgcaccgccgatggttccgagttcgaaagccccaagaagaagaggaaagtctagttctgcagagggtgatgccattcgacgaacttgtttattgcagcttataatggttacaaataaagcaatagcatcacaaatttcacaaataaagcatttttttcactgcattctagttgtggtttgtccaaactcatcaatgtatcttagtaccgcattcatttcagtgagagcttactcatcagagttcgcccgaccgaaacgctgaacaacatctgcggccctcaaaagagcatttctcttccatcgctccgcaagctcgaccccatccgggccgactactccggtataacagatgcaattatacagagcatacaagtctacccccccccgttttgcataattattgcatatccgttttgtgcattataacagagcagccccgcacagacgggactgctcttccttttctgtatctcgttttcttttggaggtctgagcatggcgaaactggttagccgcatatccgaggctctttcggagatgaaagtgacgtccgtatcagactaacgcttatccatttctcttcaaaaacggcctcgaaatacaattttcctacaaatccacagaatgagaaaaaagccccgaaaccgcttggtttcagggcttttcagctacttcttaatttatgtgaaaatcattcgaaaaatgttaaaaatcaatggtttcgaatttaccggcaggactcgcattgattacaatctgtataattacggtttgtatttccggtctcccccatgccggcagcgatggccttcagcgcaatggcgcactccagacgcttccgctccattttgcaggccacctcgttggacagacttggaatcgtcgactgcacgatcaaacatcgatcgaagctgatgcgatagtcctgccagg

SEQ ID NO: 2130 - DNA, 966 bp, unidentified
  source 1..966: mol_type = unassigned DNA; note = Bacteriophage uvig_587167 from the Index of /pub/databases/metagenomics/genome_sets/gut_phage_database (ebi.ac.uk)
aagaaaaaacgcaaggtggagggagctgataagcgcaccgccgatggttccgagttcgaaagccccaagaagaagaggaaagtctagttctgcagagggtgatgccattcgacgaacttgtttattgcagcttataatggttacaaataaagcaatagcatcacaaatttcacaaataaagcatttttttcactgcattctagttgtggtttgtccaaactcatcaatgtatcttagtaccgcattcatttcagtgagagcttactcatcagagttcgtggttatggaatatccgcgggccgggcggcgtaaaagtttaaccacacggtaaaattgaccggcacgcaaaaagagggccccgggagcaatcccgaggcccttagtcctttcatattgacctgccaccctttcttcgttgcgatttcccttattatagcataccgggcgacgtgtgttcgaggcggtcggacgcgatcgcaaaatacccggggtcccgttcgatcccgatgaatttacggccggtattgagacaggcaaccccggtcgagccggaccccatacacgcgtcgaggacaacggacgtccgtatcagactaacgcttatccatctagttgccgtcgtttcgccggtggataaatgcgcgttaaataacggtgatatagtcgtcgcttcgaacaatggggcctacgcaataaagaggtttattaatgatctcgaaaataagcgaatcattcttcgccccgattcttctgatatcgccttttctgacattgtcatcccctatgaatcggccgataatttacaaattttcggtaaagtcgttatatattccgtagtactttaaaggcggtgcgatcatggcaaatagaaaatggcgcccggcctgttattgccgggtctcgacgatggaatcgtcgactgcacgatcaaacatcgatcgaagcttcttatattggaactccagg

SEQ ID NO: 2131 - DNA, 966 bp, unidentified
  source 1..966: mol_type = unassigned DNA; note = Bacteriophage uvig_595287 from the Index of /pub/databases/metagenomics/genome_sets/gut_phage_database (ebi.ac.uk)
aagaaaaaacgcaaggtggagggagctgataagcgcaccgccgatggttccgagttcgaaagccccaagaagaagaggaaagtctagttctgcagagggtgatgccattcgacgaacttgtttattgcagcttataatggttacaaataaagcaatagcatcacaaatttcacaaataaagcatttttttcactgcattctagttgtggtttgtccaaactcatcaatgtatcttagtaccgcattcatttcagtgagagcttactcatcagagttcgatatacaacatgcaaaagcaggcgcagagttcgcctgctgcgcatcaagttccatcatcagcaatcatccagtcatctctctgcgtgtgcatgaaagtgtattccactctctgcgtttcgcggatatcgagaacttctccctgaccttcatcagaatcttttggtctgcaatgaatcataatcgtatgtttttcatcattccagcaccagtagccattccaacccggaagttttacttttgctccctgtttcataagtttaaatgcttctgaaaatttcatttttgcttactcctctcgtgacgtccgtatcagactaacgcttatccatagatgcattccacatatccgctgattatctgctcggacgcactgatgatccatcagatttcgcaggatttgactctgactatgcaaagctggatgcatctgatcgcgcaaagattgacggattccttcagggcttgcttgcaagcgataaatacaagaagcagagccagcatctcgcataataaaaaggctgagaaaggtgttattcgtggattttagtgctacacagaatgaaggaggacacgagtaagatggacagtactaatataaaagctgttgtatatgcaagatactcttcgcaggaatcgtcgactgcacgatcaaacatcgatcgaagctcgtaccttgacgtaatcagg

SEQ ID NO: 2132 - DNA, 966 bp, unidentified
  source 1..966: mol_type = unassigned DNA; note = Bacteriophage uvig_329173 from the Index of /pub/databases/metagenomics/genome_sets/gut_phage_database (ebi.ac.uk)
aagaaaaaacgcaaggtggagggagctgataagcgcaccgccgatggttccgagttcgaaagccccaagaagaagaggaaagtctagttctgcagagggtgatgccattcgacgaacttgtttattgcagcttataatggttacaaataaagcaatagcatcacaaatttcacaaataaagcatttttttcactgcattctagttgtggtttgtccaaactcatcaatgtatcttagtaccgcattcatttcagtgagagcttactcatcagagttcgtaaagcggatcgaagcagataataacggtgcgttttttgttttgcctcgttaggcttattttatattccccacactgaacatctaatatgcctaacaacccccacctaaaaaggcgggggttgtcttattcgagtttccgcataacgttgttataaatgcgctcattcacaacctttaaactgtccataagctcgtccataaccgcccatgcgcgggaggggtcaacgcttgccacagcccggaggaaatcactgtcaggcgcggaagccgcagaatacgcctcaacaatgcggctttctgacgtccgtatcagactaacgcttatccatggaatatcgctcgataaagcgttcggaatttccgaacacttgacgcccaccgaggaaaccttgcaggcgcgaaatgatgagctggaacgccacgtcgacgcaaaggccgacaccattgagatcatgcggcgtggtgtgcgcatccgcaactgcgtgatttttattttgtttatcatggttttattgttggctgcatggtgcctgtacattgacatgcactgcctaaactacggattctggaggggttgagatgagggctgctttatatatccgcgtgtcaacagaggagcaggcccgacaggaatcgtcgactgcacgatcaaacatcgatcgaagcttggatcatgaagcacgtagg

SEQ ID NO: 2133 - DNA, 966 bp, unidentified
  source 1..966: mol_type = unassigned DNA; note = Bacteriophage uvig_170733 from the Index of /pub/databases/metagenomics/genome_sets/gut_phage_database (ebi.ac.uk)
aagaaaaaacgcaaggtggagggagctgataagcgcaccgccgatggttccgagttcgaaagccccaagaagaagaggaaagtctagttctgcagagggtgatgccattcgacgaacttgtttattgcagcttataatggttacaaataaagcaatagcatcacaaatttcacaaataaagcatttttttcactgcattctagttgtggtttgtccaaactcatcaatgtatcttagtaccgcattcatttcagtgagagcttactcatcagagttcgcaaaacataccgacaaagcttatgatacttacaccttagcaaagactaaaatcaaagacttagatagttataaactatctagcttgtgcgaggagcagaatatacaatgtagcaactatcacactgcacttgctgatgcactagcgtgtggaatactctttattgatattgttaagattgtcaaagaagttaaaagcatagaagatttatagaaattaaaaataatcaaaaataaaaaggtgaattaaaaatgaatgaaaaaattaatgcagtgatttatgctcgattttcgagtcataagacgtccgtatcagactaacgcttatccattgcttaaagatatgagaaaagatgcgacttctaacacctttgctccaccatagaacgcattagcatttgctagtgcgttttttattgtacattaataattttagttgtataattatgttattacactttaagaggttttattatgaataaggaactagcttacaaattagttaaaaataatgatgaaattcattctttctatcttcttgcagacaaagtatggcacgagtactttccttgtattcttgagaaagaacaaattgactatatggttgaaatgttctttagtaaagacgctatggaatcgtcgactgcacgatcaaacatcgatcgaagctaacgccttgtctgttgtagg

SEQ ID NO: 2134 - DNA, 966 bp, unidentified
  source 1..966: mol_type = unassigned DNA; note = Bacteriophage uvig_400465 from the Index of /pub/databases/metagenomics/genome_sets/gut_phage_database (ebi.ac.uk)
aagaaaaaacgcaaggtggagggagctgataagcgcaccgccgatggttccgagttcgaaagccccaagaagaagaggaaagtctagttctgcagagggtgatgccattcgacgaacttgtttattgcagcttataatggttacaaataaagcaatagcatcacaaatttcacaaataaagcatttttttcactgcattctagttgtggtttgtccaaactcatcaatgtatcttagtaccgcattcatttcagtgagagcttactcatcagagttcgctattcaattcacaaatgagttaatcgttcggtttatatatgaccgaagataatcctaaaagcctatcaaaaatacccagtcctgaaatgtgcagaactgggtatttattcatttttcggctgttttgtgtggaaaattattcatttgcttcgaagcggttttatatacatcggctaataaattgaagaagcatgatccaaaaacagccaattttcttgtgttcaaagcatcagaacgcgccgaaaaagccttgattttactggttttttcggtttttcttaaccagctggcatcctttagacgtccgtatcagactaacgcttatccatccaaggaatggccatttcccagttgaagcagacgatttctacgatttcttcagaggctatattgacgattcgcggtgtaaacttccaccctatgagtatgtcgggaactactatgctcgtgtccctgatttgctgcaacacgctcaggaattgatatatgctatcaagcaattccttgaagttcttgcttaggtgcaaaaaatgggcatcgcataagcggtgcccaaattgtgttataaagaggtaaaccatggcaattatagagcaaatccgaaagcaaaaggctgctatctacgtgcgggaatcgtcgactgcacgatcaaacatcgatcgaagcttatggcaacagactcttagg

SEQ ID NO: 2135 - DNA, 966 bp, unidentified
  source 1..966: mol_type = unassigned DNA; note = Bacteriophage uvig_393882 from the Index of /pub/databases/metagenomics/genome_sets/gut_phage_database (ebi.ac.uk)
aagaaaaaacgcaaggtggagggagctgataagcgcaccgccgatggttccgagttcgaaagccccaagaagaagaggaaagtctagttctgcagagggtgatgccattcgacgaacttgtttattgcagcttataatggttacaaataaagcaatagcatcacaaatttcacaaataaagcatttttttcactgcattctagttgtggtttgtccaaactcatcaatgtatcttagtaccgcattcatttcagtgagagcttactcatcagagttcgtaattgtagaccctcatagcaaaataacaattaattttttaacaaaaaattagccacttttaggaactgtcctactagtaacgcttggcgctatcaacgcaaaagcttctgcgaattcaatcaaagcttctgatttcattctttgaatacttctttcggaatagccgacttctctagcaatcttgtaattagagtaatggtcctgcacacagaaactatagtgcaaaatttgtctgctagttaggcttaatgccataagcccagataaaattgcgtctctttctgcttctgcatctgctagacgtccgtatcagactaacgcttatccatttacaaaaaaagaacatacattctctaaggagggatattatgaataaatatgaagtagaaaaaagactttgcgaagagttaaatattgaatatattaacttaagtttacgtacaggacctagtcatagatttactgaaaaagaataccaagaacttaaatctgattatgctcagttatttttacaattaaacaagcttaatgttgagaaagaccaagagtagtttttaaataagatagggggattcgtttatgctaaagagagcagcgttatacattagggtttctactgatcaacaagcggaatcgtcgactgcacgatcaaacatcgatcgaagctagatgtaggtaaccgaacgg

SEQ ID NO: 2136 - DNA, 966 bp, unidentified
  source 1..966: mol_type = unassigned DNA; note = Bacteriophage uvig_587924 from the Index of /pub/databases/metagenomics/genome_sets/gut_phage_database (ebi.ac.uk)
aagaaaaaacgcaaggtggagggagctgataagcgcaccgccgatggttccgagttcgaaagccccaagaagaagaggaaagtctagttctgcagagggtgatgccattcgacgaacttgtttattgcagcttataatggttacaaataaagcaatagcatcacaaatttcacaaataaagcatttttttcactgcattctagttgtggtttgtccaaactcatcaatgtatcttagtaccgcattcatttcagtgagagcttactcatcagagttcgaggaaattcgctggtatccagaccgccaccttgaatacgatctatcgttgtaatttttttacgctatatattcacattattcattttgccatgaggataagactaacaatgtaaatattataaattataacttgccccgccggaatgtggattccagcggggcaatagtttataatacctaaatttcgcgcattactttccgtgctcgacgatgctgtgatagtacgccgacattttggccttcgggccggcggcgtcgcggtcgaagaggaaggccttggccatgtcggcgtaatactcgacgtccgtatcagactaacgcttatccatgtgaaaccatcaagcacaagaaccgaatgatttttgctctactgttgatttttgccctggctctggtgtatggcatcactctggatctgctgaaccccagcatgggcctattccgggggtaaataaatgcggccgcccctggtacggtaataccagaagcggccaaggagcagatgctttgcaggcgctatctgctcctccattatagcagaaaaaggagaaaatgcaaatgaaagatccggagggaaaaatgagagctgcgctatatatccgggtcagcacagaggaacaggccaggcaggaatcgtcgactgcacgatcaaacatcgatcgaagctcgtgaagtggacagcaacgg

SEQ ID NO: 2137 - DNA, 966 bp, unidentified
  source 1..966: mol_type = unassigned DNA; note = Bacteriophage uvig_151182 from the Index of /pub/databases/metagenomics/genome_sets/gut_phage_database (ebi.ac.uk)
aagaaaaaacgcaaggtggagggagctgataagcgcaccgccgatggttccgagttcgaaagccccaagaagaagaggaaagtctagttctgcagagggtgatgccattcgacgaacttgtttattgcagcttataatggttacaaataaagcaatagcatcacaaatttcacaaataaagcatttttttcactgcattctagttgtggtttgtccaaactcatcaatgtatcttagtaccgcattcatttcagtgagagcttactcatcagagttcgaccgtagcgacttagcaagagctatagaagtagcgccaagtactataaatagctggtacgctagaggctctgaaaaggtaagtataacaatacttagaaagatagcgttatactttaacgtctcgttagaggtattaataaacggaaatactataacgtcggtctattttactgagtacgagtatactaaagaagagttagagctaatcgctaattttggtaaatttttaaaagaaagtaggttaaaataatgaaaaacgacgtagctatatatttacgtaaatcacgtgaggacgacgagacgtccgtatcagactaacgcttatccatattttactcgtttagaggacgatacaagtttaaatataacgctattgctataattttactattgtcgcaatagcgtagtatatgatatagtgtaatcattgagacacaaatacataggtgtaacaatcattacactattttttcgtcgtgtaagctaccgagcgacgttataataaatcggtgaggtgtagcacgcccaagcaaagaggtaaaaccccgtaagtgattagacggtggtagctcggtggtatagattgtacgctttggtctatactctcgttagttgtggggtcgtgacgtggaatcgtcgactgcacgatcaaacatcgatcgaagctgctactggatatcgcaacgg

SEQ ID NO: 2138 - DNA, 966 bp, unidentified
  source 1..966: mol_type = unassigned DNA; note = Bacteriophage uvig_383745 from the Index of /pub/databases/metagenomics/genome_sets/gut_phage_database (ebi.ac.uk)
aagaaaaaacgcaaggtggagggagctgataagcgcaccgccgatggttccgagttcgaaagccccaagaagaagaggaaagtctagttctgcagagggtgatgccattcgacgaacttgtttattgcagcttataatggttacaaataaagcaatagcatcacaaatttcacaaataaagcatttttttcactgcattctagttgtggtttgtccaaactcatcaatgtatcttagtaccgcattcatttcagtgagagcttactcatcagagttcggaatggctattatgttacatagcgaaaatgaggaaaactaggcaaacgcctagttttttactccaaaaatctctttatgaacttatatatgcgttccaactgctgttcgttcgctttttctaataatttcataattgattttttgtagtttcttttcatttttctacctcctaaatttgaaaatatttccatttaggagtatagacattataaaaaaggaaaataatatatttagaaatggggttatgatatgcagaaagtaacaagggcggttttctacattcgtgtatcacacaaagagacgtccgtatcagactaacgcttatccataagagattaggcaactcggagaacccgaccattacgccattatttttttatagttattttttgtactaactgtatatcgccagttggtgctatatagttagtacaaaccataaaagcagggtttcccctgcttttatatctttttttccttttttaatttatattctattaactctaataaatactcattcggtacatatcttcccgctttccagtcttgtactgttctatacggtatattaaaatactcgctaaactccttcatattcattcccgttttttttattaattcctcaatttggaatcgtcgactgcacgatcaaacatcgatcgaagcttggttctattccagtaacgg

SEQ ID NO: 2139 - DNA, 966 bp, unidentified
  source 1..966: mol_type = unassigned DNA; note = Bacteriophage uvig_64089 from the Index of /pub/databases/metagenomics/genome_sets/gut_phage_database (ebi.ac.uk)
aagaaaaaacgcaaggtggagggagctgataagcgcaccgccgatggttccgagttcgaaagccccaagaagaagaggaaagtctagttctgcagagggtgatgccattcgacgaacttgtttattgcagcttataatggttacaaataaagcaatagcatcacaaatttcacaaataaagcatttttttcactgcattctagttgtggtttgtccaaactcatcaatgtatcttagtaccgcattcatttcagtgagagcttactcatcagagttcggttatttcccgcttggtatcgtttgtttggattccaaaaggccgtttcattgaaagaaccggccttctttttgtttttatttaattgaaccacttgacgggcatcggcacgaaatgagcgccgttctttaacgcaggtattcggcatatatattgcatatgctttgcgcgtcgctgattgtgtggatgttttcaaagaatttccgatccaggatagctttttgagcgacggttaccatgcagcactgtgcggctggatcgtatttgctgtatttttcgcggtcgctattcaagcggcgatgacgtccgtatcagactaacgcttatccatttggcgggaaatgctctaattccgttaccaagaaaacaaattttttaatcctcggtacgcaagattattctcgaataaacggaaccaaaagcagcaaacaagtcaaagccgaacaacttatgctttccggttcggatttaatgatcctttccgaaaatgttttttacgatatgctcgaaaattatgccggtgaaatctaaattaaaaaggccctcgccttggcaaaataccaaataaaggtggtgagtatatgaaaaaggccgtcgcgtatgcgcggttcagcagtgatatgcagcgcgaggaatcgtcgactgcacgatcaaacatcgatcgaagctcaccataccgaatcacacgg

SEQ ID NO: 2140 - DNA, 966 bp, unidentified
  source 1..966: mol_type = unassigned DNA; note = Bacteriophage uvig_563074 from the Index of /pub/databases/metagenomics/genome_sets/gut_phage_database (ebi.ac.uk)
aagaaaaaacgcaaggtggagggagctgataagcgcaccgccgatggttccgagttcgaaagccccaagaagaagaggaaagtctagttctgcagagggtgatgccattcgacgaacttgtttattgcagcttataatggttacaaataaagcaatagcatcacaaatttcacaaataaagcatttttttcactgcattctagttgtggtttgtccaaactcatcaatgtatcttagtaccgcattcatttcagtgagagcttactcatcagagttcgaaaaaaggcaataccggaaccatcttcgatttcctctgttgtaacggaaggaaatcaatttaagacattggtagacgtcgattttgacaattaccgtaaacgcaacgaaaatcgttccgtcagaaagaactgcactatcccatcttggctgaatgacgaagcagaaaaagctggaatcaatttttcggccactttacaggaagcattaaaggctcaattaggaatgtaggaaaaagggaggaaaacgtccatgaaacgcgtagcattgtacatgcgcgtgtccaccgaagaacaggcgctgacgtccgtatcagactaacgcttatccatttacgcgaatagagatggacgatcagcagaatctcaaagtatttttttcataattcaatttatcctaataatacattaccgacatgtaatgtttatttaggataaaaattctttgagtgccatataaaattacactattctcaaacaatcttcaatgtgcggttctctttacacaataaaaagccgaggaatagtccccggttttttttcattatttcttattttcacattgacatatagtgcactatatgttattataattatagaaaggaggtataaatgattgagttatttacaagcggaatcgtcgactgcacgatcaaacatcgatcgaagcttctacgaggctaagatacgg

SEQ ID NO: 2141 - DNA, 966 bp, unidentified
  source 1..966: mol_type = unassigned DNA; note = Bacteriophage uvig_256936 from the Index of /pub/databases/metagenomics/genome_sets/gut_phage_database (ebi.ac.uk)
aagaaaaaacgcaaggtggagggagctgataagcgcaccgccgatggttccgagttcgaaagccccaagaagaagaggaaagtctagttctgcagagggtgatgccattcgacgaacttgtttattgcagcttataatggttacaaataaagcaatagcatcacaaatttcacaaataaagcatttttttcactgcattctagttgtggtttgtccaaactcatcaatgtatcttagtaccgcattcatttcagtgagagcttactcatcagagttcgataaggtagaatatgatggagaaatcaataatttaaccatattttataactagtccctattgtaataaggtggtgctaacggcgagttagcagcagccttccgctatctaaatcaaagatatacaatgccagatgataaaggaaaagctttgcttaccgatattggaactgaagaactagcccatgttgaaatgatatccgctatgatatatcaactactaaatggcgccactctaaaagaattaaaagaagctggattagaatctcactatgccgaacatggatatggactatatccaagacgtccgtatcagactaacgcttatccatgtgacaaagaacatttgaatatatatgaaaaattcatagaagaaataattaacgatttaaaaaattaaaaaaagactagaactgctggaacagtctagtcaaaaatgaaaaactttagtctagcaaactaacaatataatataattatataggtacaatataacatcgtttataagcgtgtttatgtacaagtttttctatataattatatcaaaaattaataataaaaacaataggaagtgatatatttatgaaaaaaggtgctatatatgtaagagtaagttcagaagagcaagcaagggaatcgtcgactgcacgatcaaacatcgatcgaagctcttgcacaacatatgagcgg

SEQ ID NO: 2142 - DNA, 966 bp, unidentified
  source 1..966: mol_type = unassigned DNA; note = Bacteriophage uvig_110275 from the Index of /pub/databases/metagenomics/genome_sets/gut_phage_database (ebi.ac.uk)
aagaaaaaacgcaaggtggagggagctgataagcgcaccgccgatggttccgagttcgaaagccccaagaagaagaggaaagtctagttctgcagagggtgatgccattcgacgaacttgtttattgcagcttataatggttacaaataaagcaatagcatcacaaatttcacaaataaagcatttttttcactgcattctagttgtggtttgtccaaactcatcaatgtatcttagtaccgcattcatttcagtgagagcttactcatcagagttcgttaatagatccaaagagcatgttattaaagtttttcctaaacttcgtaaataagtctatatggcttatttacttagttccacctaattacatacaacatattaattatatttcatttccttccttatccactcctataggatcttgaagaaagacttctccctttgtctttttgctgttcctaaagaacataagtatttcattatctatacacttagccgcatatgttgcaagtcgtattcccttgctagtatcaaaagaatctatagcttttattaaacctattgttcctatagatatagacgtccgtatcagactaacgcttatccatcaaaagacattagctaagaaagctcgtataagtcaatcttatctttctaaactagagcgtaatgaaaaagtcgttgtattaggtgttagactaaagattattaaaaatattgctaaagctcttaatgtaagtgaaggaaaaatattaatattagacaaggactaggttatatatttttaataacctagtttttattttattgaattacatacattaaatacatataatgaatgtaaaggaggttgttttcatgaataataaaatatgtatgtatcttagaaaaagtcgtgctgatgaagaggaatcgtcgactgcacgatcaaacatcgatcgaagcttcacgacttagccgtagcgg

SEQ ID NO: 2143 - DNA, 966 bp, unidentified
  source 1..966: mol_type = unassigned DNA; note = Bacteriophage uvig_239325 from the Index of /pub/databases/metagenomics/genome_sets/gut_phage_database (ebi.ac.uk)
aagaaaaaacgcaaggtggagggagctgataagcgcaccgccgatggttccgagttcgaaagccccaagaagaagaggaaagtctagttctgcagagggtgatgccattcgacgaacttgtttattgcagcttataatggttacaaataaagcaatagcatcacaaatttcacaaataaagcatttttttcactgcattctagttgtggtttgtccaaactcatcaatgtatcttagtaccgcattcatttcagtgagagcttactcatcagagttcgctcatcaaatggtagcgagaaatggattcgaaccatcgacctgccgggtatgaaccggatgctctagccaactgagctatctcgccgtcaacgattaatattataattgtttttttatattttgtcaataataaaaacgaaataatttaaaattatttcgtttttattttacttttagtctctttctcgaccttgagtatatgaatctctttcatttcttatattttgcttattaattttatattttgtattcttagttgaattttcatccttttttattgttcctgtttttatttgtatgacgtccgtatcagactaacgcttatccataaggcgatattgctgtagtaaaaaagcaaaatgattttgaaaatggagatatagttgtagccatcattaatggaaatgaagctacaataaaaaaagcctataaaacagataatggtttattattgcaacctgcaaacgcttctgtagagcccttaatgtttacaaaaaaagaaattgaagatattcctgtcataattataggtgtagtgtacaatattataagaaaattcaaataattaggaggtattatatgttagcctatggatattgtagatattcttctgatatgcaaaatgaaaaggaatcgtcgactgcacgatcaaacatcgatcgaagctaacagatgcatcgttagcgg

SEQ ID NO: 2144 - DNA, 966 bp, unidentified
  source 1..966: mol_type = unassigned DNA; note = Bacteriophage uvig_578984 from the Index of /pub/databases/metagenomics/genome_sets/gut_phage_database (ebi.ac.uk)
aagaaaaaacgcaaggtggagggagctgataagcgcaccgccgatggttccgagttcgaaagccccaagaagaagaggaaagtctagttctgcagagggtgatgccattcgacgaacttgtttattgcagcttataatggttacaaataaagcaatagcatcacaaatttcacaaataaagcatttttttcactgcattctagttgtggtttgtccaaactcatcaatgtatcttagtaccgcattcatttcagtgagagcttactcatcagagttcgaccaaagaaataatgactttaaagtggttatatcccctaaattactgcgttaggcaattacatacaacatgcctaacgcaattcattttcattgcacttagtatgttatatgtaatactatatttaatatctatatataaaggaaggaattttttttacataactattccgcaaatttatccgtcttttttaaataataatgtaaattttattacacaaaaaaagtaaatactttcctctacaatatataatgcttatggaggggaaagttatgatgaacgatattttaaaagaattaaggacgtccgtatcagactaacgcttatccataaagaagaagcataattaaacactctccttctctggtgatattttagaatcttttattaattttaataatagttttttatatgtcatttccaattcaacatattcatccatttcgcacctcgttatacataagctataataaaatactagcattattttataaaaatgtaaagaacaaacgttcgcacaatcttatatattttgtaatttaaagtaactttttttaatcaaattataaggagattataaaatgaacaatatatgtatttatttaagaaaatcaagagcagatgaagaactggaatcgtcgactgcacgatcaaacatcgatcgaagcttcggaagtcaacacaggcgg

SEQ ID NO: 2145 - DNA, 966 bp, unidentified
  source 1..966: mol_type = unassigned DNA; note = Bacteriophage uvig_316826 from the Index of /pub/databases/metagenomics/genome_sets/gut_phage_database (ebi.ac.uk)
aagaaaaaacgcaaggtggagggagctgataagcgcaccgccgatggttccgagttcgaaagccccaagaagaagaggaaagtctagttctgcagagggtgatgccattcgacgaacttgtttattgcagcttataatggttacaaataaagcaatagcatcacaaatttcacaaataaagcatttttttcactgcattctagttgtggtttgtccaaactcatcaatgtatcttagtaccgcattcatttcagtgagagcttactcatcagagttcgaagaataaacgaaaaggtgtatgcttaaaatgtgggcacaagtggagcatataaaagggagatttatatggacttaaagaagccagaaaacaagatttgttgattttttataaaaaatctctaatataagaacaacgaggttaagcctcaaactaaaattattatgagcggtttaaccgcaaaaaagataaggtcttgttcttatacgttcaaggccttatcttttttatttgtcataaggagcgaacatatgagcgaaactactcagataggtgttatttatgcccgatattcctcggagacgtccgtatcagactaacgcttatccatcgcttttaaatgatttggtgacccagaagggattcgaacccctggccttttgattcgtagtcaaacgctctatccagctgagctactgagtcatgtacaaggtactcacttatattaacataatgattgcggctacgcaagcattttttaatattttttgagtaattttatggacatgcggtccgaagaccgccatccaaaatttggcaggggcagtaggacttgaacccacaaccaacggttttggagaccgctactctaccaattgagctatacccctatgttcatcaagctttgcttggaatcgtcgactgcacgatcaaacatcgatcgaagcttgcagtagatacgatggcgg

SEQ ID NO: 2146 - DNA, 966 bp, unidentified
  source 1..966: mol_type = unassigned DNA; note = Bacteriophage uvig_86231 from the Index of /pub/databases/metagenomics/genome_sets/gut_phage_database (ebi.ac.uk)
aagaaaaaacgcaaggtggagggagctgataagcgcaccgccgatggttccgagttcgaaagccccaagaagaagaggaaagtctagttctgcagagggtgatgccattcgacgaacttgtttattgcagcttataatggttacaaataaagcaatagcatcacaaatttcacaaataaagcatttttttcactgcattctagttgtggtttgtccaaactcatcaatgtatcttagtaccgcattcatttcagtgagagcttactcatcagagttcgataaaatagtaatagacaaagaaggaaaaattcaagtctattttaatttttaaaaattatttacatatgcaggcggatttgttattgtttctctcatgagaaagaaatttgtgaaagaatatcattggatagaagaaaaggaaatcctaaatcttatagcaattgctcaatcatctcctggttcgctatctattaatatatctatattagttggatataaattggcaggtattccaggtgcattgatctctataacagctacagcacttccaccacttattacattgtcaatagtatcatgacgtccgtatcagactaacgcttatccataagattgatggatgggttattaatagatattattgagtattttctatttgtgtctaaagtgttattggtcataaagttatttacaaatttaaaattgaactggtttagaaccttgtttcctttagcactcacactaattttaatagggatacatcagttaatttcgtaggaggtagggaagatgaagaatgatgaaaaacgtaaacaagaaactataaataaaatagtggaaatattactggaggaataaatggaaagatgtgttatatacgctcgtgtttccactcatgaacaagctgaggaatcgtcgactgcacgatcaaacatcgatcgaagctttgtgttattggacatgcgg

SEQ ID NO: 2147 - DNA, 966 bp, unidentified
  source 1..966: mol_type = unassigned DNA; note = Bacteriophage uvig_125074 from the Index of /pub/databases/metagenomics/genome_sets/gut_phage_database (ebi.ac.uk)
aagaaaaaacgcaaggtggagggagctgataagcgcaccgccgatggttccgagttcgaaagccccaagaagaagaggaaagtctagttctgcagagggtgatgccattcgacgaacttgtttattgcagcttataatggttacaaataaagcaatagcatcacaaatttcacaaataaagcatttttttcactgcattctagttgtggtttgtccaaactcatcaatgtatcttagtaccgcattcatttcagtgagagcttactcatcagagttcgcaaatagatgacaaagttgtttgcatcagcccaaacggcattatccataatcgcgactgcagatatttcaacaaaaacagtaatatacgcaactgccaattttgtggtggactgaaaaaaagataatttttgactgccgttttatctatttctctaaacttgccatttttttcctatacagatatgagacttttgcaatctattaatttcccgatacaataaaaaatagtatagattttcaggaagaagtatgaaatatttgatttatgcgcgtgtcagcgaacgcggttccggctttgagacgtccgtatcagactaacgcttatccataatggtacacccaaagtgtagagccaactacccgcagcttgagctcaaaataagttacaacccattggtctgaaacgaaaaactatcgttctgacctgatggttttgcaaggcttccaagatcgtaaaaacggcacttttcggcactttttcccttgtagcactctcccccggaagctcagctgccggaacgccgcatcgagataccggcagtctccccacgtctcatccgccaccgccatctccgtcacagggtccgcgatgatcgtcggtcccataggcccggtttgcatcgatgaaaggaatcgtcgactgcacgatcaaacatcgatcgaagctcgactcttaacggcatgcgg

SEQ ID NO: 2148 - DNA, 966 bp, unidentified
  source 1..966: mol_type = unassigned DNA; note = Bacteriophage uvig_337673 from the Index of /pub/databases/metagenomics/genome_sets/gut_phage_database (ebi.ac.uk)
aagaaaaaacgcaaggtggagggagctgataagcgcaccgccgatggttccgagttcgaaagccccaagaagaagaggaaagtctagttctgcagagggtgatgccattcgacgaacttgtttattgcagcttataatggttacaaataaagcaatagcatcacaaatttcacaaataaagcatttttttcactgcattctagttgtggtttgtccaaactcatcaatgtatcttagtaccgcattcatttcagtgagagcttactcatcagagttcgacaaaagaaaagaagaaatataaacctaaagagcaaatatcaaaaaaagattattctaaaaaaattacttacactcaaagtgataaagagtccctagacttactagatattgttgagctttacttatgtagagcttgtataaggctataagctggggtgctgacttaaaaacttgggtgcggtaaaatataagtggtagaagaactccttaatgactatttgctcaaatacaaattaaggaggttttgtgatggaaaaatttgcttgtatgtatcttcgtttatcgagagaggatggagagacgtccgtatcagactaacgcttatccatgaaatgctcttgaaaataagactccaatgcaattagctggaggtgttttataatggcaagaacttccaaaagatatattgaaaaaaaaatgaaaagacagaaagaaaagtctttaaggtcggaatttatacaagactatcaaacgaaagaacagaagagtggagagaaaaatcatactaaattgaaactcaaatactgtcttgtaaagaatatgcattaaaagaaaatatagatgttttagaagtttacactgactatgaatatagtgggacaaactttgaaagaccatcatttcaaaatggaatcgtcgactgcacgatcaaacatcgatcgaagctttctgttgtaatgactgcgg

SEQ ID NO: 2149 - DNA, 966 bp, unidentified
  source 1..966: mol_type = unassigned DNA; note = Bacteriophage uvig_595969 from the Index of /pub/databases/metagenomics/genome_sets/gut_phage_database (ebi.ac.uk)
aagaaaaaacgcaaggtggagggagctgataagcgcaccgccgatggttccgagttcgaaagccccaagaagaagaggaaagtctagttctgcagagggtgatgccattcgacgaacttgtttattgcagcttataatggttacaaataaagcaatagcatcacaaatttcacaaataaagcatttttttcactgcattctagttgtggtttgtccaaactcatcaatgtatcttagtaccgcattcatttcagtgagagcttactcatcagagttcgaagcgctgaacgccatgttgaccgtgcaagcggcacggtatcgcacgatcatttttatgctgctcggtgtttgcgctcttctgctagtttcagtcattagctatatcgtcttcgacatacagatcacgaccgccgggcttttccggtcagcaaaaacaagcacgcttgcggtgttcctaggccttgtcgttctcgccgccgtcggctccatcgggtacgccgttcacacgatcaacgtagggaggaagaaatgagagttgcgctttacatccgcgtttcgacggaagaacaagccgttcagacgtccgtatcagactaacgcttatccatggattgtagtttcagaaaacggcgacatcttttttgaacttgtttggctataaagaaccttaacacctgttaatgtataatatagctaaataggggatgcattatgcaccccctaaaatatagtttactgctttttcagctttgccagcggcagagattatcatagttggatcattttttagaactcgcatccaactttgaagatatgcagcgctatttcggaaagaagctcttgtttctatccctacatgggcgacaaggtttgccgcgccgagctccgcaataagctcttctttgctgggaatcgtcgactgcacgatcaaacatcgatcgaagctttgtaactcgaacgttgcgg

SEQ ID NO: 2150 - DNA, 966 bp, unidentified
  source 1..966: mol_type = unassigned DNA; note = Bacteriophage uvig_177087 from the Index of /pub/databases/metagenomics/genome_sets/gut_phage_database (ebi.ac.uk)
aagaaaaaacgcaaggtggagggagctgataagcgcaccgccgatggttccgagttcgaaagccccaagaagaagaggaaagtctagttctgcagagggtgatgccattcgacgaacttgtttattgcagcttataatggttacaaataaagcaatagcatcacaaatttcacaaataaagcatttttttcactgcattctagttgtggtttgtccaaactcatcaatgtatcttagtaccgcattcatttcagtgagagcttactcatcagagttcgccgcggcagcggaaaaaccgcaagcattaccggtaatgcgggcgagcgttacttctccattcaaagttatgattcgcaaggccgtggcgatcttttggtaaatacgacggacaaatacgacggcaaagtaatcttaaatgatccgatcatttttcaggtctcagccgtcggcgattggagtataactctgaactaatcttaatttaagagccccaccgcaaggggctcttgtcaaacgcaggagggctatatgagagcagcgttatatgagagagtatcgacggatgagcagcggattcagacgtccgtatcagactaacgcttatccatagatcactctccatcccgatgccggcatttcttttagcctccgtcagttataatcggcgtagccaaggggttataccgattataactgacaaaagagaccggagaccggtctctggctctatatcatattagtatgcccaacctctcggcaagcagctcccgccgcgcttgcggtattggtttgatcccagcgcaccaggagtgtacggcggccttgctcacctcgcaggcctcggcggcctgctccaacgtcaggccacgggccttgagctgatcccgcaaatactcgccgtcgctgagggaatcgtcgactgcacgatcaaacatcgatcgaagcttgtgctaacgccttcaccgg

SEQ ID NO: 2151 - DNA, 966 bp, unidentified
  source 1..966: mol_type = unassigned DNA; note = Bacteriophage uvig_594539 from the Index of /pub/databases/metagenomics/genome_sets/gut_phage_database (ebi.ac.uk)
aagaaaaaacgcaaggtggagggagctgataagcgcaccgccgatggttccgagttcgaaagccccaagaagaagaggaaagtctagttctgcagagggtgatgccattcgacgaacttgtttattgcagcttataatggttacaaataaagcaatagcatcacaaatttcacaaataaagcatttttttcactgcattctagttgtggtttgtccaaactcatcaatgtatcttagtaccgcattcatttcagtgagagcttactcatcagagttcgtcaaggaaatacgcgttgatgagcaaagaaatgtgaccattatttttttataattttcgtactactaaccgatattaaccagttggttagtatcagttagtacaataaaaacaccggactgtgtttctcgtccggtgttttactttgttggtatgtattcaatctaagccaatgttattttttattcacaaatcttttttaagaaatcatcatcaacgtcatagtggaccatttttttaatttcctccgcgctatatcctaatcttgcgattgcgaacttgatatcaagtatggtcggttgacgtccgtatcagactaacgcttatccatccgcatatgatagcgacggtaacgagcaaaaagccacgttttctgttgttgttgagccagacgtggaaagcagcactgagaactaattgtttttataaaaaagaaaaagcccgctttcgcggactccttctcccaccacctatgcggcggctttgtataactttgattagcgttaatgattataccacaaaaagccgcatttgcataggcttttctttttatactcttttttaattttgaggtgtaatctatggataaaaataaaaaaattactgtaccaggattgctgcggactgctatggaatcgtcgactgcacgatcaaacatcgatcgaagctattcttagactcgtgtccgg

SEQ ID NO: 2152 - DNA, 966 bp, unidentified
  source 1..966: mol_type = unassigned DNA; note = Bacteriophage uvig_236070 from the Index of /pub/databases/metagenomics/genome_sets/gut_phage_database (ebi.ac.uk)
aagaaaaaacgcaaggtggagggagctgataagcgcaccgccgatggttccgagttcgaaagccccaagaagaagaggaaagtctagttctgcagagggtgatgccattcgacgaacttgtttattgcagcttataatggttacaaataaagcaatagcatcacaaatttcacaaataaagcatttttttcactgcattctagttgtggtttgtccaaactcatcaatgtatcttagtaccgcattcatttcagtgagagcttactcatcagagttcgaaatcatcttcaatcgttccctatcttccgttgagttatttttctgtttttgaattataacttttgggatatgggggacctgatggtgagctcggtgcatcacttagatatttaagtcagaggtacacaatgccgttccctgaacttcaagcaacacttaccgacataggtacagaagaacttggtcaccttgaaatgataggtactattgtttatcagctaactaaagacttaacagaagaccaattaaaagatgctggatttgatgcttattttgttgaccatacaaccggtgtttatgacgtccgtatcagactaacgcttatccatataaaaaagcaaaccaaagaatgtttacaatagccaattcgtaaattctccctatttttacgaattgggtatcaaaatataataaaaaaatcgccctctagtattggcgtactagagagcgacaccattacacagggtgcaatgatactatttcatagcaagtaatattgtatcatacccttgtaaatttttcaatataatttacaagggatttttgcacccttttttagataagaaaggagcaaaataaatggatgacttaaaaattgcagctgcctacatcagagttagcacagatgaggaatcgtcgactgcacgatcaaacatcgatcgaagctgccatatgctatacctccgg

SEQ ID NO: 2153 - DNA, 966 bp, unidentified
  source 1..966: mol_type = unassigned DNA; note = Bacteriophage uvig_171405 from the Index of /pub/databases/metagenomics/genome_sets/gut_phage_database (ebi.ac.uk)
aagaaaaaacgcaaggtggagggagctgataagcgcaccgccgatggttccgagttcgaaagccccaagaagaagaggaaagtctagttctgcagagggtgatgccattcgacgaacttgtttattgcagcttataatggttacaaataaagcaatagcatcacaaatttcacaaataaagcatttttttcactgcattctagttgtggtttgtccaaactcatcaatgtatcttagtaccgcattcatttcagtgagagcttactcatcagagttcgagtttatatataaggccacaaagccccctaagagcgcttctacgaagccgtgacatagcaatagccgcccgacgaatcgggcggctattttttatccatttttgcacttgcatccgcaatttctgcacgtctcggcggccacttctttccctgttcgcttgcagtagaaccgcgggccacttccctgccgtatgtgccggcagttcgggaatcctctttccatcaagacgcttttcttcggcttctctatttttcggcacctgcctttctcgacctttcgaccatcattttctcatacgcgacgtccgtatcagactaacgcttatccattttctgccgactacctcgtaggcatcgaccccgtgctggccccgccgaagaaatccggcgaccccgaggaaatcattctgctgaacgcattctccaaggtgagcgacgatgaccgtgccgtcctgtgggcgctgctgcggaaatatatgactccgcacgaccgcgccctgctggaagcccttaaccaagacaacgaatccggcgccgtataatttacctgccgtattcggactaaggggagggcttcatcatgcaaaagaaccagacgaaaaaagccgctctctatatccgagtttctacggaatcgtcgactgcacgatcaaacatcgatcgaagctatgtcctagaattgttccgg

SEQ ID NO: 2154 - DNA, 966 bp, unidentified
  source 1..966: mol_type = unassigned DNA; note = Bacteriophage uvig_578207 from the Index of /pub/databases/metagenomics/genome_sets/gut_phage_database (ebi.ac.uk)
aagaaaaaacgcaaggtggagggagctgataagcgcaccgccgatggttccgagttcgaaagccccaagaagaagaggaaagtctagttctgcagagggtgatgccattcgacgaacttgtttattgcagcttataatggttacaaataaagcaatagcatcacaaatttcacaaataaagcatttttttcactgcattctagttgtggtttgtccaaactcatcaatgtatcttagtaccgcattcatttcagtgagagcttactcatcagagttcggacaaggcattagaataccaacaaacaaaaaataacaaaagaaaaaaacaatggtcagaatctaaggttcaaagagaatcaattaatatgtggaatatgacagcagataatatatataaccgattgctggtagcatctaagcaagataacaagcccatactagcctacatacaagcttatgacatactagacaatataaatgattcactagcagaactagactttacagaggataattaagaggtgcattatggataacaacagtaatataagagtagcgatatatattagggttagtacgacgtccgtatcagactaacgcttatccatctgttgatattattgagtttcagaatggtttagcattacattttaactattaatatcgtagttgcgtagaggtatctaaaaaatcgtagttgaggcaacatacggacatccaaatgtcaggcagaaatacgattttcgttttccattctttaaaaaataatcttcattcattgaaaataacttctcaatatatttatcttgttctaaaattaaatctttagaaacttgtctttgttttctctcactcaaaactatatctcctcactataaaggcactgtaaccagtgccttatttatttaggaatcgtcgactgcacgatcaaacatcgatcgaagctactaaggattctagaatcgg

SEQ ID NO: 2155 - DNA, 966 bp, unidentified
  source 1..966: mol_type = unassigned DNA; note = Bacteriophage uvig_354904 from the Index of /pub/databases/metagenomics/genome_sets/gut_phage_database (ebi.ac.uk)
aagaaaaaacgcaaggtggagggagctgataagcgcaccgccgatggttccgagttcgaaagccccaagaagaagaggaaagtctagttctgcagagggtgatgccattcgacgaacttgtttattgcagcttataatggttacaaataaagcaatagcatcacaaatttcacaaataaagcatttttttcactgcattctagttgtggtttgtccaaactcatcaatgtatcttagtaccgcattcatttcagtgagagcttactcatcagagttcgtagctatccctaatttatggagtttgcctcgttgggaagtgatatccatactaggaaataaaatatatgcaatctttttatcatacggcatgttatttatgttttggacaagcaagccgttaatactgggaaacaagaaaattaccaatacattatttaattatgacggtatatttttctatgtgttaggctttatttgtattgtaattggcctatttttagataacgatatctttataaggtaattattatggataaaattaagcgggcggcattgtatatacgtgtaagcacagaagagacgtccgtatcagactaacgcttatccattgatagatcatattgatgtaagtggcgatatgcctgttattttttttaaataaaacttgtagtaactcatcggcaccgtccggcagcttcggttcaaactgcaagtacgccttgccttcactgtccttctcggccagtgcggccacgctgtccggatacttgcctttatcgatttcatagagagccgccgcattgtcgatggtacgaatatccgcactgattttagcgagctttgccgtcttgccggcggacatgaacttcggtacggcaacggtggcgagaattaagataatactgacgggaatcgtcgactgcacgatcaaacatcgatcgaagctctgtaagcactaggtatcgg

SEQ ID NO: 2156 - DNA, 966 bp, unidentified
  source 1..966: mol_type = unassigned DNA; note = Bacteriophage uvig_15514 from the Index of /pub/databases/metagenomics/genome_sets/gut_phage_database (ebi.ac.uk)
aagaaaaaacgcaaggtggagggagctgataagcgcaccgccgatggttccgagttcgaaagccccaagaagaagaggaaagtctagttctgcagagggtgatgccattcgacgaacttgtttattgcagcttataatggttacaaataaagcaatagcatcacaaatttcacaaataaagcatttttttcactgcattctagttgtggtttgtccaaactcatcaatgtatcttagtaccgcattcatttcagtgagagcttactcatcagagttcgaaatgctctaaagttgtaccgattacggcggaaaggaacacaaatgaaaaatgatgattttatgaagttattgcaagaccctgagttcagaaattctccgttaggtgaattacaagctaccttgcaggaggcttttaagcagtatgaatggagaataagaagtgaacgtataaaagcaggaattagagaagcaaaattgagaaagactggtaaggcggagtaatccgcctccaaatgaaaggagaaatttatgagtaacgcaattatttatacaagagtttcaacaaaaaatcaggcagagacgtccgtatcagactaacgcttatccatcttataataatatggtacccccaagcgaattcgaatcgctgtctacaccgtgaaagggtgttgtcctaggcctctagacgatgggggctcgtgacaatttatatagtatcaaatcaatttttcatgtcaagggggtaaattaaaggaagaatgttagattgtatttttgttgcaaaaaaaatcatttagtcctaatatataactagaattgaggttattatgattaatagaaaatcacgcgacgaaattaagagaatgcgacatgccggacatattgtagctcttgtgcataagaaaatgggaatcgtcgactgcacgatcaaacatcgatcgaagctgtcagtgtaacaggcgtcgg

SEQ ID NO: 2157 - DNA, 966 bp, unidentified
  source 1..966: mol_type = unassigned DNA; note = Bacteriophage uvig_83898 from the Index of /pub/databases/metagenomics/genome_sets/gut_phage_database (ebi.ac.uk)
aagaaaaaacgcaaggtggagggagctgataagcgcaccgccgatggttccgagttcgaaagccccaagaagaagaggaaagtctagttctgcagagggtgatgccattcgacgaacttgtttattgcagcttataatggttacaaataaagcaatagcatcacaaatttcacaaataaagcatttttttcactgcattctagttgtggtttgtccaaactcatcaatgtatcttagtaccgcattcatttcagtgagagcttactcatcagagttcgaaatatcattaacgaaaaaagccgagcgaaagttatacttatgccatagattagtagcagaagcttttattcccaatccaaataattattctgaaattaatcatatagatggaaataagcaaaataattatgtaaaaaatttagaatggtgtactcatagtgaaaatattaagcatgcgtataataaaagtttaattccaaaaataaagaatagaccaaaaggcctaaaaataaaaaaggaagtgttgcaatgaaaatagctgcggtatatacaagagtatccacggacgaacaagctcggacgtccgtatcagactaacgcttatccatacaaggtcgagtatgacccaacctctaacactttagagttatattataactaatgtcccttttgtgatacggtggttctaatggagagctagcagctgctcttcgttatttaaatcaaagatatactatgcctgataatcggggaaaagctttacttactgatattgggacagaagaacttgctcatgtagagatgattgcgactatggtttatcagctaacaaaagatgcaacacctgaagagatgaagcaagcaggacttggtggaaattatgctgaacatgctaaagcattatacccggaatcgtcgactgcacgatcaaacatcgatcgaagcttaccaggttcgagtgctcgg

SEQ ID NO: 2158 - DNA, 966 bp, unidentified
  source 1..966: mol_type = unassigned DNA; note = Bacteriophage uvig_246969 from the Index of /pub/databases/metagenomics/genome_sets/gut_phage_database (ebi.ac.uk)
aagaaaaaacgcaaggtggagggagctgataagcgcaccgccgatggttccgagttcgaaagccccaagaagaagaggaaagtctagttctgcagagggtgatgccattcgacgaacttgtttattgcagcttataatggttacaaataaagcaatagcatcacaaatttcacaaataaagcatttttttcactgcattctagttgtggtttgtccaaactcatcaatgtatcttagtaccgcattcatttcagtgagagcttactcatcagagttcgttatcgacaaagtaattctaacagatgataaaatagaaatatcctataaatagcccttttacgggctatttattatttttctctattaattcatgttcagaaaatttaagtttccctgctttataatctgccatcttttgttccaaatacctaatattgttctccgaataaaaccggtctattgcaacatcaaaaggtatgcgtttttccctgcctactttttttgcaaaaatcgtaaaagccgccgtcatagtaagccccaattcagaacacgcctgttccatacactttttcacatctgacgtccgtatcagactaacgcttatccataccgaacaacagccaatcgtcgaaccacaagccgaaatggtgtggatacctacaaacggcggcacaaaataccacaataaatcttcttgcagtaatatggacaatccccagcaagtaacaaaagacgaggctgtcgcaatgggttttaccccatgcaaaagatgttattaatcattttaataaaatacaagcttaattaaaattaagctgcaacacaataatatttgacgggagatctataaaaagaattatgatagccatatattcaagacaatccatagataaaaaagacagtataagggaatcgtcgactgcacgatcaaacatcgatcgaagctaattgatggtctcaattcgg

SEQ ID NO: 2159 - DNA, 966 bp, unidentified
  source 1..966: mol_type = unassigned DNA; note = Bacteriophage uvig_187146 from the Index of /pub/databases/metagenomics/genome_sets/gut_phage_database (ebi.ac.uk)
aagaaaaaacgcaaggtggagggagctgataagcgcaccgccgatggttccgagttcgaaagccccaagaagaagaggaaagtctagttctgcagagggtgatgccattcgacgaacttgtttattgcagcttataatggttacaaataaagcaatagcatcacaaatttcacaaataaagcatttttttcactgcattctagttgtggtttgtccaaactcatcaatgtatcttagtaccgcattcatttcagtgagagcttactcatcagagttcgggaatacggcgaaaaccgtctccgcagattttgaaaaaaccggatttgtcgaacggagaatggaaacggcaagagacaggcgtctgcctatgcccggatcgattctcgccaaaaattacaacggaagaaaaatcgccgtcagggtattggaaaagggattcgagttcgacaacgaacattactcttcgttgtccggcattgcgcggaagattacgggaacgaactggaacggattcaaatttttcgaactatgaaaaatcaaatagtgcaaaagaaaataaggtgcgccatatacacgcggacgtccgtatcagactaacgcttatccatagacagacttggtcaaatttttgccgatttcgggcttctctggcggaatttgaacttcaaagagcaatatgatttagtggatttgctaatcgaaaaaattgtttacgacggcaccaaaggttcgattttcatcaaattttacgacgacggtttgaactgctttaaggaagacctcaaatgattatagaacggaaaatacacattcagaataaacggcacggtcggagaaaactttgtatcggagaatgtccggctcttccggaaataaaaccctgccccaaccgcaaacgtgaaatgatgggaatcgtcgactgcacgatcaaacatcgatcgaagctcactattaggtgcgattcgg

SEQ ID NO: 2160 - DNA, 966 bp, unidentified
  source 1..966: mol_type = unassigned DNA; note = Bacteriophage uvig_132785 from the Index of /pub/databases/metagenomics/genome_sets/gut_phage_database (ebi.ac.uk)
aagaaaaaacgcaaggtggagggagctgataagcgcaccgccgatggttccgagttcgaaagccccaagaagaagaggaaagtctagttctgcagagggtgatgccattcgacgaacttgtttattgcagcttataatggttacaaataaagcaatagcatcacaaatttcacaaataaagcatttttttcactgcattctagttgtggtttgtccaaactcatcaatgtatcttagtaccgcattcatttcagtgagagcttactcatcagagttcgataagattgttatagtcaatggagatattgaaatacagttaaagaatttttagcacttactatacgctgtgccaatggcattaagttagtgctaatgccgtgcttatcgtactttttacaattaaataaaatcaaactgtcgtttttgtgtcgttaaactgtcgtttttctgtcgctttaagcggctttttttatgtgaaaataaaattacaaaaaggagagtgattgaaatgtacgacgaagatttaagagagcgattactctcacgggaacaaatacaaaaattagacttagtaactcgacgtccgtatcagactaacgcttatccatatgatatgtgagcgtactgttaatagaaaagtaataaaaattaaaaacaagattggcaaattggagggtttaaatggtaaagataactgttgatggtaaagaagtaaaagcagaagatataaaactttctgctgatgttgtgaaagtcatatcatcatgccttgattgacattatagcaaaaagaggttagaatgtgtcgtaaagtacgataaacacggcacattctttttatataaagggggatttaagatggaatgtgttgcgtatataagagtatcaacagaaaaacaggttgaagaggaatcgtcgactgcacgatcaaacatcgatcgaagctggatcagtcgcaccattcgg

SEQ ID NO: 2161 - DNA, 966 bp, unidentified
  source 1..966: mol_type = unassigned DNA; note = Bacteriophage uvig_293930 from the Index of /pub/databases/metagenomics/genome_sets/gut_phage_database (ebi.ac.uk)
aagaaaaaacgcaaggtggagggagctgataagcgcaccgccgatggttccgagttcgaaagccccaagaagaagaggaaagtctagttctgcagagggtgatgccattcgacgaacttgtttattgcagcttataatggttacaaataaagcaatagcatcacaaatttcacaaataaagcatttttttcactgcattctagttgtggtttgtccaaactcatcaatgtatcttagtaccgcattcatttcagtgagagcttactcatcagagttcgatgtatttcttttttgtcataatagaaatggtattgtcttttatcggatttgcaaaaatgaagaaatattgaaaatggcattttaacaaaaaactgcccaggtgctgttaacacctaggcggcctgatttgataacctatcaatgcataatgtatgataagcatatctcgcacatatatattatcatacatccaccaatttgaatagggtgtattttataccttaaatttcttttatatgaggtgatcgtatgataataggaatttatccccgaaaatctgtatatcgggataacagtgagacgtccgtatcagactaacgcttatccataagctgtaaagaagtgcatctgcagcaatgatgggcttcacattattttttaatgtcgttctatattttattcgtatcggtgtgcctgtctgccccatcatgtcgtgccccaggtgttctctcttataaccatagctcctggccacaccgaaatcatcatagtcattatagggaaaacttttcgcaatcggactgaatcctttcagtccatacttctttgtccagtttaccatccccgggctctcctggtcattctgatcctctttacgtccctgctccgcctggctgtcccggttctgcggaatcgtcgactgcacgatcaaacatcgatcgaagctaggtctctacgtatattcgg

SEQ ID NO: 2162 - DNA, 966 bp, unidentified
  source 1..966: mol_type = unassigned DNA; note = Bacteriophage uvig_306774 from the Index of /pub/databases/metagenomics/genome_sets/gut_phage_database (ebi.ac.uk)
aagaaaaaacgcaaggtggagggagctgataagcgcaccgccgatggttccgagttcgaaagccccaagaagaagaggaaagtctagttctgcagagggtgatgccattcgacgaacttgtttattgcagcttataatggttacaaataaagcaatagcatcacaaatttcacaaataaagcatttttttcactgcattctagttgtggtttgtccaaactcatcaatgtatcttagtaccgcattcatttcagtgagagcttactcatcagagttcgtggcgtttggcctttttatcctgctctgtccctaccccagcaggcagggataggtcgttttgctcatctgttcacaaaaagtttacaatcaagttgcaacaaagggcgagggcgtcagcaatcagctggcgccctcaataaacaaaccggaggcagcaaaacgcctccgataggtattatagcacacgcggagatgtggcgcaagtgccacgtgtcaaaataccaatcgtcaatttttctgcgacgtttccggatattttttaatatttttatcgcatttttgtgacttttctcttgattgacgtccgtatcagactaacgcttatccatacgcctctacatcctccccgtgtacgggactggcaaactcctgattaccgctagcgcaaagactgaggcagatcgtgacctacaggcggattgtgacacaatcatcgacactcttgagatttgggattgatttaattgcaaaacctccccggcgcgtccaacaccggggaggttaaagggtagtacatttgtcaccagatactacccttttattttagcataaattttggcaaaatgaaaggaaaaaatcatggcgaagcgaaaaaagaagtccatagacagctcagttggcgtatgctaggaatcgtcgactgcacgatcaaacatcgatcgaagcttgagtgacggtagcgaatgg

SEQ ID NO: 2163 - DNA, 966 bp, unidentified
  source 1..966: mol_type = unassigned DNA; note = Bacteriophage uvig_368839 from the Index of /pub/databases/metagenomics/genome_sets/gut_phage_database (ebi.ac.uk)
aagaaaaaacgcaaggtggagggagctgataagcgcaccgccgatggttccgagttcgaaagccccaagaagaagaggaaagtctagttctgcagagggtgatgccattcgacgaacttgtttattgcagcttataatggttacaaataaagcaatagcatcacaaatttcacaaataaagcatttttttcactgcattctagttgtggtttgtccaaactcatcaatgtatcttagtaccgcattcatttcagtgagagcttactcatcagagttcggttttgtaaacctcctggaatccggagacttgcaggaaaagcggtactgtctaaccatactgattgacaaaatattgatagacgacgatgcaatcaatatcattttgcgaaaaatatgatttacaagtttacaaagcccatgcacatggtcagtgcctgttttccgcaggcggcacaccgtttgaagcaccggtccaggttaaatgcaactcttggaaggtaaccgaagtcttccagcagcgtaaacaacgggaaaaagattgccattggaggcagcataaccgatattacccatgccaggacgtccgtatcagactaacgcttatccatagtgatgattacgacgattttgatgattaatttgatggcttaaaatagataagtaatatgtatagaattaaaaaaaaccgcccggtgctaccaacaccgaacggctttgcatagattttctcttgccggacgcaccggaatgaataatctacctcaacaatagaattatatcatttccaacgcgtcctgacaaggggcgtattttttatacccatttttcgtatacatgtaaaaaacaggagatgatatcatgatgaaaggcgcctgctacgtccgcgtatccaccgaaaaccaattagaggaatcgtcgactgcacgatcaaacatcgatcgaagctgaagttctcaccatcaatgg

SEQ ID NO: 2164 - DNA, 966 bp, unidentified
  source 1..966: mol_type = unassigned DNA; note = Bacteriophage uvig_105444 from the Index of /pub/databases/metagenomics/genome_sets/gut_phage_database (ebi.ac.uk)
aagaaaaaacgcaaggtggagggagctgataagcgcaccgccgatggttccgagttcgaaagccccaagaagaagaggaaagtctagttctgcagagggtgatgccattcgacgaacttgtttattgcagcttataatggttacaaataaagcaatagcatcacaaatttcacaaataaagcatttttttcactgcattctagttgtggtttgtccaaactcatcaatgtatcttagtaccgcattcatttcagtgagagcttactcatcagagttcgaactgttatttccagaacgaatttaaccgataatgaagtggaaagtcaatataattcgggtgatatgatttttaatgtgacaagtacatttttgaatgaaaaaaacatagcagatttctacatcaatatggtcaaagagttactatatacgaattcctgcgtttgacattatttcttgctatggtatactcttgatatacagaaataatgtccgtatatagagcttgtgatacacaatggaggagaaaacatgttacaagtatcagaagactaccggattgctctctatttacggttgtcgacgtccgtatcagactaacgcttatccattttatgaactgtataagtgcagtacttattcaaattacggcaaaggggtttgaactattcattcaatatcgttatccatgctggagacagttgttcttcaaaatattcggtatcacgccaaattattggaaaaagatgagaaaaaagtaatatctgagatttataaactgcaaaatcaaagtaacgaggaaaccttgaaacaatatcgcacaaatatcaattccgaaaaagcaagattacaggaaattgatgcgttgtttccgaaattatttgaagaaaagcaaaaaggtaatatatctgggaatcgtcgactgcacgatcaaacatcgatcgaagctcgtggaagcaacatagatgg

SEQ ID NO: 2165 - DNA, 966 bp, unidentified
  source 1..966: mol_type = unassigned DNA; note = Bacteriophage uvig_381374 from the Index of /pub/databases/metagenomics/genome_sets/gut_phage_database (ebi.ac.uk)
aagaaaaaacgcaaggtggagggagctgataagcgcaccgccgatggttccgagttcgaaagccccaagaagaagaggaaagtctagttctgcagagggtgatgccattcgacgaacttgtttattgcagcttataatggttacaaataaagcaatagcatcacaaatttcacaaataaagcatttttttcactgcattctagttgtggtttgtccaaactcatcaatgtatcttagtaccgcattcatttcagtgagagcttactcatcagagttcgagtgactaacattggaggaatttgtgcagatggagtaacaaagaaaacaaatttccttatccttggtaatagcgattatctcgcatcttctgaaggtgaaaaaagctcaaagcagaagaaagccgaaaagctcaagttgtctggcattgatattgaaatcattcccgaaaatgtcttttatgatatgcttgaatcctacttcgatagtcaaaacaatcaataacaagaatgtttgagggctctgcacgctatggcaaagagaacatccgttgaaaactcaataatcaccggtgtaatatagacgtccgtatcagactaacgcttatccatggcggcctgcccgcaggcaggcgaatgtcccaacacctctgagagagacttgatctcaaacccaacttcgacggcgcgcgtcgcaaacgtatgccgcagcgtgtgaaaatgcactccctcaaggccgcatttgcgggtgtacttttccatcctgtattgcagggctcttggctccatgaagctgtccgtaccagtcaaaacataagcggctgaactatggggggccatcttcccacaaagctcagccgtgtagtctgttacagggattgtcctgacagaagtatcgctcttgggtgtgctggaatcgtcgactgcacgatcaaacatcgatcgaagctatccagcgctctcagtatgg

SEQ ID NO: 2166 - DNA, 966 bp, unidentified
  source 1..966: mol_type = unassigned DNA; note = Bacteriophage uvig_330914 from the Index of /pub/databases/metagenomics/genome_sets/gut_phage_database (ebi.ac.uk)
aagaaaaaacgcaaggtggagggagctgataagcgcaccgccgatggttccgagttcgaaagccccaagaagaagaggaaagtctagttctgcagagggtgatgccattcgacgaacttgtttattgcagcttataatggttacaaataaagcaatagcatcacaaatttcacaaataaagcatttttttcactgcattctagttgtggtttgtccaaactcatcaatgtatcttagtaccgcattcatttcagtgagagcttactcatcagagttcgcatttggattagtatttagacctactattaaagagataattaatgaaaaataagtaagtaaataataagcaggataaagagaatgatagcactaccctaatttattctatataaataaaggatttatagtgctatcatttcttattttgcacttgcaaaattgagttaaaaatatggaagaattctaccatacttttgattttatccttttgattaaagtatttgcaaggttatattttgcttccaacagttggatatacattagaaaacgttggatgaatcttggatgttttaagttgggacgtccgtatcagactaacgcttatccattaggctatttagagcctcatagagcaattattaataataagacatatcttttatttaacggacacgaatttgcttactacagagatttaaataccaaaattaaactatctgatttaaaagatttcattaaaaaactaaaataatgacaaaatctgtgctataatggttatagaaaatattaaacctattgggtgaagtagtatttatagcctaaatattgcttcacctttttttgttaaggaggattaaaatgtgtgaagaagaaataaagaatgctggtatttacattagggttagtacggaatcgtcgactgcacgatcaaacatcgatcgaagctggatcagcgaataactatgg

SEQ ID NO: 2167 - DNA, 966 bp, unidentified
  source 1..966: mol_type = unassigned DNA; note = Bacteriophage uvig_394534 from the Index of /pub/databases/metagenomics/genome_sets/gut_phage_database (ebi.ac.uk)
aagaaaaaacgcaaggtggagggagctgataagcgcaccgccgatggttccgagttcgaaagccccaagaagaagaggaaagtctagttctgcagagggtgatgccattcgacgaacttgtttattgcagcttataatggttacaaataaagcaatagcatcacaaatttcacaaataaagcatttttttcactgcattctagttgtggtttgtccaaactcatcaatgtatcttagtaccgcattcatttcagtgagagcttactcatcagagttcgaagaattctacaaatagaaaaagaacatcctaaccgaaaaaaaattaacagtgttctttggccaattgttattatcttaatcatattagctttatatttatggttattttaaaataaaaaatcccccgactgctccaacagccgagggaaaattgaatagaatacctgaagtaggtatacactcaatccgcaaattgattataccacgcttcaggttagctttgctatacccaaaggagcgtgtttttttatgcctaaagtaaaagtaggtatttatatccgggtatctacacaagagcagacgtccgtatcagactaacgcttatccataaatcatagtacatgaagagctgaacagctttgaaattatttggaatttttaatctataactctgacaagttttgaaatcacttccacgtgcgcggtcatcgggaacatatctaccggctgcacggtttctacttcatagccgagcccacgaagcacaacaatatcgcgcgccatagacgccggattacaagacacatacaccatatgttttggtttcattgaggccgccgcttttagcacttcttctttacagcctgcacgaatcggatcgaaaacgaccacatcggctttcacgccgcggaatcgtcgactgcacgatcaaacatcgatcgaagctgtggcaaccggaatctatgg

SEQ ID NO: 2168 - DNA, 966 bp, unidentified
  source 1..966: mol_type = unassigned DNA; note = Bacteriophage uvig_582769 from the Index of /pub/databases/metagenomics/genome_sets/gut_phage_database (ebi.ac.uk)
aagaaaaaacgcaaggtggagggagctgataagcgcaccgccgatggttccgagttcgaaagccccaagaagaagaggaaagtctagttctgcagagggtgatgccattcgacgaacttgtttattgcagcttataatggttacaaataaagcaatagcatcacaaatttcacaaataaagcatttttttcactgcattctagttgtggtttgtccaaactcatcaatgtatcttagtaccgcattcatttcagtgagagcttactcatcagagttcgtatatggggtgtaacacattgttacacttgtgattgtgtacccatagcaggtagttcccccaccatacggggagtaacgacgctacgggtatttttttatttagggggaaaatgaaatgccagaaaagcactatgatttacttcaaattgtttgaacatatcgacggtgtaagatcgcagaaattaaaaaaagcagaataaaagcccgtccagcaaaagccgggcgggttttgttaaaacgggtgataaaatgaatcgtgttgcgatatatgtcagagtgtctacaaacgaacaggcggcgacgtccgtatcagactaacgcttatccatctaagatcacgatagacggcgatgacatcgcaataacttggacttttacctgaatttttggcaggggtgaacccatgtcctcaatttgggtaaaaaataaattgcgacaggggtattttcatgagcaaaattctttcagaaattgaactactttgcgataaggcggacggccttgccggtcttatctcgaccgtaaccgcggcagccagtaccacaggaatcgaccaccacgcgctcacaggtctttcatattccgcgcagaaccttgcacgtgatttggaagaactacgggcggatataggaatcgtcgactgcacgatcaaacatcgatcgaagctctgacaagatacggttatgg

SEQ ID NO: 2169 - DNA, 966 bp, unidentified
  source 1..966: mol_type = unassigned DNA; note = Bacteriophage uvig_578663 from the Index of /pub/databases/metagenomics/genome_sets/gut_phage_database (ebi.ac.uk)
aagaaaaaacgcaaggtggagggagctgataagcgcaccgccgatggttccgagttcgaaagccccaagaagaagaggaaagtctagttctgcagagggtgatgccattcgacgaacttgtttattgcagcttataatggttacaaataaagcaatagcatcacaaatttcacaaataaagcatttttttcactgcattctagttgtggtttgtccaaactcatcaatgtatcttagtaccgcattcatttcagtgagagcttactcatcagagttcgcttagaaaagaatttttcagacttccactagataaaattgaacatgaagttaagaaaaatcataatgcagtagttagatttaccaagttagcaaaagcagaagaatataggcaaactttaaaattagaacaatctgaagaagtagaatctgcataaaagctcatattttatgggcttttattttataccttattttgcatatttaccttttaagttaataaatataaaattgtatatgaggtgattacttatgaaagcagcaatatatagcagaaaatcaatgtttacaggtaaaggtgagacgtccgtatcagactaacgcttatccatacggagaaacaaagaaaataggcattgatttatggggatctaaaaaaaaatagacccctgtatggaatatgataccaaaacatcgcaattatataaagcatgtacatgcatgattgatataattgcgataatccctccaaatattaactttaccttagataaattatacactatatctgaaaatgatactataggagaacgtataagaaaattaaggaaactgaaaaatataactgctaaagagttaggaaaaaaaataggaataacatcttctggagttatagcttatgaaaatgataaggaatcgtcgactgcacgatcaaacatcgatcgaagctgtactcgtgcgctgttatgg

SEQ ID NO: 2170 - DNA, 966 bp, unidentified
  source 1..966: mol_type = unassigned DNA; note = Bacteriophage uvig_103894 from the Index of /pub/databases/metagenomics/genome_sets/gut_phage_database (ebi.ac.uk)
aagaaaaaacgcaaggtggagggagctgataagcgcaccgccgatggttccgagttcgaaagccccaagaagaagaggaaagtctagttctgcagagggtgatgccattcgacgaacttgtttattgcagcttataatggttacaaataaagcaatagcatcacaaatttcacaaataaagcatttttttcactgcattctagttgtggtttgtccaaactcatcaatgtatcttagtaccgcattcatttcagtgagagcttactcatcagagttcgcctaatgcggacaaaaattcaatagtggacttcatggagtatttggctagtcgtaaaatacctaaccgaaatgatgatccaataagagaacagttactcaacgaaatgatatcttttttgaattcacttaccacagaaaaattaagctcgctaatctggatttttagaggtatggaattttctttacaaacagatccaaacaaacaagaagaattgatacagaaaatggtaaataacagatattgagagcatgaaacagagcaaagcgaaaatttcggtagacattcgttttgctcttctgacgtccgtatcagactaacgcttatccataatacaggggcagtaagtatccaagagacgttattatcgtagctgcaaaataatgatgtgtctattgtgtacgtcggcacattagttccctgggcattaattccagctgcagcgatttgtaatgtcagtccatttgagttagcacgtcgaaacttcatcccagttgtcattggtctagttgtcacgacgatagttgcgatgtttattttataaaaagtaaaacgcttggaagattaactctccaagcgttttttgtatatactgtgaattccatgctacttcaattgataaggaacttaaggaatcgtcgactgcacgatcaaacatcgatcgaagcttagtactccttctgaggtgg

SEQ ID NO: 2171 - DNA, 966 bp, unidentified
  source 1..966: mol_type = unassigned DNA; note = Bacteriophage uvig_263922 from the Index of /pub/databases/metagenomics/genome_sets/gut_phage_database (ebi.ac.uk)
aagaaaaaacgcaaggtggagggagctgataagcgcaccgccgatggttccgagttcgaaagccccaagaagaagaggaaagtctagttctgcagagggtgatgccattcgacgaacttgtttattgcagcttataatggttacaaataaagcaatagcatcacaaatttcacaaataaagcatttttttcactgcattctagttgtggtttgtccaaactcatcaatgtatcttagtaccgcattcatttcagtgagagcttactcatcagagttcgtagataagattttagtcaagaaaggttttattaaaatcctatggaaaatttagtctttctttaaaggtatttagatacaggcattgttacacgtgtaacagagataataacaaaaaaagctcaagtcaaaaactaactcgagcttgggttggttaaaatggtaattcttcctcttccaaaactaaatcagcgaggtcgtttgccacattattttctcgcatagcacgttgggcacggctttctaaaagttggaaagaatggcaaagcacttctgtcacataattcgtgtgaccatcttttgacgtccgtatcagactaacgcttatccatatggcatgtccaaagaggaaattaaagaaacgctacttagtaccgatgatggtggaggatttacaaaatcagaagttaagtatgctatgaaacatttagaggacgaagattaaaataaaaaagctcacgctctcaaagtttggcgactcagagcatgagcaaggaagtatacaagaaaaagcaggcattaaaaagccctttttcttgtacctattttatcattttttaataaattttgaaagagggtacaatgatgaatacaatcaacaaagttgctatttatgttcgtgtatcaacgaaggaatcgtcgactgcacgatcaaacatcgatcgaagctggtaattattatgctggtgg

SEQ ID NO: 2172 - DNA, 966 bp, unidentified
  source 1..966: mol_type = unassigned DNA; note = Bacteriophage uvig_156514 from the Index of /pub/databases/metagenomics/genome_sets/gut_phage_database (ebi.ac.uk)
aagaaaaaacgcaaggtggagggagctgataagcgcaccgccgatggttccgagttcgaaagccccaagaagaagaggaaagtctagttctgcagagggtgatgccattcgacgaacttgtttattgcagcttataatggttacaaataaagcaatagcatcacaaatttcacaaataaagcatttttttcactgcattctagttgtggtttgtccaaactcatcaatgtatcttagtaccgcattcatttcagtgagagcttactcatcagagttcgggcgtgcatcgatatgcctggcttcattccacgacggtgtgattcggagttaagtccgaatatttcaccaaattgaacaagacgaacacgtttttatgtgtttgtcttatttttttgtcttttgcaaggacattccaaactattgataactacttttagttatgatataatactatcggaagttctaagtgtttatattgataatgagtatttatgaaaacaaaaaagattgctttatcgacagaaaaaatgaacgggcgattttttacgccggcgtttatcgtgaacaatatccttgatgacgtccgtatcagactaacgcttatccatactaaaactattatcatatcttgtgcttggggcggaattctcataaaaagctcagtggcttcgattaaccttttgtttttttgttcatctgtcgttttgttcggatatgcagtttttgcttctttcatattgccttgttcctttcgtcagaatttctaatttcgctacaaccattataatacaattaaatagaactacttcaattttgttattttataacaaatatatgaataagcaaggaggcgagctcatggcacgcaaacgaataaacacaccagaagcgacaggtgtcatatacgcggaatcgtcgactgcacgatcaaacatcgatcgaagctcaggatgaagcctcacgtgg

SEQ ID NO: 2173 - DNA, 966 bp, unidentified
  source 1..966: mol_type = unassigned DNA; note = Bacteriophage uvig_454524 from the Index of /pub/databases/metagenomics/genome_sets/gut_phage_database (ebi.ac.uk)
aagaaaaaacgcaaggtggagggagctgataagcgcaccgccgatggttccgagttcgaaagccccaagaagaagaggaaagtctagttctgcagagggtgatgccattcgacgaacttgtttattgcagcttataatggttacaaataaagcaatagcatcacaaatttcacaaataaagcatttttttcactgcattctagttgtggtttgtccaaactcatcaatgtatcttagtaccgcattcatttcagtgagagcttactcatcagagttcgcgagttttcggtagacgatccaaacgaacctcctatgaccgaagaagaaaaggccaacgtagccttaattcttcaacaacacttaccgaaagagtaaaaacaactgtttctaaaatagatatagttgcaaacaaaaaagcctcacgctctcaaactttggcgagtctgagcgtgaggcagcagtatagtaataggcattaaatggcccgttttactatacccattttatcaaaaagggggtataaaagcaatgaaaacaacgaataaagtagctatatatgtcagggtttcaacctcttagacgtccgtatcagactaacgcttatccattaaatgaaattgttgtcacaaaagaagaaatgacgataacgctagacttctaagggtttagcgttatttttgtattttggtcaaagcgataatgattagttagagcaaaatacacaaaaaattattttcacagtcatgcactttccctttccatctcatacatccgcaccgagtgcagcacgagttcccgatacttccaagttgataccagatactcaatgacttcctggtcctctatcttacattccatcaagagtaacaacttgaccgtgtattcatttttcaaaatcggcacctggtggaatcgtcgactgcacgatcaaacatcgatcgaagctaacagtgcctcataccgtgg

SEQ ID NO: 2174 - DNA, 966 bp, unidentified
  source 1..966: mol_type = unassigned DNA; note = Bacteriophage uvig_204816 from the Index of /pub/databases/metagenomics/genome_sets/gut_phage_database (ebi.ac.uk)
aagaaaaaacgcaaggtggagggagctgataagcgcaccgccgatggttccgagttcgaaagccccaagaagaagaggaaagtctagttctgcagagggtgatgccattcgacgaacttgtttattgcagcttataatggttacaaataaagcaatagcatcacaaatttcacaaataaagcatttttttcactgcattctagttgtggtttgtccaaactcatcaatgtatcttagtaccgcattcatttcagtgagagcttactcatcagagttcgtagataaaatagttataaccgataaaaatatagatatacactacaagatttagtgtatgtctttttgaatttaatgtatcattattaaaaactaatatttttataatatgtttccattctatctgtatcattattaaaatcaaaatggcatactatttgttgtaataattaaaacattcaatcatgccttttctatatacttttaagaatgtttttgaaaacattcttactaaaattttttctttaaaacttaatccatttaatgcactatttaacacaatatcttttgttaataataacgacgtccgtatcagactaacgcttatccatggtgacatagtaatagttcatgaccaagatgatgttgaaagtggacaaacagctgtaattcttataaacggtgatgaagctacagtaaaaaaagttataaaaacaaatgaaggaatagaattacatgcaatgaatccatattaccctataaaaaaattcacctatgatgaaatgaactctgtaccagtaaaaataataggtagagtaaaagaagcaaaaataaagggtatttttgaatagaggtgttagtatgatagcaatatatgcaagacaatctatagaaaaaaaagatagcgttagggaatcgtcgactgcacgatcaaacatcgatcgaagctcgagccgacttatatcgtgg

SEQ ID NO: 2175 - DNA, 966 bp, unidentified
  source 1..966: mol_type = unassigned DNA; note = Bacteriophage uvig_396721 from the Index of /pub/databases/metagenomics/genome_sets/gut_phage_database (ebi.ac.uk)
aagaaaaaacgcaaggtggagggagctgataagcgcaccgccgatggttccgagttcgaaagccccaagaagaagaggaaagtctagttctgcagagggtgatgccattcgacgaacttgtttattgcagcttataatggttacaaataaagcaatagcatcacaaatttcacaaataaagcatttttttcactgcattctagttgtggtttgtccaaactcatcaatgtatcttagtaccgcattcatttcagtgagagcttactcatcagagttcgaattgattactagtatagaaatatccgataatgataaaactcttatattttagggccttttaggctcttttttactgttattttagatgtatagcacaccctgaccaacctcccccaacaactactaccttcatattaatctcctcccctcaaaaatacctcttggactagcttgtactttacaaaatctctttactctatgacctgaaaatctagctgtacaacttccacatacaccttctccacagcacatcttaaaattgttgcaacatgataaatctatatcctttctatccaaaggacgtccgtatcagactaacgcttatccatgatcaaatgttaagatattaagtaaattagctcaattatcaggtaaaagtctcgagtactttatagatgatataaatagtattaaaattgaacaataccaagtattagatagttctatagaaatgttttatgaaaaaggttatatacatgaagatggaacagttgatagttctatagaaagtatcttattagaaatattaagaaaagaaattaaagttaaaatcgaaagaatgaaggaagtgaataaataatgaaaatcgctatttattctagaaaatctaaagaaacagatacaggtgaggaatcgtcgactgcacgatcaaacatcgatcgaagcttggtagatgcatctatgtgg

SEQ ID NO: 2176 - DNA, 966 bp, unidentified
  source 1..966: mol_type = unassigned DNA; note = Bacteriophage uvig_593897 from the Index of /pub/databases/metagenomics/genome_sets/gut_phage_database (ebi.ac.uk)
aagaaaaaacgcaaggtggagggagctgataagcgcaccgccgatggttccgagttcgaaagccccaagaagaagaggaaagtctagttctgcagagggtgatgccattcgacgaacttgtttattgcagcttataatggttacaaataaagcaatagcatcacaaatttcacaaataaagcatttttttcactgcattctagttgtggtttgtccaaactcatcaatgtatcttagtaccgcattcatttcagtgagagcttactcatcagagttcgcatctctcaacaatttataaggataatccttttggtatgggatctgcccaaaacgcaaataaattgaaaatgaagtctgtagcacagagtattgataatgacataaacaaataaaaaaatccctctgttccgctaagacagagggcgatagatacagcggtctaacgctataccttacttcgcaaataaagtatatcataagaccgccttatttgctatacattttttccaaataggaggtctttttttaatgcgagtaggattatatacaagggtatctacacaggaacaggctcaggagacgtccgtatcagactaacgcttatccatatagaatcaccgtatacgatgaccgagttgaaataaaatggtcgtttagctgatcattccggcatcaaatttctttcgtgcctcttcttccaacgtcttttttcgctctatatcacgcttataacaaaggtctttgaccttagtaaatgacttttgttattttaatcaaaaatcaaactgcttttgtaaaaaaagaaggggtacagcctcagccgtacccctacaaatcaataattcttaataatcatcttcaagccataaatcttgcccagataaccaaggtacgcaccatatcctccgggaatcgtcgactgcacgatcaaacatcgatcgaagctccatcataagtgtcgactgg

SEQ ID NO: 2177 - DNA, 966 bp, unidentified
  source 1..966: mol_type = unassigned DNA; note = Bacteriophage uvig_440207 from the Index of /pub/databases/metagenomics/genome_sets/gut_phage_database (ebi.ac.uk)
aagaaaaaacgcaaggtggagggagctgataagcgcaccgccgatggttccgagttcgaaagccccaagaagaagaggaaagtctagttctgcagagggtgatgccattcgacgaacttgtttattgcagcttataatggttacaaataaagcaatagcatcacaaatttcacaaataaagcatttttttcactgcattctagttgtggtttgtccaaactcatcaatgtatcttagtaccgcattcatttcagtgagagcttactcatcagagttcgtagcttttaacctctggttcatagattttagaagcgattgggatggacctgaaatgacaatatcgtaaaaataaaagcccctgtgcgggaacacagagacttttacataattcttacccttccaggctttcagtaccaggaatgatagaacgtggaaatatgcactgctattatatcatttcttggacgcgctggcaaggggcgtattttttgtacccaaaaatcatactttatctaagaggtgatattaatgatcaaaggtgcttgctatgtccgcgtttccaccgataaccagttggagacgtccgtatcagactaacgcttatccatctttcatgtccatcattaaaaccggaaccttggaggagaagcgcgcctgtctgaccctcctgattgatcggattgtcatagatgatgataatgtcaacatcattctccacaagatatagtatgcagatattcaaagtccatgtgcatgggcttcggctgcaacgcggcgggcatcgtgggctgccggatcatcgactcgcccagggaacggctgatcgccatggtcaccaacaactttgtgccctgcaacggccggttccccaccctgatcgccattatctccatgtttttcgtgggcgtggaatcgtcgactgcacgatcaaacatcgatcgaagctaacggatggccagtgactgg

SEQ ID NO: 2178 - DNA, 966 bp, unidentified
  source 1..966: mol_type = unassigned DNA; note = Bacteriophage uvig_578394 from the Index of /pub/databases/metagenomics/genome_sets/gut_phage_database (ebi.ac.uk)
aagaaaaaacgcaaggtggagggagctgataagcgcaccgccgatggttccgagttcgaaagccccaagaagaagaggaaagtctagttctgcagagggtgatgccattcgacgaacttgtttattgcagcttataatggttacaaataaagcaatagcatcacaaatttcacaaataaagcatttttttcactgcattctagttgtggtttgtccaaactcatcaatgtatcttagtaccgcattcatttcagtgagagcttactcatcagagttcgggatgtattcagaaacatatagcaacctaaatttaaaaagtaagcagtatctagttgttgaaggaacaattaatgttcaattcaagagtaaataaaaaaaccgccccacacaaaatgagacggttctgacaatagaataacaaggagttatactatcgccctcgacaagcatattatagcaccttttatataaattaacaataattatattgggtgtattttttatacccttttttaaggagtgcatgtaatgaataataatttagtacctctctctaattcagcaataaatgaattagtgacgtccgtatcagactaacgcttatccattagtaatgctgaatgatgagataactattcactggtcattctgtcagaactaattctacaactgtttcaacgtgagaagtcgcaggaaacatgtctacgcaacaaactctttttactttgtatcctctctcttgcaggataatgaggtcacgtgcaagtgaagttggcttgcaggagacatagattaactttgttgccctaatagaatcactgattttatccaatgccttaggatgaataccatctcttggcggatcaagaacaatcaaatcaggcttctcttcaatactatcaattgccggaatcgtcgactgcacgatcaaacatcgatcgaagctggctgagattccaatactgg

SEQ ID NO: 2179 - DNA, 966 bp, unidentified
  source 1..966: mol_type = unassigned DNA; note = Bacteriophage uvig_370045 from the Index of /pub/databases/metagenomics/genome_sets/gut_phage_database (ebi.ac.uk)
aagaaaaaacgcaaggtggagggagctgataagcgcaccgccgatggttccgagttcgaaagccccaagaagaagaggaaagtctagttctgcagagggtgatgccattcgacgaacttgtttattgcagcttataatggttacaaataaagcaatagcatcacaaatttcacaaataaagcatttttttcactgcattctagttgtggtttgtccaaactcatcaatgtatcttagtaccgcattcatttcagtgagagcttactcatcagagttcgtcgatcacatcaacgtaagtaatactgatttggatatttactggcaaatctaatggccgctttcaaaggcggcttttttcttgcccaaaacaaaaagatttagagagtgccatttccaccagggtaaagcccttggccacccgttttttcaatttctttaacattattccaccacctgtaatgattgatagattggcatcaggatacttaaatacatcaccacaaccacagcagctatcatcaccagaatcagcggctgggttaactccaacaattgcgacgaccgtgacgacaagcgctgacgtccgtatcagactaacgcttatccatcgttgccatatcaccaggattcaattttctccacttgtggagaatcatcagaacgcaattttgcgttttggctcatatcagacgggctcaattttgagccggttaaaagttggccacaattagacaacgcataatccaattttggattttgataaaagaattgagccgaatccaattttggattgggctccatatcacgagagcgcaaaattgcgctctcctccaaatcgttgatatgtcggaggtatttatgaagatagcagtttacgttcgcgtcagcactctagagcaagcggaaagggaatcgtcgactgcacgatcaaacatcgatcgaagctggtcaactatgtaacgctgg

SEQ ID NO: 2180 - DNA, 966 bp, unidentified
  source 1..966: mol_type = unassigned DNA; note = Bacteriophage uvig_93245 from the Index of /pub/databases/metagenomics/genome_sets/gut_phage_database (ebi.ac.uk)
aagaaaaaacgcaaggtggagggagctgataagcgcaccgccgatggttccgagttcgaaagccccaagaagaagaggaaagtctagttctgcagagggtgatgccattcgacgaacttgtttattgcagcttataatggttacaaataaagcaatagcatcacaaatttcacaaataaagcatttttttcactgcattctagttgtggtttgtccaaactcatcaatgtatcttagtaccgcattcatttcagtgagagcttactcatcagagttcgatttttctaaatgatgatgtttttaaagatgaaagtaattttattatcagattaaaaataggctattacaagtaaaaaccgcccggtgcttccaacaccgaacagccaaacatatacccgaagatatacactatactaacaaaaatattgtatcatcttcggagcagccttgcaagcggaacaccagttcctcgctggctgttatttttatacccatttttacgtatagaattaagaaggagatggtacaatgaacaaagttatccgctgtgcctgctacgtccgggtttccacagacaagacgtccgtatcagactaacgcttatccatttcttgacaatggtcctctgcctgagaaaagagcctgtttaacacaattaattgaacggattaccatcacggatgaagatatcgaaattactttaaaataaattgcagatttacaaatcccatgcacatgggctttgtaaatttgtaatagaaaattaccccggagttttgacgccccggggccttgatgatgctgttatgataatcccagcaacttgctccaagtctttggtccaacgatgccatccacaacaagccccatcgcccgctgaaatgccataattgccgcttttgtctttaggaatcgtcgactgcacgatcaaacatcgatcgaagctagcactaaccataagcctgg

SEQ ID NO: 2181 - DNA, 966 bp, unidentified
  source 1..966: mol_type = unassigned DNA; note = Bacteriophage uvig_151615 from the Index of /pub/databases/metagenomics/genome_sets/gut_phage_database (ebi.ac.uk)
aagaaaaaacgcaaggtggagggagctgataagcgcaccgccgatggttccgagttcgaaagccccaagaagaagaggaaagtctagttctgcagagggtgatgccattcgacgaacttgtttattgcagcttataatggttacaaataaagcaatagcatcacaaatttcacaaataaagcatttttttcactgcattctagttgtggtttgtccaaactcatcaatgtatcttagtaccgcattcatttcagtgagagcttactcatcagagttcgagaacccgtaggtatgtatacgaacatatattgattatggaaaaaagtattggacgttttcttaaacctaatgaagtagttcaccatatcaatggcaacaaacaagataatcgcattgaaaatttgagactttttacaaatagcgaacatgttgctttccatgcaatgcagaaaaggcaggtgatgcataatgacgagtataaacaaaacaattagagctgcaatttatactcgtgtttaggtaagcacgatggagcaggtgactgccggatactctctcgaggcgcaacaggaaaaactgacgtccgtatcagactaacgcttatccatgccaaatctcaatcgatggcgaacgaattgtagtaaaatggcgcgtaaaataaagaaaaaagcccgaaacatcggattttccgacgttttgggcttatattttatatgccttaatgaagtaacgctgtaaatattaacctcaaaaggcatacacggaaagcccaatccgtatatgccttttttgtttttattataactgaaaagtatttgtttgtcaatattcccccgaaagatttttacatcatatccgggtcggggtcgcgctcaatttcctccggcatctcgatgaaccacttctgtggaatcgtcgactgcacgatcaaacatcgatcgaagctattagcctacaacttcctgg

SEQ ID NO: 2182 - DNA, 966 bp, unidentified
  source 1..966: mol_type = unassigned DNA; note = Bacteriophage uvig_327878 from the Index of /pub/databases/metagenomics/genome_sets/gut_phage_database (ebi.ac.uk)
aagaaaaaacgcaaggtggagggagctgataagcgcaccgccgatggttccgagttcgaaagccccaagaagaagaggaaagtctagttctgcagagggtgatgccattcgacgaacttgtttattgcagcttataatggttacaaataaagcaatagcatcacaaatttcacaaataaagcatttttttcactgcattctagttgtggtttgtccaaactcatcaatgtatcttagtaccgcattcatttcagtgagagcttactcatcagagttcgtagaaaaggtctatgtttataaggaccgtatacatattaaatgggcgtactaatacgcccatttttttgtgtatcttgtttctaatagttctacatcccactgtatagcatagtatccacacgcctttgctgcatctagtacagtatcattgtactctccaaaaggtggtctatacaggttggcatctatacctaacaagtttttaatcttctcgtgacacccctgtatattctccttattctcctctagggataattttgaaccatgaggatgcgtgttgctgtggtttccaatgtcgtgacgtccgtatcagactaacgcttatccataaagacaagtatatagacaatttaatgagtacataaaaaggcattagatagtaccagtatctaatgcctatgtggaagattttataaaaaaaagccccctgctaccaacaggaggcaaaaactaacctatcaaggtagatgccttgatatagtatagcctagacaactgtattatatcacacaaaacacctgccttgcaaggtgttatttttatacccaaaaacatattttttataaggagtgatataatatgatagctatatatacaaggcaatctatagataaaaaagattccatttcggaatcgtcgactgcacgatcaaacatcgatcgaagctgactaacgatccgtgtctgg

SEQ ID NO: 2183 - DNA, 966 bp, unidentified
  source 1..966: mol_type = unassigned DNA; note = Bacteriophage uvig_176611 from the Index of /pub/databases/metagenomics/genome_sets/gut_phage_database (ebi.ac.uk)
aagaaaaaacgcaaggtggagggagctgataagcgcaccgccgatggttccgagttcgaaagccccaagaagaagaggaaagtctagttctgcagagggtgatgccattcgacgaacttgtttattgcagcttataatggttacaaataaagcaatagcatcacaaatttcacaaataaagcatttttttcactgcattctagttgtggtttgtccaaactcatcaatgtatcttagtaccgcattcatttcagtgagagcttactcatcagagttcggcaatggagaaaaaaagggcaatacgcgctgagaccgaaccgatcaaggctaccattatcgagaaaaggcgcaaagccatgtccaccacggcgctttttgaaacggaagacggcaataggatactgctggaaataccaagagcggcggcggagtatatgaccgttggcgacgttgggatgctggattattacaaaaaaatattcagatcgtttgtcaggttgagggattaagggcgtgaaggagcctgccatgcaaaagagaagaacgaaatacgcaagcagccaaggggataacgccgtgacgtccgtatcagactaacgcttatccataaaacaatataatccgaaccttgtgccgattggtcatgggttcggatttattgagttgcgaatgtctcgagcagttcgagccaccttttgcgcctcttgtcgtcttcctgcttgtctatggtctttttcagctcataattgaagttggcggtgccaacgtgttcgagcaccttgtttcgggttttgatgtcatcaatgccatcgagggcggcaaagtccatgagcgtggctccgcgctccgatgcggcggcgaatttttctttatccaactccagaagttttagcctgcggcgaaccgtgggaatcgtcgactgcacgatcaaacatcgatcgaagctagaatatacacagactctgg

SEQ ID NO: 2184 - DNA, 966 bp, unidentified
  source 1..966: mol_type = unassigned DNA; note = Bacteriophage uvig_154256 from the Index of /pub/databases/metagenomics/genome_sets/gut_phage_database (ebi.ac.uk)
aagaaaaaacgcaaggtggagggagctgataagcgcaccgccgatggttccgagttcgaaagccccaagaagaagaggaaagtctagttctgcagagggtgatgccattcgacgaacttgtttattgcagcttataatggttacaaataaagcaatagcatcacaaatttcacaaataaagcatttttttcactgcattctagttgtggtttgtccaaactcatcaatgtatcttagtaccgcattcatttcagtgagagcttactcatcagagttcgccccactatcagaagtaaaaatggaaacaaacgaacgtgttgtactgattgatgtctatatgccatcaatccgacaggcacaggttaatcgctctgtaaaccgcactgtcacacttcctgcatggctaaacgctgcagctattgagcgaaatatcaatttctctcaggtactgcaagatgctcttaaaactcaatttcacctttctcaaaaagaagcttagtctttacaatgcaggagggttatcatgccatgttgacagtgttcctgtctaatggaaaaggaggctctatgattgctatgacgtccgtatcagactaacgcttatccatacaatattgtttttaatgcagatggcgaagtcactatttcatttgccatttaattcttttctttttactttctgcacttctttattattcaagtgatgacagcttagattggaaagactacggtgttcaatctatcattgatagaactgcattaaatcctgagctttcaaacggatctatcattttgatgcataatggtgccaaatatacaaaagatgcacttgaaactgttatttcaacacttcagtcaaagggttatgaatttgtaacgctgtctgagcttgtttataaagatcatttggaatcgtcgactgcacgatcaaacatcgatcgaagcttctgtggtgacgttctctgg

SEQ ID NO: 2185 - DNA, 966 bp, unidentified
  source 1..966: mol_type = unassigned DNA; note = Bacteriophage uvig_596302 from the Index of /pub/databases/metagenomics/genome_sets/gut_phage_database (ebi.ac.uk)
aagaaaaaacgcaaggtggagggagctgataagcgcaccgccgatggttccgagttcgaaagccccaagaagaagaggaaagtctagttctgcagagggtgatgccattcgacgaacttgtttattgcagcttataatggttacaaataaagcaatagcatcacaaatttcacaaataaagcatttttttcactgcattctagttgtggtttgtccaaactcatcaatgtatcttagtaccgcattcatttcagtgagagcttactcatcagagttcgtgcattatatcgacataaaacagtgttcgactattgcgtgttatggtggagctgatggtggagctgtacccctaccagtcgaacatcgctccaaggttgtacctataacctttgcggttatttcagaaaattcctttatagtaacattcgaggtgtcggcgtagaaatcaagggtggttcgcgaaattttcccgatagattttagcatagagaacaagccatacagtcatgcccgtaccctgcaccaaggtgtaaggtacgggcattttgttggaataactctccaactaggattgttaggacgtccgtatcagactaacgcttatccatcggtcctcaataccttagagcatgaataccaggctatgcacggggatgggtcagctgatcctgttcccaacaatgcataaataacaattctaataaaataaaaaacgccctgcggcggcaaccgcaaggcgtttcctagatcaagtctgtcccagagatagtgaaacaaaaccagacccaacaactgttattgtaccatctccggggcaggcttgcaagcctatacccatttttcggaggtggattttttatgcctaaatataacccggaagaattgcttcccgccgtcgcctactaccgggaatcgtcgactgcacgatcaaacatcgatcgaagctcattgtcatctcaggattgg

SEQ ID NO: 2186 - DNA, 966 bp, unidentified
  source 1..966: mol_type = unassigned DNA; note = Bacteriophage uvig_118876 from the Index of /pub/databases/metagenomics/genome_sets/gut_phage_database (ebi.ac.uk)
aagaaaaaacgcaaggtggagggagctgataagcgcaccgccgatggttccgagttcgaaagccccaagaagaagaggaaagtctagttctgcagagggtgatgccattcgacgaacttgtttattgcagcttataatggttacaaataaagcaatagcatcacaaatttcacaaataaagcatttttttcactgcattctagttgtggtttgtccaaactcatcaatgtatcttagtaccgcattcatttcagtgagagcttactcatcagagttcgtcgatagaattacagttacaggtgatgatgtaagaatagattggactttttaaaaattattaccaattagttgcaatgatggtgataactgtcccaccagccaataataacccttttaaactgttctccattcctctcttactacaacatcttttcccctaacgttatgttcaaaaatgttgcttttcctcccttcttgttttctttatttttctttatcatttattaactgcaggatttaaaagaatagttttcctttccattccttttaaaccctgcaattgcatcgttttttaatttgacgtccgtatcagactaacgcttatccatattttgttggaagatttaaaaacaatatgaattttaaaaagacagcaggattttctcctgtaaatagattaagtttataataaaaaagactccctgctaccaacagagagcctaaaagaatgttacctactaacctaaaaggtgtacggtaaacactaagtcgcattagtattttaccatacatcctggcatttttgtagggtgtattttttgcacccttttttaggataagaaaggatgataattaaatatgataagagcaggaatatatgctagagtaagtacaagagaacaggcagaggaatcgtcgactgcacgatcaaacatcgatcgaagctccaatgtcagcctccattgg

SEQ ID NO: 2187 - DNA, 966 bp, unidentified
  source 1..966: mol_type = unassigned DNA; note = Bacteriophage uvig_375705 from the Index of /pub/databases/metagenomics/genome_sets/gut_phage_database (ebi.ac.uk)
aagaaaaaacgcaaggtggagggagctgataagcgcaccgccgatggttccgagttcgaaagccccaagaagaagaggaaagtctagttctgcagagggtgatgccattcgacgaacttgtttattgcagcttataatggttacaaataaagcaatagcatcacaaatttcacaaataaagcatttttttcactgcattctagttgtggtttgtccaaactcatcaatgtatcttagtaccgcattcatttcagtgagagcttactcatcagagttcgttaagaaagtagaggtagatggtgaaaacatacgtgtttactggaacttctagcatttgttaatttgaaagaaagtattttgaaactctctttccccatcctcttatcctcctgttattcctccgcagaagtgctcgcgggaataaagtcgatcgtcctggccagcttatccgttcccgtgaccatgacgcggatcggctgaccgagtttatataccttcctcgtcatatcgccgatcaattctaaatgctcttcatcaaaatggtaatagtcgtcctttaactcgcctacccggatcaggacgtccgtatcagactaacgcttatccatctgttccgatacaggacggcgggtgttcgggaatactggattgtaaaccccatgaaaaaatctgttatgatctacgatctggagcatgaagacaatactggacagttttcatttgatgatatccttcaggctaatatttatgaagatttgaagatcaaaatttccgatcttctgtaatgcaaaatacgcccctaaatcaaaaggggcgtattttgtaccactcatcagtacttaaggaaggaatgacacaatggataagaaaaaaatgcgttgcgcaatttatatccgcgtatccactacggaatcgtcgactgcacgatcaaacatcgatcgaagctcttgcgtgtcttagtattgg

SEQ ID NO: 2188 - DNA, 966 bp, unidentified
  source 1..966: mol_type = unassigned DNA
aagaaaaaacgcaaggtggagggagctgataagcgcaccgccgatggttccgagttcgaaagccccaagaagaagaggaaagtctagttctgcagagggtgatgccattcgacgaacttgtttattgcagcttataatggttacaaataaagcaatagcatcacaaatttcacaaataaagcatttttttcactgcattctagttgtggtttgtccaaactcatcaatgtatcttagtaccgcattcatttcagtgagagcttactcatcagagttcgttttgtctgtagaaaccaaatccaatcaggaaaagcgagtaaggtattactgcaggacaagagatgccaaaggtgttgaggcttgtctaggacgtactattacagaagaacaactttttcaagcttttggcgagaccttaaaggcagaagatattcaccatatttcttttaatagcgtgaccaatgaagctaaagctacctatagaaatggagaagaaaaacacatcatcattcagaaaggacggtagacatgaaaaaagtcatcacgatagaaccagctaaacaagtaagccataaggtgacgtccgtatcagactaacgcttatccattagacaagcacatcagcctaaccttcaaaaatggcgtgcggattgatttataaaagacaaggcgtgtcagaattggcacgtctttttttgatgtttctgtgttataatagaagaagttatactaggatttgagatgcacacccctttagggttttgcacccccttgaaagggaaaaggttagattgtatgataaagctgattgcaacagatatggacggtacatttttggacgagaaggggcgggttgactcccagcggtttgccatcctcttggacaagctagaggcaaaaaagattccggaatcgtcgactgcacgatcaaacatcgatcgaagctccttcaacatcgtaccttgg

SEQ ID NO: 2189 - DNA, 966 bp, unidentified
  source 1..966: mol_type = unassigned DNA
aagaaaaaacgcaaggtggagggagctgataagcgcaccgccgatggttccgagttcgaaagccccaagaagaagaggaaagtctagttctgcagagggtgatgccattcgacgaacttgtttattgcagcttataatggttacaaataaagcaatagcatcacaaatttcacaaataaagcatttttttcactgcattctagttgtggtttgtccaaactcatcaatgtatcttagtaccgcattcatttcagtgagagcttactcatcagagttcgtgcccctcggtcacgccatcaagatccactggcatgatcccagcaacgactgagatccggttcacctgacggtcactgaggggtgggctggcggcgacctcgcgtcgtactgccgcccactcctcttccgtcccaccgaggctcactggatttccaccgtctcgaggttcggccagcagtagtgcgggatcccactgtcgtcctgcaccacgacctcaccgtcaacggtgaagctgagcagctttcccaccgcgatggccacaggatcctcgacagccagaaccacccttacttgcttgcgacgtccgtatcagactaacgcttatccatccgggtgtcccactacgaacgccgtcgcaacggcgagtggtacatcaagggctggccgatggagggcttcggtaccaccgagtgtcaactcgaggccctgaggatgatgggtcagtaaagagagggggtcgggtgcagtcgaggggctgcatccggccccttttttatttgccaaaatttagttagttcggcttcctatattgtttcggtgcccttcaaatacaagctccaacctgctaagatggcacctatgacagcaaccctcgagcgacacctcgacaccccgcagcaggaggccctggaatcgtcgactgcacgatcaaacatcgatcgaagcttgatgaattaggatggaacg

SEQ ID NO: 2190 - DNA, 966 bp, unidentified
  source 1..966: mol_type = unassigned DNA
aagaaaaaacgcaaggtggagggagctgataagcgcaccgccgatggttccgagttcgaaagccccaagaagaagaggaaagtctagttctgcagagggtgatgccattcgacgaacttgtttattgcagcttataatggttacaaataaagcaatagcatcacaaatttcacaaataaagcatttttttcactgcattctagttgtggtttgtccaaactcatcaatgtatcttagtaccgcattcatttcagtgagagcttactcatcagagttcgagtagtaggttggtttagaatttcataaataagtcttaagcctggtgggaacatcaggctttatttttttgactttttttcaaaaagtgcggaaaaatcgctcccaaacctacctagtaaggtaggaggaatatttgtattccatgaactatggcataaatttatcaggtcgaattagtttgtctgataacttgactaattttccctttagagtgatatatagtgtgccattacataggaaggagagtaaatgtccgtaaaaaagattagagtcaataatcaaaaacacaagcagaggatgacgtccgtatcagactaacgcttatccatgccgcatattgtcgagtgtccaccgaccaagaagaacagctatcaagttatgaaaaccaagttaattattaccgagagtacatctccaaacacgaggactatgagttagttgacatctatgcggatgagggcatctcagcaaccaatacaaaaaaacgtgatgcttttaaccgcttgatacaagattgtagggcgggtaaggtggataggattttggtcaagtcaattagtcgatttgccagaaacacccttgattgtatcaaatacgttcgagagctgaaagaactgggtgttggtgtgggaatcgtcgactgcacgatcaaacatcgatcgaagcttgttacatgccgcgtgaacg

SEQ ID NO: 2191 - DNA, 966 bp, unidentified
  source 1..966: mol_type = unassigned DNA; note = Bacteriophage uvig_582533 from the Index of /pub/databases/metagenomics/genome_sets/gut_phage_database (ebi.ac.uk)
aagaaaaaacgcaaggtggagggagctgataagcgcaccgccgatggttccgagttcgaaagccccaagaagaagaggaaagtctagttctgcagagggtgatgccattcgacgaacttgtttattgcagcttataatggttacaaataaagcaatagcatcacaaatttcacaaataaagcatttttttcactgcattctagttgtggtttgtccaaactcatcaatgtatcttagtaccgcattcatttcagtgagagcttactcatcagagttcgttcaagttgtcggtttgatttttatccaaaccaaaagacacgccttgccgtaacggtgggcgtgtcttttatatgtttgtgcgttttattttttgtacatcccctgcagcacgccaacctccgccgcatcatcgatcatccggcggtgtaaataatcgtacagggccagcatttccgccggaggttcgccgtgcatcctccggtgattttcgatccggcgcacgacgtctttgtgcagcatgttcatgtgattcatttcctccccggacagccggtaaaacatctccgccgtctccgggtgacgtccgtatcagactaacgcttatccatcagaaagaggacgctatcctggcggcaaaccggaattggcgtccgctgacatatggattgtgcgggatgtgctctctgctgaccattcttctgatgacgtacatcattctggactatcagcatccgaaaatcggcttgattcgtgccgacggtgttgcaccgattgtttatatctcggcgtgtggagttgcattcgttatcctgtttatcggtcgcaccatggtaaatcggcggttacaaaggaaagaaaatggaaggaaagccggacatgaacataattcccattgacctttcagcactggaatcgtcgactgcacgatcaaacatcgatcgaagctttgcataagatgtgtgaacg

SEQ ID NO: 2192 - DNA, 966 bp, unidentified
  source 1..966: mol_type = unassigned DNA
aagaaaaaacgcaaggtggagggagctgataagcgcaccgccgatggttccgagttcgaaagccccaagaagaagaggaaagtctagttctgcagagggtgatgccattcgacgaacttgtttattgcagcttataatggttacaaataaagcaatagcatcacaaatttcacaaataaagcatttttttcactgcattctagttgtggtttgtccaaactcatcaatgtatcttagtaccgcattcatttcagtgagagcttactcatcagagttcgctctcgacttttctcaagaacaatatgagtactaccttacagatgttcaagacctagaaacgaatacatattacatagattctagatgggcggaatcattctgtcgtaccagtttggcataaaattaaaaatttatttacaagtattaatggcctaatttttagttaggtcattttttatcttctaatttagaaaaatgtagttaatatatataattattatgtagatttctagaaaggaggtaaaaccaatggtaagacggaattctaaaactactcatcaacagaagaaaattcgagagacgtccgtatcagactaacgcttatccatttgtacttgatcctagttggaagtcggaagacattcacgaagtttttaaataagaaagaggtaaattatgcgttttaaagattttaatcttgaagttgttaatgttgaacgttactcatcagattatagtatgacggtgaacaagaactttgttacttttagtaaaggaattgtccaagctttagaatatccagcacatgtattggttgcctttaataaggatacaaaggtaatgggtatacaagtttgtcgtgcaaaaactaggggagcattttctttttcaaaacctgttggggagcaggaatcgtcgactgcacgatcaaacatcgatcgaagctgcgtattcgcgccgataacg

SEQ ID NO: 2193 - DNA, 966 bp, unidentified
  source 1..966: mol_type = unassigned DNA
aagaaaaaacgcaaggtggagggagctgataagcgcaccgccgatggttccgagttcgaaagccccaagaagaagaggaaagtctagttctgcagagggtgatgccattcgacgaacttgtttattgcagcttataatggttacaaataaagcaatagcatcacaaatttcacaaataaagcatttttttcactgcattctagttgtggtttgtccaaactcatcaatgtatcttagtaccgcattcatttcagtgagagcttactcatcagagttcgacttcgacttccgggtgcccgaggaactgactcagcgactcggtgtcgcctgaaacgcaaaaaagccccctcccaaggccactgaggccctgagagggggtttctttgtctagccgatcctcgccatggagaaccacgagttggaggcgttggcgtctccgacgatgttcacgctgccatcggtcttcagaccgggttgcaccgtcgaccctgccgccaggtagtactgcacgccgtcaccgccgtaggcgatgtcccgtgggaagtgcggcacaccgaacgctgccgcgctgatgcctcgacgtccgtatcagactaacgcttatccatcgaccgtcgccgtcgtggcgacgacaacgccgccgtcgatcaccagggggaccatccatccgtgagccacaccgttgtttgccgccagctctgagagcgcggtgaaggacagggagaaggcgagcccgccgacgaacacagttcctgcggcggccagcctgaccggagagagacgcatcgaagcctttcggggtgtgtgatgttcgaggagtagaacatcacttttaccaaactcaggtacccttgtcatatgcgagtgctcggaagactgcgtttgtccaggtcaacggaagaatccacggaatcgtcgactgcacgatcaaacatcgatcgaagctaatcacgatctcttaagacg

SEQ ID NO: 2194 - DNA, 966 bp, unidentified
  source 1..966: mol_type = unassigned DNA
aagaaaaaacgcaaggtggagggagctgataagcgcaccgccgatggttccgagttcgaaagccccaagaagaagaggaaagtctagttctgcagagggtgatgccattcgacgaacttgtttattgcagcttataatggttacaaataaagcaatagcatcacaaatttcacaaataaagcatttttttcactgcattctagttgtggtttgtccaaactcatcaatgtatcttagtaccgcattcatttcagtgagagcttactcatcagagttcgacctgcatatacccgacgacatactggaacgtatggctttgaaaggagaatgatgaggaagctagtgccagtgttgctgctagcgctgacggcatgtagtaccaaccacgagacgcctacagaagccccggtgaagcggggggtagttgtgttcgaggtcgggggtgactattcgttcgcctcgtacgacgacaactaccaaaacggtattcgataccaaccaggtcagacccgagtggaactgcggggcgacaacgtgccgcagagccccaagccgttgtacacctgggccaattcagggacgtccgtatcagactaacgcttatccataggacttcaccaaccacgggttctcggtgatcgcccttcgaccggagcacatatcacccgaaccggtgtacgaggacaccatgcgctacttcctacctggtagttacggaggcgggtacctgtgaaactaggcccctgggctggccctaaccggctggcctgggggcttttttcgtacctaaaccacatctagaatagttactatacgactttacgacttctcatgtgggaagcattgtagactcgccctatgcgagtactaggacgggtgcgtttgtccaggttgaccgaggaatccacggaatcgtcgactgcacgatcaaacatcgatcgaagctacggtctattggacgagacg

SEQ ID NO: 2195 - DNA, 966 bp, unidentified
  source 1..966: mol_type = unassigned DNA
aagaaaaaacgcaaggtggagggagctgataagcgcaccgccgatggttccgagttcgaaagccccaagaagaagaggaaagtctagttctgcagagggtgatgccattcgacgaacttgtttattgcagcttataatggttacaaataaagcaatagcatcacaaatttcacaaataaagcatttttttcactgcattctagttgtggtttgtccaaactcatcaatgtatcttagtaccgcattcatttcagtgagagcttactcatcagagttcgaatttcatttaaaaaatggtatgaaggttaaagaagaatttactaaaaaataagggaggagttttaatgcctaaagtttcagtaataccagcaaaaccggtacaagttataaaaggaatgtccaaggaaactaaaaagagagtttgtgcttattgtagggtaagtacagattcagatgagcagcttacaagttatgaagcgcaagttacttattatgaagaatacattaaaagcaaacctgaatatgagttttgtgggatatttgcagatgaagggatatcaggaactaatacaaaaaaggacgtccgtatcagactaacgcttatccatgaattactacgattttgtggcagttatttggttattggggaagggggggtgtaaatgaaatatactatagaatatttagtaagtagatcaatactaaaagaattattaaaagataacgtgattacagaagatgagtttaataagatagatatagaaaataaaaagagttttaataaatagaattttggcttgaactgcatcagttcaggcctttaatttttggcacttttcacatgttcccacatcttaaatgacttgctttaaggcagtagtagaggtaacatgtgtcactacggaaggggaatcgtcgactgcacgatcaaacatcgatcgaagctgcaatgaaggtcactagacg

SEQ ID NO: 2196 - DNA, 966 bp, unidentified
  source 1..966: mol_type = unassigned DNA; note = Bacteriophage uvig_364726 from the Index of /pub/databases/metagenomics/genome_sets/gut_phage_database (ebi.ac.uk)
aagaaaaaacgcaaggtggagggagctgataagcgcaccgccgatggttccgagttcgaaagccccaagaagaagaggaaagtctagttctgcagagggtgatgccattcgacgaacttgtttattgcagcttataatggttacaaataaagcaatagcatcacaaatttcacaaataaagcatttttttcactgcattctagttgtggtttgtccaaactcatcaatgtatcttagtaccgcattcatttcagtgagagcttactcatcagagttcgattataacaagtatggtccttaccttgaatttaacggatatctgcttatgttctcggaagctggacttaatatatcaaaaacaatttcataaaaggaaagcccgcaacggctattggcgtagcggctgcgggctgattccatgtgatgtgtaataaaacaccttcaaacgaatttattatacatcgcatggctccaaaacacaagtaaatattggggctatttttatgcccttttttaggaggaaatgcgatgagacgtgttgtaatttatgtaagagtttctacacaggagcaagccacgacgtccgtatcagactaacgcttatccatgatacatagaactgaacgatgataccgtatatattcactggaagtttacatgatgaataaaaacaacaaaaagcagatgtaaaaacacatctgcttttttaatgtaatgtcatcagacaacatttttaatttttcgtgaaatctataaacggcaaatgatatgctgaatatggtgaagctgctgtcaattcaactaccatctgacgtatatatccaagcaacaatgcaggagcattttgatttagcaactgctcatacactccatccaaattttcattccacttaaaacctgcctgttcaggaatcgtcgactgcacgatcaaacatcgatcgaagctaagtctctgaatataggacg

SEQ ID NO: 2197 - DNA, 966 bp, unidentified
  source 1..966: mol_type = unassigned DNA; note = Bacteriophage uvig_118757 from the Index of /pub/databases/metagenomics/genome_sets/gut_phage_database (ebi.ac.uk)
aagaaaaaacgcaaggtggagggagctgataagcgcaccgccgatggttccgagttcgaaagccccaagaagaagaggaaagtctagttctgcagagggtgatgccattcgacgaacttgtttattgcagcttataatggttacaaataaagcaatagcatcacaaatttcacaaataaagcatttttttcactgcattctagttgtggtttgtccaaactcatcaatgtatcttagtaccgcattcatttcagtgagagcttactcatcagagttcgaaaaaatgaagtcgaaagaaagattgcgatagcaatcgaatctacaaaattgtatagcgagacatctttaaccaatcacgataaaaatgttttggaaaatctattaagagagaatctatatttgttagaacgtatagaaaaataaaaaagccgctctcctcgaccaaaatttgagcggcttagcaaaaaataacctaaggcataggctttttttctatgcctattttatcaaaaaataggagtgattaccatgagaaccgcaatttatgtgcgagtttcaacgcttgaacaagctcaagagacgtccgtatcagactaacgcttatccatatatcgttgtatatcctgaaagaatggaagttcactgggtatttgaaaaataaacagatttactatctatgatttcgataatcgtaaaggctgaatgttgcttaaagctgagaaacacaaatggtaaggttttctcagcaactgttatattcttaataagaaacagattttttgttatctttaaaacgttgagatagcttggttagttctgttttactaacggtgaaatgaaaattttgtttctcgagttcaattgttaatatcagttgttcacttaccttttcaaatttacaatttcctggaatcgtcgactgcacgatcaaacatcgatcgaagctgcacatcataattgatgacg

SEQ ID NO: 2198 - DNA, 966 bp, unidentified
  source 1..966: mol_type = unassigned DNA; note = Bacteriophage uvig_442496 from the Index of /pub/databases/metagenomics/genome_sets/gut_phage_database (ebi.ac.uk)
aagaaaaaacgcaaggtggagggagctgataagcgcaccgccgatggttccgagttcgaaagccccaagaagaagaggaaagtctagttctgcagagggtgatgccattcgacgaacttgtttattgcagcttataatggttacaaataaagcaatagcatcacaaatttcacaaataaagcatttttttcactgcattctagttgtggtttgtccaaactcatcaatgtatcttagtaccgcattcatttcagtgagagcttactcatcagagttcgctatttcaagtaagctatcactgttaaaaagatatatataataaaaatgcttttctcatttttataaattagtttacgaaaaatcgaacactagggatggtgttctaaagccttgtaggataaaaaatgctagtgaaaagtatggacacttaatatccagaggtatgctcttaccctcaacagtcatgaattgttattttaagtatagcatacctctttttaaaaagtcaatgaaatggaggaaaaatagatgaaacgtgttgctttatatatgagagtttctactcaagagcaggcagagacgtccgtatcagactaacgcttatccatgaggtaaagtgcatagaagtaatatttctatcactaatattattttcaaataataataacacactctattacttttacttgtataaaggaatttcccgacgtatgtgggtatatatggatatcactggctcttttttctattgcttcgttaataatttggttcattaattcttttacatcaatagttatcacccctttttctcaagaaaagaaaaatataggctaagtattaccacttagcctatatttaaaaactattaatttaatttactacattataactctatagcctaagtatttggaatcgtcgactgcacgatcaaacatcgatcgaagctatcggcaatatgcactgacg

SEQ ID NO: 2199 - DNA, 966 bp, unidentified
  source 1..966: mol_type = unassigned DNA; note = Bacteriophage uvig_425122 from the Index of /pub/databases/metagenomics/genome_sets/gut_phage_database (ebi.ac.uk)
aagaaaaaacgcaaggtggagggagctgataagcgcaccgccgatggttccgagttcgaaagccccaagaagaagaggaaagtctagttctgcagagggtgatgccattcgacgaacttgtttattgcagcttataatggttacaaataaagcaatagcatcacaaatttcacaaataaagcatttttttcactgcattctagttgtggtttgtccaaactcatcaatgtatcttagtaccgcattcatttcagtgagagcttactcatcagagttcgtaaaacgaattaagcatcaaaacggaattgtaatgctgttgtcggacaactcaaaatatgcgccaattattattacacctgaaacacccgcaaaaatattaggcaaagccgttaaagtaagctttgatctttaaaaaaatacagatactctccccgaccaaagtttgagtatctgcattggattatgtgaaacctagggtgcaggtttctataatgtaccctattttatcaaaaaataggaggaattactatgaaagcagcaatttatgtaagagtatcaaccatggaacaagccgaggagacgtccgtatcagactaacgcttatccataaataatattatatcctgataagatggagattcactgggcttttgcaatttaacaatattatctaacgttgttcactactccaataaaaccaatgttaattggttcagcagcagtaccgacgtttttaatcgtatatggtttccagccataaggaatagagccgtctttttcgtgtacgttcgctataactaaatcaaaaccgccttttaactcgtcttgagaataatcttcgttgtattccttaacgatcggtaaaaagccagagctaggatctggtttagttcccgtcaaaattcgatggaatcgtcgactgcacgatcaaacatcgatcgaagctaatacggagctaacctgacg

SEQ ID NO: 2200 - DNA, 966 bp, unidentified
  source 1..966: mol_type = unassigned DNA; note = Bacteriophage uvig_151019 from the Index of /pub/databases/metagenomics/genome_sets/gut_phage_database (ebi.ac.uk)
aagaaaaaacgcaaggtggagggagctgataagcgcaccgccgatggttccgagttcgaaagccccaagaagaagaggaaagtctagttctgcagagggtgatgccattcgacgaacttgtttattgcagcttataatggttacaaataaagcaatagcatcacaaatttcacaaataaagcatttttttcactgcattctagttgtggtttgtccaaactcatcaatgtatcttagtaccgcattcatttcagtgagagcttactcatcagagttcgaaaaaatagtgataaaaggcgaggatataaagatatattggaggtttgtctaattctgcccccaaacataacgcagttttgttactgagtcatgcaaaattgatattcttaaattatccgtttctgcctcaagtaatgggttattcttattaaattgtacgttcattaaattgcttattcttgtataaaactgctgaataaaattatcgtctaatgtaaagcctttaattttataccttcccttatttaaatcattaacccataatccctgactccaatttatatccgtaatattctcatgacgtccgtatcagactaacgcttatccattttataataacggacggtataaattgcgtaacctgtggaggcgatttataccatacaagttttgattgtgagactttaagatgggaacgtaaaaaatacaaagaatcattaaaagcactcactattaaagaggcgaagtctaaaggtttaacttattgttatgactgctcaagagacaattactattataagcacgtcggcatagaagattagacactatgaataacataaatttaggagaagagaataaatgagaatagcattataccctcgtgtttcaacacaagaacaagcattgaaggaatcgtcgactgcacgatcaaacatcgatcgaagctgtcagatcacgtagagcacg

SEQ ID NO: 2201 - DNA, 966 bp, unidentified
  source 1..966: mol_type = unassigned DNA; note = Bacteriophage uvig_570177 from the Index of /pub/databases/metagenomics/genome_sets/gut_phage_database (ebi.ac.uk)
aagaaaaaacgcaaggtggagggagctgataagcgcaccgccgatggttccgagttcgaaagccccaagaagaagaggaaagtctagttctgcagagggtgatgccattcgacgaacttgtttattgcagcttataatggttacaaataaagcaatagcatcacaaatttcacaaataaagcatttttttcactgcattctagttgtggtttgtccaaactcatcaatgtatcttagtaccgcattcatttcagtgagagcttactcatcagagttcgtcgaatcaatttctgtcgatggtcgcaatatctctattcaatggagaatttaatgcaaaattattaaacccatgcatatagataatataaatatgtattatattaacacactttttttgtttaaacaatactttaattacacaaaaaatagcccgcctgccttgattggcaagcgggtaatttttatgtatccattcacattttcggaagattaatatcgttgtccgccagccacccgagtttgattcctctcgtcggctgcgcagatgttccccatccatcccggatcgtttgaccatggacgtccgtatcagactaacgcttatccatcaggcggtcctcatcctccagtaaaagctgaattgcgtacacaatttcccggtgccctttataatttttcccaatggccaaatcgcgcaagatgctgtttatgatattcatagtttgtttcctccttggttgtcaaaagcattctatggcagaaatcgtcacaaaacagcttttccagtttttatttatgtttttcggcgctttcaagcaaaaaacgccatatttcaaacatgtcatgcgaggtgtgatgatgtatcaagatatcacaacagtttgcggatatgtccgcgtatcgaccgaggaatcgtcgactgcacgatcaaacatcgatcgaagctacacttaattctccggcacg

SEQ ID NO: 2202 - DNA, 966 bp, unidentified
  source 1..966: mol_type = unassigned DNA
aagaaaaaacgcaaggtggagggagctgataagcgcaccgccgatggttccgagttcgaaagccccaagaagaagaggaaagtctagttctgcagagggtgatgccattcgacgaacttgtttattgcagcttataatggttacaaataaagcaatagcatcacaaatttcacaaataaagcatttttttcactgcattctagttgtggtttgtccaaactcatcaatgtatcttagtaccgcattcatttcagtgagagcttactcatcagagttcgatagaattatgcaatgttgtactagcagtcaatattgttggcttgccggataatttgattttctagaggaagataactaacatcgaacagacaaaattcgttaaattagcatctgtagtaattcttagcagttcttaagtaaaattttagaaagagacgcaccatagttataattgagtgtgtgctactttcaagtatggtttttattgatgaaacctcttagaccactctgtttgaaataaggtaactactgcttaattcaccaaaaagcctgtaattaagttctaaagcgagtgtgtcgacgtccgtatcagactaacgcttatccatttcaaatcttgtatatttattagggagaatttgtgtgaactagatagctttcttaaacgagacataaggtgtgcattggtttagtttaatagaagtctcctaacctataaaaaaattcacaggaagaaaaacatgcaaaaaggagagttggctatttattggggttataagcctaatcgattggcagatacatatctagcagatgcttatgaacaattattgaaatgtaaaacaaaggaggtagaagaaaatgacaaccgtaagcttgtatgcaagagtttcatcaagacaacaggcacaggaatcgtcgactgcacgatcaaacatcgatcgaagctttggagtaatcgatggcacg

SEQ ID NO: 2203 - DNA, 966 bp, unidentified
  source 1..966: mol_type = unassigned DNA
aagaaaaaacgcaaggtggagggagctgataagcgcaccgccgatggttccgagttcgaaagccccaagaagaagaggaaagtctagttctgcagagggtgatgccattcgacgaacttgtttattgcagcttataatggttacaaataaagcaatagcatcacaaatttcacaaataaagcatttttttcactgcattctagttgtggtttgtccaaactcatcaatgtatcttagtaccgcattcatttcagtgagagcttactcatcagagttcgtcaataaagatctacaagagtgggttaaatctttaaaagaatctgaacagtaatgcaaataaatacatgatattacttgaataaataattcctcaataaacctttgactactttaaaaagtagtgatactttttaaagtagtgaaaaaggagagccgatggatcaatggacgatcgaatattttgatgatgataaatttgagaaatggtttaaaaagttgaacaaacaagggaaatttgaggctatatacgaagaaattaaacttttaatgaaatgcgggaatgagttaacgatgcctcagacgtccgtatcagactaacgcttatccatcattttcagatgtgctcttcacaaaatttccatgtatgtaatttaaatcttgtgcaattgacttcaatgaagatgatttctgaaaataacacagacaataaagacacccataaccgtttatatttcttatttaaacgtcaataaactataggttgttgacaattacgtatccgtagatccgccccttgcaaaataaggacatttttatgatgtttacagggagactttttgacattttatggagtagaaaatgcggattggaatctatgccagagtttcgaccaaggatcagcaatcgacggaatcgtcgactgcacgatcaaacatcgatcgaagctgtgaggtaagtacaaccacg

SEQ ID NO: 2204 - DNA, 966 bp, unidentified
  source 1..966: mol_type = unassigned DNA
aagaaaaaacgcaaggtggagggagctgataagcgcaccgccgatggttccgagttcgaaagccccaagaagaagaggaaagtctagttctgcagagggtgatgccattcgacgaacttgtttattgcagcttataatggttacaaataaagcaatagcatcacaaatttcacaaataaagcatttttttcactgcattctagttgtggtttgtccaaactcatcaatgtatcttagtaccgcattcatttcagtgagagcttactcatcagagttcgttgatgttactgctgataatgtagatatcatatttaaattccaactcgcttaattgcgagtttttatttcgtttatttcaattaaggtaactaaaaaactccttttaaggagtttctactattatatacattttatttatggttcttgctggactcgaaccagcgaccgaacggttagctaccaactgagctaaagaaccaaaatatgacaatctgcagcacatatcttcgttattatataagatctgtgtggatggagctgcagattatcaagtgtttgtaaatgaatgtttttctcatgacgtccgtatcagactaacgcttatccataggttatgctctcaacaggaagtggctcacaagacacctatacagcatttgctggaaagcttacagatgtttattcatccgaagcagaaaaaataacagatgcttatatggcgtctgctcaataaactaaataaaaaaatccgtccaagtttggcgactggggacggattaaaatctatgtggtatagtaaacctccaaatttggagagttttactgtacttattttaacaaaaatgaggtacaaaaacaatgactaagaaagtagcaatctatacacgagtatccactactaaccaagcggaatcgtcgactgcacgatcaaacatcgatcgaagctgttaacacaacttagtcacg

SEQ ID NO: 2205 - DNA, 966 bp, unidentified
  source 1..966: mol_type = unassigned DNA
aagaaaaaacgcaaggtggagggagctgataagcgcaccgccgatggttccgagttcgaaagccccaagaagaagaggaaagtctagttctgcagagggtgatgccattcgacgaacttgtttattgcagcttataatggttacaaataaagcaatagcatcacaaatttcacaaataaagcatttttttcactgcattctagttgtggtttgtccaaactcatcaatgtatcttagtaccgcattcatttcagtgagagcttactcatcagagttcgaagagttcctggcttccaccgtcctagctaaagcgggcattacgtcacggtgacgctttaaacgcaaaaaagccccccgaagcgccgaagcgccccgaggggtttctttgtctagtaggcccggatccagacctggccacgaccaccgtcgtagcctcggctgagctgagcggagccgttgcctgcgcctccgggtaccttgccgtcttggctgttcgcggtgttgtcggcaccgcccgtgtagaggatgccgttccaggtgaagttgcccggacccttaccgcgggttgcggcctgagagacgtccgtatcagactaacgcttatccatccgttgacggctgccaggtctgtgagtgccgtgaacgagagcgcgaaggagagtcctccgaccgcgacggttccggctgttgccattgggacggcagatagaatcctcatgcaccgctcctatcggtgtgaagtggcccctcgtctgttagcgcaggcggggggttttcaagttggaccgtaccacggcgaggctcctacctggcaagatagtttcccaagtggctcagagtactggtatagtgatcgttatgggaattacgaagttgcaggtcagagcactggtcggtgctcgcgtgtcggaatcgtcgactgcacgatcaaacatcgatcgaagcttctggaacggaatagatacg

SEQ ID NO: 2206 - DNA, 966 bp, unidentified
  source 1..966: mol_type = unassigned DNA; note = Bacteriophage uvig_323824 from the Index of /pub/databases/metagenomics/genome_sets/gut_phage_database (ebi.ac.uk)
aagaaaaaacgcaaggtggagggagctgataagcgcaccgccgatggttccgagttcgaaagccccaagaagaagaggaaagtctagttctgcagagggtgatgccattcgacgaacttgtttattgcagcttataatggttacaaataaagcaatagcatcacaaatttcacaaataaagcatttttttcactgcattctagttgtggtttgtccaaactcatcaatgtatcttagtaccgcattcatttcagtgagagcttactcatcagagttcgcaactaaattgtatgacacgctctgaggcgtatttacatataaagaatgtcggtggactttgtgccgacaatattacgaaatctacaaattttttagtaactaatagcactgctatgaccggaaaaatgaaaaaagctttagattatcaagaaaaagggattgatatttcgatcataacagaagatgaactttacacgcttttggcatcaaaataatttattaaaaaaagtttgaaaggaattattcaatatgaaggtcggaatatattcaagagtttctacccaagagcaagcacgagagacgtccgtatcagactaacgcttatccatacagaattgaagtagatgatgatgatatttatatctattggaacttcgtctgatttttattttgcccatttcggcatatcattcaacctcggttaatactgctaaagttactttaaagaaatacttcaaatcaaccgaataaaaacctctgttaaacggcacagcctcaatatccgtaaacacccaaatcacttcggcttttgtgcatttaacgtttattgctctgtccacaatatcctgaccgcacgaagtcaagtacacgcgtacattttccaagcagtctttatccctgcaactgtcggaatcgtcgactgcacgatcaaacatcgatcgaagcttgctgcgtaagctcggtacg

SEQ ID NO: 2207 - DNA, 966 bp, unidentified
  source 1..966: mol_type = unassigned DNA; note = Bacteriophage uvig_314864 from the Index of /pub/databases/metagenomics/genome_sets/gut_phage_database (ebi.ac.uk)
aagaaaaaacgcaaggtggagggagctgataagcgcaccgccgatggttccgagttcgaaagccccaagaagaagaggaaagtctagttctgcagagggtgatgccattcgacgaacttgtttattgcagcttataatggttacaaataaagcaatagcatcacaaatttcacaaataaagcatttttttcactgcattctagttgtggtttgtccaaactcatcaatgtatcttagtaccgcattcatttcagtgagagcttactcatcagagttcggcaagcagttcgacccggggacggtagatatcgtctggaagactgacgcgtaaaaagcgggccgcgaggcaaaaagggtgggatagcaggcaaatcgccctaacccacccagtataacacttagatagtttactgtcaatatgttcttcatcacacaataggtagaggggtgcctattgtgtggttttgcttatcacggtgataagtagacgtgttgaatgagagggtcatcggggtcttaacatgttaaataacactttttaacgggggttaacacaacgtgtgttaaggcgtttccccgacgtccgtatcagactaacgcttatccatttcgtcgtggcagtaggccgcgccgcagccccgccgcggaagaagatattctctacggaatcaagcggcttttcctcattgatgctggcgtgcaggtcagcaatgaaatcggaatcgccggtaatcgagagcgtcgacgggccgcccttgcgccgcgtcatccgcacccctttttccggtaagatagtgtacaaagatacatcacaagtgttacacttgtgtggaagatcactagaaaggagagtcaaaaatgactcgaaaagtagctatttacctacgaatgagcctcgatatggacggggaatcgtcgactgcacgatcaaacatcgatcgaagctctatgtgctcatgagctacg

SEQ ID NO: 2208 - DNA, 966 bp, unidentified
  source 1..966: mol_type = unassigned DNA; note = Bacteriophage uvig_31244 from the Index of /pub/databases/metagenomics/genome_sets/gut_phage_database (ebi.ac.uk)
aagaaaaaacgcaaggtggagggagctgataagcgcaccgccgatggttccgagttcgaaagccccaagaagaagaggaaagtctagttctgcagagggtgatgccattcgacgaacttgtttattgcagcttataatggttacaaataaagcaatagcatcacaaatttcacaaataaagcatttttttcactgcattctagttgtggtttgtccaaactcatcaatgtatcttagtaccgcattcatttcagtgagagcttactcatcagagttcggatactcagtgcaaattcttatggactcttcatatgagcagtttttgatataattgacattgacaatttcaactgatataatttaattataaaacagattacaataagaatataaaaggtttagctactgccttaacaggtatatgaatatacacagtcgagagcgcatgactgttaatcatgatgtcactggttcgagcccagttgggggagccaaagtaaaagtcagtaaataagctaaaatcggcttgtttactgacttttttctgtgttcaaacatttttgttttaaagagaatatgacgtccgtatcagactaacgcttatccatatatccgaatgtaaaaaaagaattaatgggatttccaaaggatgattggaaagatttcttattaagtaaatgaacactgatttaagccttgtaagtgtaaaaaacttgcaaggctttttttcgcaaattatcttcgcatttcaccgccattggtctggatattacattatataatggtataatgtaatcagagagaaatctcaactcagactaagaatagtgtcggtacaaatgagaaagagaggttaaaatgattgctacaaaaccgacgcaagaaaaaacagtgaaaacagtttactgggaatcgtcgactgcacgatcaaacatcgatcgaagctgtaacagatctcgcattacg

SEQ ID NO: 2209 - DNA, 966 bp, unidentified
  source 1..966: mol_type = unassigned DNA; note = Bacteriophage uvig_328850 from the Index of /pub/databases/metagenomics/genome_sets/gut_phage_database (ebi.ac.uk)
aagaaaaaacgcaaggtggagggagctgataagcgcaccgccgatggttccgagttcgaaagccccaagaagaagaggaaagtctagttctgcagagggtgatgccattcgacgaacttgtttattgcagcttataatggttacaaataaagcaatagcatcacaaatttcacaaataaagcatttttttcactgcattctagttgtggtttgtccaaactcatcaatgtatcttagtaccgcattcatttcagtgagagcttactcatcagagttcggcgatccgcgaggtctatgagtcaaccgcgctgaagagtatccacaataacatggtctggtggcgctggttcgcactggcggaagcggcgtttatcctcggcatcctgatctgggatattttccaccctaccgccggttatatccggtataccacttcaatgattccggatctttatgggctgatcaggcaccttcagttataatcgacgacttccccgcttcggcggggtttttgataggaggtctatcatgatctgtgcaatgtatctgcgcaaatcgcgtgccgatctgaccgcggagacgtccgtatcagactaacgcttatccatatgataatccagccgattttttgtctttggactttttcccggtgcttgaataatgcaaaacaaaggtatgatcagtgtcttgatgaattacatcattgatcatacctttattattcgcttacttccagccgtcgatcagcgcttttacttccgccgttttcgcgatctgatcgttgtggatcgcttcccatgcggcgatcatgccgttggtatactccggattgcgcttgtaatcgtcgctggtcttcgcggtctcgatcaattttttgataatcgaatgaccgttggtgttgaatccgaggaatcgtcgactgcacgatcaaacatcgatcgaagcttccggaagagctgacttacg

SEQ ID NO: 2210 - DNA, 966 bp, unidentified
  source 1..966: mol_type = unassigned DNA; note = Bacteriophage uvig_323858 from the Index of /pub/databases/metagenomics/genome_sets/gut_phage_database (ebi.ac.uk)
aagaaaaaacgcaaggtggagggagctgataagcgcaccgccgatggttccgagttcgaaagccccaagaagaagaggaaagtctagttctgcagagggtgatgccattcgacgaacttgtttattgcagcttataatggttacaaataaagcaatagcatcacaaatttcacaaataaagcatttttttcactgcattctagttgtggtttgtccaaactcatcaatgtatcttagtaccgcattcatttcagtgagagcttactcatcagagttcgaacgtcggggaaaaggtaaaagttccgtgtttatcggataaaaagcggatttcatttttgatctgcttgaaatcgttcgaatatgcttgaaacaataaaaagccccatccatattggcgtatggatgaggctagtggtcacgaagctttgcagagcttgtggccggttgtaatctattaccctgtgaggctgattactattctattataccaaatcagcctccattttacccagttaggaggcttttcttatgcctaaaaaagaaaccacagcaccagtcaaggccgttttatatgtccggacgtccgtatcagactaacgcttatccatcgaatttgaatggtatggtgacccaagagagattcgaactcccgacaccttgattcgtagtcaagtgctctatccagctgagctattgggccaaattggcaggccgagtcacaaactgcagcgggagataagtcagcgaaaggaaagaagtcatgaaacgtccacagaaagtcacccgggaagacaggctgagccagtacgctcgcaagatgtacgaaaaagaaaaaatcgggaaacaatgggaagaagaactcccggaagacaagaaaaagaacggaaagaaaatcaggaccatcctgaggaatcgtcgactgcacgatcaaacatcgatcgaagctagtctcgctcatacgaagcg

SEQ ID NO: 2211 - DNA, 966 bp, unidentified
  source 1..966: mol_type = unassigned DNA; note = Bacteriophage uvig_520818 from the Index of /pub/databases/metagenomics/genome_sets/gut_phage_database (ebi.ac.uk)
aagaaaaaacgcaaggtggagggagctgataagcgcaccgccgatggttccgagttcgaaagccccaagaagaagaggaaagtctagttctgcagagggtgatgccattcgacgaacttgtttattgcagcttataatggttacaaataaagcaatagcatcacaaatttcacaaataaagcatttttttcactgcattctagttgtggtttgtccaaactcatcaatgtatcttagtaccgcattcatttcagtgagagcttactcatcagagttcgttcgcaggggtaagcgaatcgtatatcgccaggaattgggttgtccgtagctctgtctggtccttcatggtatatccctcctaatttgtggtgtctgtaaatattactaaagtatttcaccacaaatacgactttgttacattctaacgaaccgcgttagggaaatcagcgtcaatgcaagtttggagggcaaacttgctgaaatcggagcattttgtacaattacacttgtacgtgagggggcgcgcgcatggccaggaaaaaggcggagaaggccgagggcaacatctgtgtggtgtagacgtccgtatcagactaacgcttatccatacccttgtcggacagggcgaaaatatggtataatacactggttgtgtctgtaaaggacgcttcattcggtatgcctgtctttttcgggcatatgaaggaggaaatgcctttgaccctgcgcgaagaagcgccgatgaccaaagatgatgtacgccgcctgaatccactccagctggcgtatatcggggatacggtctatgatttgctgacccggtcgcgcctgctgtaccgggggtataatctgcatcactgccatcaggcggcggtcacggtcgtcaatgcacacgcacaggcggaggcggaatcgtcgactgcacgatcaaacatcgatcgaagctaacaacactacgtgagagcg

SEQ ID NO: 2212 - DNA, 966 bp, unidentified
  source 1..966: mol_type = unassigned DNA; note = Bacteriophage uvig_199031 from the Index of /pub/databases/metagenomics/genome_sets/gut_phage_database (ebi.ac.uk)
aagaaaaaacgcaaggtggagggagctgataagcgcaccgccgatggttccgagttcgaaagccccaagaagaagaggaaagtctagttctgcagagggtgatgccattcgacgaacttgtttattgcagcttataatggttacaaataaagcaatagcatcacaaatttcacaaataaagcatttttttcactgcattctagttgtggtttgtccaaactcatcaatgtatcttagtaccgcattcatttcagtgagagcttactcatcagagttcgatttgccgcccatagggcagcttatgtgtccgtcaggagaggatagcgaatgaaattttgatgtactttcgcagtcggaagaaattacagggcgaggtgtcgctcaacgattcgctcgattccgacgccgacggcgagtcgctctacctcatggatgtcgtcggcgtcgaggacacgatgtatttggacattcaggaccgcgacgactgcctgcgcgtgcgaaggctcgtgcacgagtgcctgaccgagcgggaggaagaggtcatcatctcgcgttacggcctcggcggccggatgcccgacgtccgtatcagactaacgcttatccatttacaaaacgcgggaagctgcatccaatcaaaacatcggagaagagcacgctgtatctcaaaagtgaagtcctgaaacgaaactggcagtgagaatacgttatacccctttatacccttttgaaaggggtataaaggggtataacgttctttggagaacttttcaaaaaatctcatttgcaccttttcaaatgggttccaatccgttacaatatatctaacaacctaacaatgtaatgcgaggtgttgctatgaaaacaacagaccagccgcaggtgaagcaatacgtcatctattcccgggaatcgtcgactgcacgatcaaacatcgatcgaagctaatatgtgttaatggcagcg

SEQ ID NO: 2213 - DNA, 966 bp, unidentified
  source 1..966: mol_type = unassigned DNA; note = Bacteriophage uvig_17362 from the Index of /pub/databases/metagenomics/genome_sets/gut_phage_database (ebi.ac.uk)
aagaaaaaacgcaaggtggagggagctgataagcgcaccgccgatggttccgagttcgaaagccccaagaagaagaggaaagtctagttctgcagagggtgatgccattcgacgaacttgtttattgcagcttataatggttacaaataaagcaatagcatcacaaatttcacaaataaagcatttttttcactgcattctagttgtggtttgtccaaactcatcaatgtatcttagtaccgcattcatttcagtgagagcttactcatcagagttcgttacggctgcaatattgtgcaaattccgacagattaccgtatatatctattgaaatgtgtcttacttttgtgataaaatgatatgtctaaacatcaaaatacaccccgctgctgtgaggcagcggggtttaaatgacagctacggcacttaaatgcaattatgtcagattaagattgagcttgccccccctgacgagggagcttgcacggagactgagggagagaaggtcaaaaaccggcggatgattattgatttccgttcacaagccctccttcgcagcatacagccgccggccgagtgacgtccgtatcagactaacgcttatccatagaacggaaaaagccacagaaaagaaaaccgcagcgccctccgctcagaaaacatatgtgttaaataaaagcacgatgaaattccacctgccgagctgctcgtcctgctccaaaatcaaggccgagaataaaggcagctacaccggcagccgtgacgatctcatcggtcagggttattcgccctgtggcaactgccatccgtaataaattcgccccggataagctccggggcttgtcataggtgataatcatggacaatgtcgtcatatatgcccgctactcctccgacaagcagacggaggaatcgtcgactgcacgatcaaacatcgatcgaagctcaagactgtctggatcagcg

SEQ ID NO: 2214 - DNA, 966 bp, unidentified
  source 1..966: mol_type = unassigned DNA; note = Bacteriophage uvig_135797 from the Index of /pub/databases/metagenomics/genome_sets/gut_phage_database (ebi.ac.uk)
aagaaaaaacgcaaggtggagggagctgataagcgcaccgccgatggttccgagttcgaaagccccaagaagaagaggaaagtctagttctgcagagggtgatgccattcgacgaacttgtttattgcagcttataatggttacaaataaagcaatagcatcacaaatttcacaaataaagcatttttttcactgcattctagttgtggtttgtccaaactcatcaatgtatcttagtaccgcattcatttcagtgagagcttactcatcagagttcgataaaaaaacagcggtcgaatgttcgaccgctgataaaaatggtggagcatagcggattcgaacctgtatgcgcttgtgaccggggaaggcaggctggaggactggaaagagagtccgcgcaagtcgctgtgttccggcttcaatgcggctgacccggatgccatcatcgcatggaatcgccgcatggcagaccttgtgatgatggatgaactggcaaaagcgatccgcggacaggtaccggcacagacgcttccgaagcgtaaggcgctgacgaagattcagagacactggctggaaaagacgtccgtatcagactaacgcttatccatgcggcgaaatgcaggataatatttctcagtgtgaacgcggcgaagaatgttccgtcgaatatgacttcgataaagaaaagtacgtcgtttcttctactttggaaatcggctacttgcccgctgccgctgctaagattgtcgaagcgcaaggcgaagaaaatgtttctgtctatatcgcaggaatcaattcagacgatgaaggaattgattttgcggatgtgtatattttcccaaaaaagggtgattgattatgtcaatgaacgctgtcatctatgcccgctattcaagtcacaaccaaacggaatcgtcgactgcacgatcaaacatcgatcgaagctagacaccaagatacctagcg

SEQ ID NO: 2215 - DNA, 966 bp, unidentified
  source 1..966: mol_type = unassigned DNA; note = Bacteriophage uvig_240645 from the Index of /pub/databases/metagenomics/genome_sets/gut_phage_database (ebi.ac.uk)
aagaaaaaacgcaaggtggagggagctgataagcgcaccgccgatggttccgagttcgaaagccccaagaagaagaggaaagtctagttctgcagagggtgatgccattcgacgaacttgtttattgcagcttataatggttacaaataaagcaatagcatcacaaatttcacaaataaagcatttttttcactgcattctagttgtggtttgtccaaactcatcaatgtatcttagtaccgcattcatttcagtgagagcttactcatcagagttcgaggtatgctggattcgattccgcaacggcatcacacataaattcatgtactaatgttgcattaaaaatcggacagaattttacattctgtccgattttcattatacagggcgaaggcccgtttgcaaaagggaggtttctttatgaagagggtactgcttttgacgctctgcgcggcgcttctggaaatcggcaactgccttggcgaactcctccttggtcatgggagcgccatccttgcgggtctttttcttggacatgattttttctcctttcaaaatcttggagtcggaatcccgacgacgtccgtatcagactaacgcttatccatgtactccggatttggagtatgtagctatccttgcggattacttcggcgtttcgatggattggcttatgggccgatctgatgacggtagcgaactgatgcgcttgtactctttggcgagcgatgatgacaaacttgtcattgacacgattctgaagaagtacaagagagactaggacggcaaacaacactggggggcgctgacaaggcagtgctcccctgtctttgttcaagggtaacaggagcatcaagcatgagaaagaagattacaaaaaaacaggcggaagataaagtagcaatctaggaatcgtcgactgcacgatcaaacatcgatcgaagctatcgtcgatgatggttagcg

SEQ ID NO: 2216 - DNA, 966 bp, unidentified
  source 1..966: mol_type = unassigned DNA; note = Bacteriophage uvig_358290 from the Index of /pub/databases/metagenomics/genome_sets/gut_phage_database (ebi.ac.uk)
aagaaaaaacgcaaggtggagggagctgataagcgcaccgccgatggttccgagttcgaaagccccaagaagaagaggaaagtctagttctgcagagggtgatgccattcgacgaacttgtttattgcagcttataatggttacaaataaagcaatagcatcacaaatttcacaaataaagcatttttttcactgcattctagttgtggtttgtccaaactcatcaatgtatcttagtaccgcattcatttcagtgagagcttactcatcagagttcgggatgagtgaaagcaaccgcatctactttgataatcgggacgaacttataaatcgtggattcaggccttgcctaatctgtaaaccataaaaaaaatcccgcatcctgcgaaccaggacacgggacgcgccagcagtattgcagtactgctggcaagtgtaatcgtctaaaaagatacttggatttaggctgattcacggtatcattatatcatgaatcggccccattcgcctatgaaaggactgatttttatgttaaccgattcgatgaaccagaaatccaatgctgttatttatgcccggacgtccgtatcagactaacgcttatccattcaataaagtggtgggcccacttgggttcgaaccaaggaccaaccggttatgagccggtggctctaccactgagctataggcccaaaggataaggcgcaaggccttaccaaattattatacgcgaattagcgtatggcgtcaaggagagatttcggcttagaggaaatccttgattttttcccgtttgccccagttgcgcagtttgctcagggccttgccttcgatctggcggatacgttcacgggtgacgttgaagtgctggcctacttcttccagtgtgcgcggacggccatctttgaggaatcgtcgactgcacgatcaaacatcgatcgaagctaatcgaatccaatcacggcg

SEQ ID NO: 2217 - DNA, 966 bp, unidentified
  source 1..966: mol_type = unassigned DNA; note = Bacteriophage uvig_357839 from the Index of /pub/databases/metagenomics/genome_sets/gut_phage_database (ebi.ac.uk)
aagaaaaaacgcaaggtggagggagctgataagcgcaccgccgatggttccgagttcgaaagccccaagaagaagaggaaagtctagttctgcagagggtgatgccattcgacgaacttgtttattgcagcttataatggttacaaataaagcaatagcatcacaaatttcacaaataaagcatttttttcactgcattctagttgtggtttgtccaaactcatcaatgtatcttagtaccgcattcatttcagtgagagcttactcatcagagttcgaatctattgatgtgtacaacaacgaccgaattaaaatccactggaacatttaattttttaaccatgaaaagatattaggtatcgtccattgaaactggattgaaactggcaatacctaatattttttaaaatgaaaaagcacctgggtcaggtgctttacttcaatccttgtcatatagtcctgccagctcatggacccgctcccaggcagccttttttaacttatccggatccgaccgatacccctttaatgttggccgtggaattccgagttttctgctagtggccgataagccattggacgtccgtatcagactaacgcttatccatcttgggatggcgatattaataaaggagccaaaaagtctgggacggtttacttccctgttaaagacttgaagaacccttcaagcatttcgtcaatgcgtctaaaattcagcggtaacaatcaaaatcacattcttgatgaccatgattacgacattactttgcactttaattaaataagtttaaacccgtcgaaatcgacgggtttaaaaagtatctgcaaagaacacacattcgataaaggaggcaaacaatgaaagtagctgtctacattcgagtatcaacactagaacaggccgaagaggaatcgtcgactgcacgatcaaacatcgatcgaagctggataatatattgtacggcg

SEQ ID NO: 2218 - DNA, 966 bp, unidentified
  source 1..966: mol_type = unassigned DNA; note = Bacteriophage uvig_263250 from the Index of /pub/databases/metagenomics/genome_sets/gut_phage_database (ebi.ac.uk)
aagaaaaaacgcaaggtggagggagctgataagcgcaccgccgatggttccgagttcgaaagccccaagaagaagaggaaagtctagttctgcagagggtgatgccattcgacgaacttgtttattgcagcttataatggttacaaataaagcaatagcatcacaaatttcacaaataaagcatttttttcactgcattctagttgtggtttgtccaaactcatcaatgtatcttagtaccgcattcatttcagtgagagcttactcatcagagttcggatccttgaattttatgtcccggaataaaattttgggcacccggaaatacgagaacatctcgcccgactgcccatagaaatagtcaaacattctggtttcctcgcttatcctgccttgtcacatccttgacacctccgttcgtagtatgatgaaatatgtatgactatcgttatttttctttacaaagatggcctgccatgctacaatagccgcatctacggccaccggacaacaggaaaggagtatcttatggccaaaactgccgacaccattgccatctattcccgcaaatcccgctagacgtccgtatcagactaacgcttatccatcgggtggtatcaaaggtatccacggccttcatcagcccaatggttccaattgagatcaggtcctcctggtcgccgggctgggcgtagtatttctttgccacatgggccaccagccgcaagttgtgccggatgatcttctcccgcgcactcctgtcccccgcccgcagagccgcaaaggcttcgatctcctcccgcgcgctgagcggctttgggaaactccccgcttccagatgcagcgccagcaccagaaattttgtagcgaaaaattgcagcagcgttaatagcatacacagcacccccggaatcgtcgactgcacgatcaaacatcgatcgaagcttgcttcaacaaggtccggcg

SEQ ID NO: 2219 - DNA, 966 bp, unidentified
  source 1..966: mol_type = unassigned DNA; note = Bacteriophage uvig_148588 from the Index of /pub/databases/metagenomics/genome_sets/gut_phage_database (ebi.ac.uk)
aagaaaaaacgcaaggtggagggagctgataagcgcaccgccgatggttccgagttcgaaagccccaagaagaagaggaaagtctagttctgcagagggtgatgccattcgacgaacttgtttattgcagcttataatggttacaaataaagcaatagcatcacaaatttcacaaataaagcatttttttcactgcattctagttgtggtttgtccaaactcatcaatgtatcttagtaccgcattcatttcagtgagagcttactcatcagagttcgcagttttagaaactatagcatctatgctcaatgtgaatcctgcttggcttattggtaaatcagacattaaagaacgaaatgaagggaagacgaccaatttgttgttttcattggatcatttcattaattatgtaaagaactctaaatatctgacaatcggctcgaggcaagtcactgagcgagaaaaatatatgcttattaaaattctacaattggctaaagacatcttagataaaggggaatgatttaaatgggcgaaacatacggagtggtcaatagaaacgccatgcgtgtagcattgacgtccgtatcagactaacgcttatccataagagattgtcgtagacgaagaagatcttcatgtctactggaaatttgcataaaatatacgtggaacccttgctatcactggcttgggttcttttgcgtattaagagaatcttctccaaagtagatgtacttaatatgcaatggcatccgtctctcttattattctaaaagttttatttattcaggtcaataacacgagcaaaaataaaaggccctgtcatagtggcagagcctctttttcttattcgcgggaataaatgttaattaaaaacgaatttttcaaatttggaaacaccttaaggaatcgtcgactgcacgatcaaacatcgatcgaagctctattgtcaccacgtcggcg

SEQ ID NO: 2220 - DNA, 966 bp, unidentified
  source 1..966: mol_type = unassigned DNA; note = Bacteriophage uvig_171237 from the Index of /pub/databases/metagenomics/genome_sets/gut_phage_database (ebi.ac.uk)
aagaaaaaacgcaaggtggagggagctgataagcgcaccgccgatggttccgagttcgaaagccccaagaagaagaggaaagtctagttctgcagagggtgatgccattcgacgaacttgtttattgcagcttataatggttacaaataaagcaatagcatcacaaatttcacaaataaagcatttttttcactgcattctagttgtggtttgtccaaactcatcaatgtatcttagtaccgcattcatttcagtgagagcttactcatcagagttcgtttctggtggagctgatgggagtcgaacccatgtccgaaaagaaattagttagagtatctccgggcgcagtatgtttattggatttcccttggtgcgggcgaaggcaggtatagtataccatacttcctgccgctatgcaaggaggatacttatgctgaaccttatcgacgactacatgcaatgcattgatggtaaagtccctgacgactgcctgcgcctgctgcgcgacgaactgtccgagatgctgatgcactacaccatccagcccatcagcaccgacctcaccgtctacgagggctgacgtccgtatcagactaacgcttatccattaattaagccgtatagcggcagtgcttcatgcacactttaggattacgcaaaacgcgctccatagtaatatggggcgcgttttgctttataaagttcaacttgaacaaaataaaaaagcgcccccggcgctgcaacgccagggacgcttatgatagatcagcttgcccggaacggacaatatagaccctacaatctatataataccaccttcgggcaggctttgacaagtgtaccccggaggtattttttatgcgtgaatttaaacaggaagagctgctcccagcagtagcctactatcgggaatcgtcgactgcacgatcaaacatcgatcgaagcttgcatcgtctgtattcggcg

SEQ ID NO: 2221 - DNA, 966 bp, unidentified
  source 1..966: mol_type = unassigned DNA; note = Bacteriophage ivig_3933 from the Index of /pub/databases/metagenomics/genome_sets/gut_phage_database (ebi.ac.uk)
aagaaaaaacgcaaggtggagggagctgataagcgcaccgccgatggttccgagttcgaaagccccaagaagaagaggaaagtctagttctgcagagggtgatgccattcgacgaacttgtttattgcagcttataatggttacaaataaagcaatagcatcacaaatttcacaaataaagcatttttttcactgcattctagttgtggtttgtccaaactcatcaatgtatcttagtaccgcattcatttcagtgagagcttactcatcagagttcgacaatgctccaccaaaaaaaagagcgcagctatgctattttgttgcaaaatagcatagctgcgattctttttttgtacaattcactgctcaactgattgcgtatcgactcccggcgttttttgtattgctgcataaatgtcatgtactcggggctacatcaatataacggtcgttgctttctttggtggctgtgtgctgatagccgaagtccctaaaaaccaaaaggctcttgttgacatgaacggtacattaccgtcagcgttggtacaccgaccacctaaagtcataacccccaccaggacgtccgtatcagactaacgcttatccatataaacaacttccagtttgccgtactcgttccagcagggtttggggcaggcacgccccaacaagaagctgtcccaaagtggcaagaattttcaagaattgaaaatttgtggccacgggacgattcttgctctcacctttttcgctgcgtttcgcaattttcacatttcaatctgctcgcagattgttgacaagctgcgcttgacccgatactataaaggcaagtcgaatacacgccaaggaggtgcaaccatgaccgccgtgatctacgcccgctattcatccgacagccagcgtgaagcggaatcgtcgactgcacgatcaaacatcgatcgaagctagcaatctgtgctagtggcg

SEQ ID NO: 2222 - DNA, 966 bp, unidentified
  source 1..966: mol_type = unassigned DNA; note = Bacteriophage uvig_584312 from the Index of /pub/databases/metagenomics/genome_sets/gut_phage_database (ebi.ac.uk)
aagaaaaaacgcaaggtggagggagctgataagcgcaccgccgatggttccgagttcgaaagccccaagaagaagaggaaagtctagttctgcagagggtgatgccattcgacgaacttgtttattgcagcttataatggttacaaataaagcaatagcatcacaaatttcacaaataaagcatttttttcactgcattctagttgtggtttgtccaaactcatcaatgtatcttagtaccgcattcatttcagtgagagcttactcatcagagttcgacaaagttgtgattgtcaacggagatgttgagatccagctacaacggttttgatattaaataaggaaacaactagcacaaactatatgccatgcctatgatatatagtttgtgctagataccacatataacgctatacatggaggtgctggcatgaggacgagggaaaaaaaactgtcggattacggtgtaccgaacaccctatacagagagataaaagagcggtgttgcaacagtacagacgaggatcgagaaacgcttcatcttgtttgctatctcaatacgcctgcatgggtatcgcgacgtccgtatcagactaacgcttatccatgttgcggtgtgcggagaagattgcagtctgtacggatatatgtggacatttgcaacgaatgtaacgtttgcaatcggtgaaatccttaattgcgagcaaactatcaatccagagaaaatttattataagcgggattggatgaactgcatctttatctatgtggacaattgataaagatatagataagtgataaaatgtgccatgtatagcgttatatgtggcacatttttaaatcacaggaggaagcaaaatggaatgtgtcgcatatttgagagtatcgacagaaaaacaggcagaagaggaatcgtcgactgcacgatcaaacatcgatcgaagcttatatcagtcggtgaacgcg

SEQ ID NO: 2223 - DNA, 966 bp, unidentified
  source 1..966: mol_type = unassigned DNA; note = Bacteriophage uvig_80961 from the Index of /pub/databases/metagenomics/genome_sets/gut_phage_database (ebi.ac.uk)
aagaaaaaacgcaaggtggagggagctgataagcgcaccgccgatggttccgagttcgaaagccccaagaagaagaggaaagtctagttctgcagagggtgatgccattcgacgaacttgtttattgcagcttataatggttacaaataaagcaatagcatcacaaatttcacaaataaagcatttttttcactgcattctagttgtggtttgtccaaactcatcaatgtatcttagtaccgcattcatttcagtgagagcttactcatcagagttcgagcatataatacttaaacaagatgaaatttacatagaatggcgaattaagtagccgtttctatgttttttttcgacttttttacgtcccttaatgaaacaactttctctcgcttcggacattgcctcgtctctgtctttcccctttaatggcaatccttccttttctccgccgtatcttttttccagcttttcccgctctttttcgttgccctctctgcattcccgcgctgcgtccttttccgttagccctttttctctgagcgcgtcccacacctctttgggcgactttcctctcgtgtgacgtccgtatcagactaacgcttatccataattgtatttttaatcaattcggttccgtccgaagctatttcaaattaagaggcagaaatacaaatccctaccgtaaaaatagactaacaaaaacttgtcgttttttcaacgaggttgttaaaaactataaaaataaattaaggagattgtacaacgaaatgccgacaattaaatttttcagaacaagttttcgttctattacaataaacaaagattgtcgatttgacgactcaacaaacgaggtgaaaaatgcgggcaggtttgcaaattcgcgtatcaactcttgaacaggctattgaggaatcgtcgactgcacgatcaaacatcgatcgaagcttactctgataatctgacgcg

SEQ ID NO: 2224 - DNA, 966 bp, unidentified
  source 1..966: mol_type = unassigned DNA; note = Bacteriophage uvig_10984 from the Index of /pub/databases/metagenomics/genome_sets/gut_phage_database (ebi.ac.uk)
aagaaaaaacgcaaggtggagggagctgataagcgcaccgccgatggttccgagttcgaaagccccaagaagaagaggaaagtctagttctgcagagggtgatgccattcgacgaacttgtttattgcagcttataatggttacaaataaagcaatagcatcacaaatttcacaaataaagcatttttttcactgcattctagttgtggtttgtccaaactcatcaatgtatcttagtaccgcattcatttcagtgagagcttactcatcagagttcgattatggaaaatcaatttttgaaactataaaacctaaaatttattccgaatacaacaaaatttggggatggggattaaaattcttaccatgaaaaaaggcttgcaaaacgcaagcccgatggacaaaccatctgcctccaagctattggattacttgtattatatgcgataatttaccgtttgtcaaccccttgttgacttttttccaaaatcttattaaataatactctctaaaagaaggtgataatgtatgtcgattattaaagcagctctttacgtcagagttagcacgatggaacagacgtccgtatcagactaacgcttatccatatatcatagttgacggcagcagaatcacagtaaatttacggctcaaaaaataattcaacctaaaaaaagaggcttttttataataaaaacctctttttttcttgacaaatatatttaacggctctaaaatagaggtgaagctcagaaaaattgaatagtccattggcgcaataatgaagtaacgctataaatgttaacttcaatagggcgataaaatattatatcggaaacataagctcaatatcgaaatccaggccgttttcctcggccgaatcccagcaagctataagctcaagacacggaatcgtcgactgcacgatcaaacatcgatcgaagctcaagaattactccacacgcg

SEQ ID NO: 2225 - DNA, 966 bp, unidentified
  source 1..966: mol_type = unassigned DNA; note = Bacteriophage uvig_226352 from the Index of /pub/databases/metagenomics/genome_sets/gut_phage_database (ebi.ac.uk)
aagaaaaaacgcaaggtggagggagctgataagcgcaccgccgatggttccgagttcgaaagccccaagaagaagaggaaagtctagttctgcagagggtgatgccattcgacgaacttgtttattgcagcttataatggttacaaataaagcaatagcatcacaaatttcacaaataaagcatttttttcactgcattctagttgtggtttgtccaaactcatcaatgtatcttagtaccgcattcatttcagtgagagcttactcatcagagttcgcatggaaatatatgtccatagaagaacaacagaccacattgagaatgttaataaatagaattacaatcaatgataacaatatcaatatagatttaaaatgatttttcgactaagtacaatcatcggaaccgcataggtggagaactttacgcccagtgcaggattgaagttgtcgatggatttgatcagaccgatgcatccaatctgaaagagatcatctacgttctcgtggttcccggaaaagcgcttgattacacttaagacgaggcggaggtttcccttgatgtaagtttcgcgggcgacgtccgtatcagactaacgcttatccatactaccaatatatagaaagaaggtgagaaaaataagttttgttatcaatgttacaaaaaacgggaaggaaattcatgatccaatcttatcaaatccgtcttatcttatctttattcaaaaaaaaagaaaacaactcaatgacatttcgacaaaaaatgcagataaatgaatatagttgaaagcaataaatagacatgatataataggtgtgctgaaacaaagtatacctattattttttatgaggaatttatggagaaaaacaagcatataaataaaattgcagcaatttatattagagtggaatcgtcgactgcacgatcaaacatcgatcgaagctaatgcagttctgttcgcgcg

SEQ ID NO: 2226 - DNA, 966 bp, unidentified
  source 1..966: mol_type = unassigned DNA; note = Bacteriophage uvig_143228 from the Index of /pub/databases/metagenomics/genome_sets/gut_phage_database (ebi.ac.uk)
aagaaaaaacgcaaggtggagggagctgataagcgcaccgccgatggttccgagttcgaaagccccaagaagaagaggaaagtctagttctgcagagggtgatgccattcgacgaacttgtttattgcagcttataatggttacaaataaagcaatagcatcacaaatttcacaaataaagcatttttttcactgcattctagttgtggtttgtccaaactcatcaatgtatcttagtaccgcattcatttcagtgagagcttactcatcagagttcggggcaccatataaatctcggtgagtaaggtatgaatcaacaagaacaggcaataacttgtatatggaatatgaaataacagtaagcatcaatggagtccaagtgagcatggaggagtatcgacagcacgattttagccgctcgatatcgaataacagtaggtcaaaaacagtagaaattaaggaggcagtatgatatactaagggagtcgaaagactcccttagtttttttttggttaaggaggaacattatggttactgcgctatacgcacgagtatctaccgatgcacaagccgaagagacgtccgtatcagactaacgcttatccatttaaacagataaccataacccacgataaaataaacatagatttcaatttatagggaggttcgacgtggtacattcatgcctatgatcattggagagttacgtcgatacctgcgagacaacacagcactaagggtaagccgctcaatacgagatactgcgtataaggcgctgaagaaacgcacggagctgatggacgagctttcacgcgagcctaaactcggtgaaatagcaaaggcgcttgatatgaaagaagaggacgttgccttcgcactcgaagccatacaggatcccgtttcgttaggaatcgtcgactgcacgatcaaacatcgatcgaagctaggataacagacgatgcgcg

SEQ ID NO: 2227 - DNA, 966 bp, unidentified
  source 1..966: mol_type = unassigned DNA; note = Bacteriophage uvig_579072 from the Index of /pub/databases/metagenomics/genome_sets/gut_phage_database (ebi.ac.uk)
aagaaaaaacgcaaggtggagggagctgataagcgcaccgccgatggttccgagttcgaaagccccaagaagaagaggaaagtctagttctgcagagggtgatgccattcgacgaacttgtttattgcagcttataatggttacaaataaagcaatagcatcacaaatttcacaaataaagcatttttttcactgcattctagttgtggtttgtccaaactcatcaatgtatcttagtaccgcattcatttcagtgagagcttactcatcagagttcgtactttgaaacgagtaaaaagacaaaatggaatagttatgctcatcgcagataataaagagtatagtccgatggtaattactccggatacaccggcccgtattattggaaaagctatgaaagtaagttttgatctataaaaaaagcacattcccggtcgccaaactagaaaatgtgctcaaaaattttgaaacctagggtataggtctctttcttgtaccctattttaacaaaaatatggggggtttactatgaaatttgctatttatgtacgtgtatctacacttgaacaagctgaggagacgtccgtatcagactaacgcttatccattagtttatccagataagctagaaattcactggaagtttgcgattaatcagtaaatttaatatatttcatttcaaccaatgtaaagccttttttgacacgccaaagactgtagtagataaagccaatatttttggctttttttatttttttgattattgaaccacagaaatcttaataattttaaacactccctgagcgaccatagcttgttcttccacatctttttcattgtatccatgcaaatacattgataacgtccgacctttccaatcaatataaatgactttgtacatttgaaggggaatcgtcgactgcacgatcaaacatcgatcgaagcttacctactagagaagccgcg

SEQ ID NO: 2228 - DNA, 966 bp, unidentified
  source 1..966: mol_type = unassigned DNA; note = Bacteriophage uvig_596872 from the Index of /pub/databases/metagenomics/genome_sets/gut_phage_database (ebi.ac.uk)
aagaaaaaacgcaaggtggagggagctgataagcgcaccgccgatggttccgagttcgaaagccccaagaagaagaggaaagtctagttctgcagagggtgatgccattcgacgaacttgtttattgcagcttataatggttacaaataaagcaatagcatcacaaatttcacaaataaagcatttttttcactgcattctagttgtggtttgtccaaactcatcaatgtatcttagtaccgcattcatttcagtgagagcttactcatcagagttcggtgtaaaaagaattgaggaataaaacagaaaaacaaaggcgggataatcctgtcctttgtttttttatgaacttttatacgaaatgcattgcggtttatttataatcagtctatacttaaataaaaatccccggcgggcaccggggacgaagcagtctctgaagtgactacctacatacatactataccacttcggagacagccttgcaatagcagggctgtatttttgtaccaaaaaggaggaatcaccatgcaaaaaagatgttttatttacatccgggtatccacccagcggcaggcgacgtccgtatcagactaacgcttatccattcgaacacatcggcatcgacggcgaagaagtgcacatacactgggcattttaattctaaagcacacactataccagtttatacaaatggctttaaccatttatataaactggcatagtatgaaaacgtccagcagacaaagaaagagccggaatcttcccggccctttctcttacccctcacctatttattccattttcagtgttctcttcattttccctctttcaaaattcaatacaaattcctgcggcataggttgccgcataagtctgtccatgtcttccagtgttatcgaattcatggaatcgtcgactgcacgatcaaacatcgatcgaagctctgagtacatctagtccgcg

SEQ ID NO: 2229 - DNA, 966 bp, unidentified
  source 1..966: mol_type = unassigned DNA; note = Bacteriophage uvig_381385 from the Index of /pub/databases/metagenomics/genome_sets/gut_phage_database (ebi.ac.uk)
aagaaaaaacgcaaggtggagggagctgataagcgcaccgccgatggttccgagttcgaaagccccaagaagaagaggaaagtctagttctgcagagggtgatgccattcgacgaacttgtttattgcagcttataatggttacaaataaagcaatagcatcacaaatttcacaaataaagcatttttttcactgcattctagttgtggtttgtccaaactcatcaatgtatcttagtaccgcattcatttcagtgagagcttactcatcagagttcgcgaaactttaataaaaaagaggtgaaatacgagaagtataaggaattagccgaaactttaaatatagttttagatgcttaatataataaaaaccggctcctgcgccaacaggaaccggcaagtaacatcccgaagaatggtaccaatttcgcaaaaatattgtatcatcttcggaggcagtctgcaagcagaactcgcgttctttgctggctgttatttttgtacccatttttaagaaggtgaagatgatatgaaaaacaaaagaaaagaaatccttcccgggctttcggatatggtagagacgtccgtatcagactaacgcttatccatacaagattgtcgtcttgaacgaaaacgttgaaattcactggactttctgttagtataaaacccgcaaagccctatgctctgcgggttttcctatgtcacctatttgagacgcttatcaatatagtcgcagttagtggctagttcaaagttgccctgcccacgttgttcacccaaggaatcacaggtcagccgcgtccccttagccgaaacctatatctgtattttatttactcattttcattcttgccgcaaagataatcaataaactgctgtgccgtcctgcccgacagtccaccatgcggaatcgtcgactgcacgatcaaacatcgatcgaagctccttccattaatcctccgcg

SEQ ID NO: 2230 - DNA, 966 bp, unidentified
  source 1..966: mol_type = unassigned DNA; note = Bacteriophage uvig_146439 from the Index of /pub/databases/metagenomics/genome_sets/gut_phage_database (ebi.ac.uk)
aagaaaaaacgcaaggtggagggagctgataagcgcaccgccgatggttccgagttcgaaagccccaagaagaagaggaaagtctagttctgcagagggtgatgccattcgacgaacttgtttattgcagcttataatggttacaaataaagcaatagcatcacaaatttcacaaataaagcatttttttcactgcattctagttgtggtttgtccaaactcatcaatgtatcttagtaccgcattcatttcagtgagagcttactcatcagagttcgtagaatccatcaccgtagacggacgcaagatatccctcaaatggcgcatttagagcggtttcttagactttcacaaatttatatgtactacgtgcatggccttcggctgtaacgccgctggagtaatcggttgccgcattattgattcaccgcgggaacggctgattgccattttaactaacagtttcactccctgcaatggccgcctgcccatgctgattgccctgctgactatgttttttgccgccagcaattcactgtttgcaccattactgctgatatgcgttattttatttagctgacgtccgtatcagactaacgcttatccatcaaagtatagtgatggtttccaatcttaagcaaacactcagtggcggcatctactgagtgttttttgtttcataaaatatttaataaaatcaaaaagccccctgtgttaccagcacagagagccttggcatcggtatgttaccagcataccgacatataaaccgctggaatatgcaaccaacggactaaccacccttattttagcatattctggcggtatcatcaaataaaataatcatgaggtgatactatgtcccaagatatgattgttgtgggctatgttcgtgtttccacggagcaggaatcgtcgactgcacgatcaaacatcgatcgaagctgttcgacggtaatctccgcg

SEQ ID NO: 2231 - DNA, 966 bp, unidentified
  source 1..966: mol_type = unassigned DNA; note = Bacteriophage uvig_423324 from the Index of /pub/databases/metagenomics/genome_sets/gut_phage_database (ebi.ac.uk)
aagaaaaaacgcaaggtggagggagctgataagcgcaccgccgatggttccgagttcgaaagccccaagaagaagaggaaagtctagttctgcagagggtgatgccattcgacgaacttgtttattgcagcttataatggttacaaataaagcaatagcatcacaaatttcacaaataaagcatttttttcactgcattctagttgtggtttgtccaaactcatcaatgtatcttagtaccgcattcatttcagtgagagcttactcatcagagttcgtaactgttggatgtttcctgattggtgccatagtggtgcttataaaattaaccataaccaaaacatttgttgatagtgagggacttcccattctttaatgtaaaaacgccccactgcttaaaacagtagggcgatgatatatacaaaaccgagaggccttatatacatccttagacaagattattatatcagacctcccggtaaaactcaataccgggtatttttatacctttttttaggaggaactgatatgaaacatgttggactttatatccgcgtcagcacagaggaacagactgagacgtccgtatcagactaacgcttatccatatcatattgatatagacggcgaaaacgtcgtaatacactgggtttttgagtaatctcttttttattcttttcgagtgcgaatagtgacacttctcctgaaagacgttactattcgcaataaaaaagacacgttcaaaacgtgccctagttgatcaaatttactttcttcttaaattcccgtacaacttcctcaaccgtcaacccctggagtcgatcctgcgtttgctggataatgccattcacaaccccattcttgtagaacacatccaaatagtaacctttgtactcttgtgcgattttggaatcgtcgactgcacgatcaaacatcgatcgaagctacctgcgacactagcatgcg

SEQ ID NO: 2232 - DNA, 966 bp, unidentified
  source 1..966: mol_type = unassigned DNA; note = Bacteriophage uvig_441018 from the Index of /pub/databases/metagenomics/genome_sets/gut_phage_database (ebi.ac.uk)
aagaaaaaacgcaaggtggagggagctgataagcgcaccgccgatggttccgagttcgaaagccccaagaagaagaggaaagtctagttctgcagagggtgatgccattcgacgaacttgtttattgcagcttataatggttacaaataaagcaatagcatcacaaatttcacaaataaagcatttttttcactgcattctagttgtggtttgtccaaactcatcaatgtatcttagtaccgcattcatttcagtgagagcttactcatcagagttcgaaatcgaagtcgtcggcggtgacatgaatgtctatttttttgacaccaaataaacattggttagtaccaacgtattgtccctgaccatccagacgttggtggagttgttccatcttgagaaatagcatagctgatttcttcggcagatacgcctttaccagggtcacctttcaatggttctgtttgtttaacgccctcatcatcctcaatcgtaagcgagctgtcatcgttaattgtgatgataggacttttccctggttctcctttcttaccatcatcaccttttgacatactccatgtgacgtccgtatcagactaacgcttatccatacacactattttaataggtaaaatagctagcaatcatatcgagataatacttaattatcgatatttactatatatatttccattgataaatattggttatttcttatattgggcttcacaaggaatacaagcccactcgttcgtattcaattaaaaacacgccctcccctcacagaatggcgtgctaagcaataaacaataaggcttatttgctatgcctattttaacaattaataggatgtgattcaatatgaaaaaagccggtatttatattcgagtttcaacaccggaacaagaaaaggaatcgtcgactgcacgatcaaacatcgatcgaagctgtgccggcatcacttatgcg

SEQ ID NO: 2233 - DNA, 966 bp, unidentified
  source 1..966: mol_type = unassigned DNA; note = Bacteriophage uvig_426061 from the Index of /pub/databases/metagenomics/genome_sets/gut_phage_database (ebi.ac.uk)
aagaaaaaacgcaaggtggagggagctgataagcgcaccgccgatggttccgagttcgaaagccccaagaagaagaggaaagtctagttctgcagagggtgatgccattcgacgaacttgtttattgcagcttataatggttacaaataaagcaatagcatcacaaatttcacaaataaagcatttttttcactgcattctagttgtggtttgtccaaactcatcaatgtatcttagtaccgcattcatttcagtgagagcttactcatcagagttcgagcttcggattcagccaataacacggaaaaaacgaccccttcaaccgaagagcaagttgttgttaataagcctaaaaatgtggaatatactggagagccttttgcggaatttgctgcaaaatatggaatgactgtcgaagaattagctcaaatgaataatttttccgatcctagtcaaatgatattgatgaaagggcaaactgtaactgtcaaataaataattaatttttaattattaggagttgatacaatgaaaaaagcaggcttatatattcgggtttccactccgcaacaagaaaagacgtccgtatcagactaacgcttatccatagattgaggttatcgataatgaaataactatatatttttatgtgtccatttaagcaatcacttgcatatttgctgggtgccgtagaatccaagcagatgcgatacgaacattcctgagatagtttccattaaataaagggtttcttctttttttaaggtaaaatattgccagctgccaaatatacttcataccattcttggcgtgtcaacacaatcgtagatgccttagcgatctcttcgatacgatgcggcgtcatcgtgcctgcgatcacctgcattaacggaaatttggacacgtaaggaatcgtcgactgcacgatcaaacatcgatcgaagctttggtggccattgaagtgcg

SEQ ID NO: 2234 - DNA, 966 bp, unidentified
  source 1..966: mol_type = unassigned DNA; note = Bacteriophage uvig_287690 from the Index of /pub/databases/metagenomics/genome_sets/gut_phage_database (ebi.ac.uk)
aagaaaaaacgcaaggtggagggagctgataagcgcaccgccgatggttccgagttcgaaagccccaagaagaagaggaaagtctagttctgcagagggtgatgccattcgacgaacttgtttattgcagcttataatggttacaaataaagcaatagcatcacaaatttcacaaataaagcatttttttcactgcattctagttgtggtttgtccaaactcatcaatgtatcttagtaccgcattcatttcagtgagagcttactcatcagagttcggaggtactgtccccctccacccaatgccacgaccggctgaccaagtataacctgtacgagcgtgccggagtgccggagtattggattgtcagccccgaggagcgcaccgtacaggtcagcaccctggtggatggccgctaccgtgtccaggagctctacaccgctgaggccgtggccaaggtcaacaccctgtctggctgctttatcgagctgtccaaggtgttcccggcagagcagtgagggccgccctatggacgaatattgcctgtatctccgtaaatcccgtatagacctggaggcgacgtccgtatcagactaacgcttatccatacatgaatctctatgtatttccacgtgtcgaaacggacggcgagcaattatagtcattgcagggggcttatatggttttatacttatagccaaataagttatatgtgataatttttcaagaaaaagcgggtgccatagtcaggtacccgctttttcttcccccatatctttttcgatcaaccccacgatataggcgttcaggctcatgccctcctgctgggcgcgggcctttattttctccttcgtgcctccctgcacacggatcgtgatgtgatccagcttttccaggtaccgtttattggaatcgtcgactgcacgatcaaacatcgatcgaagctgttaccaaggcagtcgtgcg

SEQ ID NO: 2235 - DNA, 966 bp, unidentified
  source 1..966: mol_type = unassigned DNA; note = Bacteriophage uvig_61588 from the Index of /pub/databases/metagenomics/genome_sets/gut_phage_database (ebi.ac.uk)
aagaaaaaacgcaaggtggagggagctgataagcgcaccgccgatggttccgagttcgaaagccccaagaagaagaggaaagtctagttctgcagagggtgatgccattcgacgaacttgtttattgcagcttataatggttacaaataaagcaatagcatcacaaatttcacaaataaagcatttttttcactgcattctagttgtggtttgtccaaactcatcaatgtatcttagtaccgcattcatttcagtgagagcttactcatcagagttcgacggcggatggaacagccgatgctcaatgagcttcattaccgcatagcggcggggtatattcgcaagctcctcgtagatggattgttgaccgaagccgaataccgcacagccgaaaacaggctggcggagcgctataacccgctgcgaaggcttgaataaagccttcgcagtgtgcatgaattgccgtggatattggggtaacgttgtggtatcgtgtgttgctaataagagcgggaaggagtgagatagatgcccgaaatacgctatataccagcggttggcgctccagaaaacgccaagacgtccgtatcagactaacgcttatccattcacgtttaggctgataaatggcttggagcttggaggtgacttcgatggctaaaaatcgctatctgccctttggctatatgatacgcaacggcgagatcgtcattaatgagcaggaggccgcgctcgtccgtaccgcctttgaggaatatatgacaggcgcatcctacgccgctgttgcggaaacgctccaagccacgggcatacgttatcattcggatacgcctttgtggaacaagcacatggtcaagaggatgctggaaaacagccggtatgcaggaacagacgattgtccccgcataggaatcgtcgactgcacgatcaaacatcgatcgaagcttgcgacacaagtcgtgtgcg

SEQ ID NO: 2236 - DNA, 966 bp, unidentified
  source 1..966: mol_type = unassigned DNA; note = Bacteriophage ivig_3872 from the Index of /pub/databases/metagenomics/genome_sets/gut_phage_database (ebi.ac.uk)
aagaaaaaacgcaaggtggagggagctgataagcgcaccgccgatggttccgagttcgaaagccccaagaagaagaggaaagtctagttctgcagagggtgatgccattcgacgaacttgtttattgcagcttataatggttacaaataaagcaatagcatcacaaatttcacaaataaagcatttttttcactgcattctagttgtggtttgtccaaactcatcaatgtatcttagtaccgcattcatttcagtgagagcttactcatcagagttcggagtattgagaataccctttcaagatgccatctacaattttttgtccaagttctgttgtaaatttataattaatcaacatccccatcccctttacaataatttcaatactatttttatcatattcctatcaattacataagtaaacaattcgcaacaaaaatcgtcatttttttaaagtgacgatttttgttgcgaactcttgttctttttttaaattatgaaatatagtaaggagaggaggcgatttttatgattaaaaaacgtgtagggctttacattagagtttcaactgaagaacagacgtccgtatcagactaacgcttatccatctaccgcatctgttaaaaaggtttatgacgttaagctggtcagatttttttagtttttatgtctacttaacacagacgaaatgctcctgattcaacagtctcaattcatcccgcaacaactcataggcgtcttgcggcgaacgaatcgtcggcatactcactttcggttcctcgacgtatcgaatcccgatcgtgaacgcggcgaggagttgctccgccttcttcttcgtcatcccttcgattttgcataaatcgtgaacggacgcttgtgacaacgcccgtaacgtcgggtagacgtccggaatcgtcgactgcacgatcaaacatcgatcgaagctccaactctcaggcgattgcg

SEQ ID NO: 2237 - DNA, 966 bp, unidentified
  source 1..966: mol_type = unassigned DNA; note = Bacteriophage uvig_541020 from the Index of /pub/databases/metagenomics/genome_sets/gut_phage_database (ebi.ac.uk)
aagaaaaaacgcaaggtggagggagctgataagcgcaccgccgatggttccgagttcgaaagccccaagaagaagaggaaagtctagttctgcagagggtgatgccattcgacgaacttgtttattgcagcttataatggttacaaataaagcaatagcatcacaaatttcacaaataaagcatttttttcactgcattctagttgtggtttgtccaaactcatcaatgtatcttagtaccgcattcatttcagtgagagcttactcatcagagttcggggggatcgaacccctgacctcaagattgcgaaccttgcgctctcccagctgagctaatgccccaatagttagtattatagccctttccctaaattcacgcaagagaaaatagagggttggatgacaatattatacgacgtcgtcagcctgcttcgcgtttttcccagcatcggggccaatctggagccctattcgaaaaaggaaaatggagaaaaggccataacgtcggcgccaaaccgtgtccttcggactgggcgacgaattaaatccgtccttaaacatgtttttcggactttcgcgacgtccgtatcagactaacgcttatccatgttgaagaaggacctcatcgccctcatcatcgataacggaattgcgccggctctacctgaaggatctaggcatttctaccggctcgaagaaacagaataaaagaatcccccaccgtgcgggaacacgatgagggacgcgcagcaggtattaccagtaccgtactgcagtataatctacccactctggaggtcgactatgtattatattataacatttcggccccctttcgcatagaaggaggctattcttatgcaaaaaaatacaactgttgaaaccacaacaaaggctgtcatttatgcggaatcgtcgactgcacgatcaaacatcgatcgaagctctcggcacgtaagcattgcg

SEQ ID NO: 2238 - DNA, 966 bp, unidentified
  source 1..966: mol_type = unassigned DNA; note = Bacteriophage uvig_396371 from the Index of /pub/databases/metagenomics/genome_sets/gut_phage_database (ebi.ac.uk)
aagaaaaaacgcaaggtggagggagctgataagcgcaccgccgatggttccgagttcgaaagccccaagaagaagaggaaagtctagttctgcagagggtgatgccattcgacgaacttgtttattgcagcttataatggttacaaataaagcaatagcatcacaaatttcacaaataaagcatttttttcactgcattctagttgtggtttgtccaaactcatcaatgtatcttagtaccgcattcatttcagtgagagcttactcatcagagttcgacgaaattcatttacttgataatagtaaattcaagataaaattcaatctataataggcataaatttaaactgggcaggatgtgcagctgctattagtgcaaaagagcaggattaacctgcccgttacccaaagcctctaaaatctgtgctcttcacttcatcagatttaagaggttttttattatgtcgctacttactccgaagtgcactaaaaacatagttactattgaagcgagtataaatattatgcatttctttaggcttttccttttttctctatctttttcatttccttcgatagacgtccgtatcagactaacgcttatccatatagctcacgctaaagctattgaaaaattatgtagcttaaaacaaatagttgaggcaataaaaagtggtgctaatgatagatatgaaattgctgaatatcttactataacagacaaattctttgatgaagcaataaactaccatagacaaaaaaatggattagtctgtaaatatgaaggggtatggatatactttgaacctagtttcggtatactaagggataatattttttaattttgggaggttacttatgagtagaattgcaatatattctcgtaaaagtaaagatactgatactggggaatcgtcgactgcacgatcaaacatcgatcgaagcttacagccatatcatgttgcg

SEQ ID NO: 2239 - DNA, 966 bp, unidentified
  source 1..966: mol_type = unassigned DNA; note = Bacteriophage uvig_301458 from the Index of /pub/databases/metagenomics/genome_sets/gut_phage_database (ebi.ac.uk)
aagaaaaaacgcaaggtggagggagctgataagcgcaccgccgatggttccgagttcgaaagccccaagaagaagaggaaagtctagttctgcagagggtgatgccattcgacgaacttgtttattgcagcttataatggttacaaataaagcaatagcatcacaaatttcacaaataaagcatttttttcactgcattctagttgtggtttgtccaaactcatcaatgtatcttagtaccgcattcatttcagtgagagcttactcatcagagttcgatgagatcgacgattccacgccctccccggaggtttttctgaaatacgcagactactttgacgtgtcgctggactacattttcggcaggacggacgacccacacggcatgatctataacaactgtgtgaagctcggcctgaacaatcccgaaatggcgcggttcgtggaaatgtgcttcgaccccggctcggctatgaacgaaagactgaaggcaacgcttgtgcagatgctctcggaggtggatacgaaatgaaagccgtgatttacgcccgctattcctcggacagccagcgagaagagacgtccgtatcagactaacgcttatccatatgcacacggaaatgcacacgaaaaccggactacttgtccgggtgaaggatagcctccagcccttcctcaatgacatcgtcatataaacgttcgtcctcgcggaaaatgtgctggtatgtggtcttgagcatgttgggcgtggcatgccccatgcgcttggcgctgtacttgtccggtatcttcgcctccagcataacagaggcgttcacatggtgcaggtcatggaaccgataatgcggaatgcccgccttttcacagatacgggaaaagccacaatacacgacaaggttagccaatccggaatcgtcgactgcacgatcaaacatcgatcgaagcttaagccgaactgctggaccg

SEQ ID NO: 2240 - DNA, 966 bp, unidentified
  source 1..966: mol_type = unassigned DNA; note = Bacteriophage uvig_430479 from the Index of /pub/databases/metagenomics/genome_sets/gut_phage_database (ebi.ac.uk)
aagaaaaaacgcaaggtggagggagctgataagcgcaccgccgatggttccgagttcgaaagccccaagaagaagaggaaagtctagttctgcagagggtgatgccattcgacgaacttgtttattgcagcttataatggttacaaataaagcaatagcatcacaaatttcacaaataaagcatttttttcactgcattctagttgtggtttgtccaaactcatcaatgtatcttagtaccgcattcatttcagtgagagcttactcatcagagttcgtcattaatttagtatggagggtattgtcttgcttaaaatgatcctttggatatgcatactcacattagtctttgcggcatttatgaattttctgccctatattttagtaatagctggatctattgctatttactgtgttgggtatcgaataatcaattttgctaaacataaaagataaaaaactaaaccggtcgatttcgaccggtttaaaaagaacgcaaaaagaacatacgtacgaaaggagaataacatgaaagtcgctctttacgtgagagtttcaaccctagaacaggctgaagagacgtccgtatcagactaacgcttatccatttagttctattgatgtcacaaacgaaaatgtaacgattaactgggatttctagttaactgttatttttttgaatagatttagagagtgtaatttcaataacgttctctaaaactattaaaaaataattttctacattaaattaggattgtaaaatacaaaataacccgacacctcaaatgaagtgccgggttattttgtaccactcaaaaatcagtatagcatacttttatcggtgcaatttaacgttgctttgcaccgataataaaaaagagccttcattgcgaagaccctctggaagaggaatcgtcgactgcacgatcaaacatcgatcgaagctagtgcgtaacgatatcaccg

SEQ ID NO: 2241 - DNA, 966 bp, unidentified
  source 1..966: mol_type = unassigned DNA; note = Bacteriophage uvig_425764 from the Index of /pub/databases/metagenomics/genome_sets/gut_phage_database (ebi.ac.uk)
aagaaaaaacgcaaggtggagggagctgataagcgcaccgccgatggttccgagttcgaaagccccaagaagaagaggaaagtctagttctgcagagggtgatgccattcgacgaacttgtttattgcagcttataatggttacaaataaagcaatagcatcacaaatttcacaaataaagcatttttttcactgcattctagttgtggtttgtccaaactcatcaatgtatcttagtaccgcattcatttcagtgagagcttactcatcagagttcgcagctttaatgttcaaaattttgccatgtatgatagtaactctgaattagctgatttcgatgcgagcacgtatcaaaacaatatacctaatgatatagctgctggaatgaaagctaatataactttttacttctcttcaaaaggttctggtccatatgttgttacatttggagatggtatgtggaagtaataaatatctcttctctggtgagttcaagcgtgttcgattcacgctaagggcttcaatattatgaaaggagaaagtgaattggataaaaaagcagctatctatatccgtgtgacgtccgtatcagactaacgcttatccatttcaaaaggtcattattcatgacaattccatagaaattatacttgttgagtagtgttgtatcttgatgtacaacattgctctttattttcaaaaagatcagtgcgctaactaaacataataaaaacccgcgaagttttattcgcgggtttttttatgttctaaattgagcatcgtacagccgacgatagtggcctctttgcgcgtacaaagtttcatgtgttccatcttctaaaattccttggtcactaactacgattattcgatcagcatgtttaatcgttgccagtctgtgggcaataggaatcgtcgactgcacgatcaaacatcgatcgaagctgaatcctatgcgcctcaccg

SEQ ID NO: 2242 - DNA, 966 bp, unidentified
  source 1..966: mol_type = unassigned DNA; note = Bacteriophage uvig_128102 from the Index of /pub/databases/metagenomics/genome_sets/gut_phage_database (ebi.ac.uk)
aagaaaaaacgcaaggtggagggagctgataagcgcaccgccgatggttccgagttcgaaagccccaagaagaagaggaaagtctagttctgcagagggtgatgccattcgacgaacttgtttattgcagcttataatggttacaaataaagcaatagcatcacaaatttcacaaataaagcatttttttcactgcattctagttgtggtttgtccaaactcatcaatgtatcttagtaccgcattcatttcagtgagagcttactcatcagagttcggaattagaagattatttaaaaacaatctaaatactgcttattccctaaacagggaattgacaaatcataaaaaagtgatattataaataaccaatgaaagaggtattctctagaaagagaggtacatctatgataaaatatatacataaacaaaaattttataatattgaatattgtgaggagtcagtagtatttagactttattaaatactattggctcctcttttttagtaaaaggagttgaagatttatggataacgaaaagaaagttgcaggattatatatcagggttagtactgagacgtccgtatcagactaacgcttatccatttagagatgtatttgaaacaatacctgataatgttaccaaagaagatttttaaaatacgtggcacgttatgaaattacaaagtaattttgtaagtggcgatatcaatttaaaaattaatactttatgaactttaactaatacgatagtttagttattgtgaaataaagtataaacggtttcaaaggtggtaaaccttagcttccatatcttggtcatgacaagatatatagaaagttatgaataatgacaaagccactttcgtgccattttcaatattcataatttagggggtgtaaaaaggaatcgtcgactgcacgatcaaacatcgatcgaagctcgaacttgcggagtctaccg

SEQ ID NO: 2243 - DNA, 966 bp, unidentified
  source 1..966: mol_type = unassigned DNA; note = Bacteriophage uvig_294201 from the Index of /pub/databases/metagenomics/genome_sets/gut_phage_database (ebi.ac.uk)
aagaaaaaacgcaaggtggagggagctgataagcgcaccgccgatggttccgagttcgaaagccccaagaagaagaggaaagtctagttctgcagagggtgatgccattcgacgaacttgtttattgcagcttataatggttacaaataaagcaatagcatcacaaatttcacaaataaagcatttttttcactgcattctagttgtggtttgtccaaactcatcaatgtatcttagtaccgcattcatttcagtgagagcttactcatcagagttcgtcgacttttgtggcgtcaactccaccaaaatcaacaataattttttaacataaaaaaccagtatactaaacagtaatactggtttttatttattttaaggagtgaaaagtttataaatgaattgctttttgtttacattactttatcaaattttattttactaaatcaagtttaccctgtttttgcagttcagcttttgtttcagcttcaatttcttcacgcgttctgtaatcctgtttaacagttttcgcataacgtatccagctgcgtattgcttctaccataacaactgctactaaggacgtccgtatcagactaacgcttatccatcgacaaaaagttattttatagggctatagcttcagtatttgttggctttgttatttggtattttataaatttgccgtgcggcattggtgctgctgtcggtctgttttttgccatgtacaaggcattaataaaagaaattagccagcgtccgcttcctggtgcctataaaacaaaagaggctgcgcagttggctatgcttaatactttaaaagctattaaagccaaaaaacaaagcaaggaagggtaggaaatggcaacaaaaaagaaaaccgccacccaaagggcggacggcgtatataaggaatcgtcgactgcacgatcaaacatcgatcgaagcttctgaacttacgtattaccg

SEQ ID NO: 2244 - DNA, 966 bp, unidentified
  source 1..966: mol_type = unassigned DNA; note = Bacteriophage uvig_174822 from the Index of /pub/databases/metagenomics/genome_sets/gut_phage_database (ebi.ac.uk)
aagaaaaaacgcaaggtggagggagctgataagcgcaccgccgatggttccgagttcgaaagccccaagaagaagaggaaagtctagttctgcagagggtgatgccattcgacgaacttgtttattgcagcttataatggttacaaataaagcaatagcatcacaaatttcacaaataaagcatttttttcactgcattctagttgtggtttgtccaaactcatcaatgtatcttagtaccgcattcatttcagtgagagcttactcatcagagttcgaggtatactctgatggagcaaaaaagcgcacggacacggattcatcgcactgattaaaataaaatcggcaggatacgtcaggctggcattcacgcgtgatatgcgtctttcgggatcttcttcaagtcctcggcgaaacttttcgccccgaaatcccagccgacttcaccgtagaccattacgtcatacgcgactgattcattcttcgtcttcgccagaatcttccacgtcgcttcgttcttcttcatgctttttaagacctccctcgtttatgatctgctcttcacgtttcaactgctcgacgtccgtatcagactaacgcttatccatggcgtaccgcaagacattgacatcgaagaataaggctcaaatgttgtggcggcaaatttgatcaccttaacggcacagatgcagatgtaataaataaataaaatctcccgccctgttccagcagagcgagagataaatgcaggcctccagattataagctttccagatataagctttccagaccgcctacgccattagctaaattatagcatatctggagtcctccatgttaagcataggaggtttttttatgtcattttttggaaataagttgcccgaacggaacgaaatcgccgttgtggaatcgtcgactgcacgatcaaacatcgatcgaagctgacaattagagcaagagccg

SEQ ID NO: 2245 - DNA, 966 bp, unidentified
  source 1..966: mol_type = unassigned DNA; note = Bacteriophage ivig_1533 from the Index of /pub/databases/metagenomics/genome_sets/gut_phage_database (ebi.ac.uk)
aagaaaaaacgcaaggtggagggagctgataagcgcaccgccgatggttccgagttcgaaagccccaagaagaagaggaaagtctagttctgcagagggtgatgccattcgacgaacttgtttattgcagcttataatggttacaaataaagcaatagcatcacaaatttcacaaataaagcatttttttcactgcattctagttgtggtttgtccaaactcatcaatgtatcttagtaccgcattcatttcagtgagagcttactcatcagagttcgaaatcatttctgatgaagcaaagaaattagcgaacgacaacgacgctataacttttgcttaccaagatgagaataatgattctatattgattgcatattcaacgaaaactaaagacgtaattcaaccaacattttaaataaaaaaacaccactcgccccgaccaaagtttgagtagtgtattatggctgacaacgaccacgaaggtctatttgtcatgccctattttaacataataggagctgaaataatatgaaaaccgctatttacgtaagagtttcaacaaatgaacaagctgaagagacgtccgtatcagactaacgcttatccataaataaccctaaaagatgatgaaatggtgatacagtggcgttttgcggtataaatatatttactataccgcatttcaagcaacgtaaaaccgtcatgttttttttgtaactcatacatgaaatcaattgatttttctattttaactaccattttatctgtccccttccccttttgaaactgcaatttcttttaaattaacacctaaatcataaaaacctcctgctgccatcccagacaacgctccaccccagataaaagtaactaattcatctggcgtaaaagatacagcccacaaaccaggaatcgtcgactgcacgatcaaacatcgatcgaagctgtgttccgtattcagagccg

SEQ ID NO: 2246 - DNA, 966 bp, unidentified
  source 1..966: mol_type = unassigned DNA; note = Bacteriophage uvig_317982 from the Index of /pub/databases/metagenomics/genome_sets/gut_phage_database (ebi.ac.uk)
aagaaaaaacgcaaggtggagggagctgataagcgcaccgccgatggttccgagttcgaaagccccaagaagaagaggaaagtctagttctgcagagggtgatgccattcgacgaacttgtttattgcagcttataatggttacaaataaagcaatagcatcacaaatttcacaaataaagcatttttttcactgcattctagttgtggtttgtccaaactcatcaatgtatcttagtaccgcattcatttcagtgagagcttactcatcagagttcgattctcagaagaagatgcacaatacgcggttgatcacttaaaagctgattataagaaaaacgcattagaaagtgcaaaatcttatcaagaagatatgaatatgtctaaagatgcaatttacgatcaattaatttcaaattctggcgataaatttacagaagaagaagcgcaatatgcagtggatcatttagacgaataatttatgggtagcttgtctacccttattatttttttacttttttaaggagtgatgtattatgaacgtagctatttacgttcgtgtcaggtgagttcctatgagacgtccgtatcagactaacgcttatccatagaacggtaaggtcaacacacttaatataagtgagattactttcaaattttaatggtagtagtgttacagggtaggtagcaccggtaccccccatagttgcaacgaacatttgtgtaccaggtgtaataattttatctgcatgttctcctgcttgaatcaaatttaagtttgtttcaagatttgcataagtaattgcagcgattgctggttcaacaatagatggaccatgtatacctacaaaccagaagaatgcgaaagcaccgaagataagtgtgacaccaatccagccatctgccgcaggaatcgtcgactgcacgatcaaacatcgatcgaagctgacctaaggagatgcagccg

SEQ ID NO: 2247 - DNA, 966 bp, unidentified
  source 1..966: mol_type = unassigned DNA; note = Bacteriophage uvig_598484 from the Index of /pub/databases/metagenomics/genome_sets/gut_phage_database (ebi.ac.uk)
aagaaaaaacgcaaggtggagggagctgataagcgcaccgccgatggttccgagttcgaaagccccaagaagaagaggaaagtctagttctgcagagggtgatgccattcgacgaacttgtttattgcagcttataatggttacaaataaagcaatagcatcacaaatttcacaaataaagcatttttttcactgcattctagttgtggtttgtccaaactcatcaatgtatcttagtaccgcattcatttcagtgagagcttactcatcagagttcgtcagtgagattgaagttgctaacgattccatcaagatccactggcgtttttaaataattttagaaactttcatctcaatcaatcactgtttctaaaattattcaattgtgttataatagggttgtgaattagtttattcacttttccttttaaggtaacgtaaagtggttaaggcgacacaaaggtttgcaaagttgtaactagaatagcctcctaattttggtgcataaaaagacccccggtttttggccgagagtctttttttacatttcattcagtttctcgtcgatcatgtctcgcgacgtccgtatcagactaacgcttatccatactacggttaactcggtagcagctggcaaagagatggacgtaaccaccggttttggtacggacaatctgggcgattttgaattacagttcaagccgcttatttcagttaacaaggccgctaagtttaaagttaatattcagtaacacaaaaaaagaacctatccactcggtcaagggataggctcttttagtaataagtttgatgagatttattaagttgtactgtcattgtacaacggaaagggacattatgacaagttacagaaaattaagagtagcaacctataccagagtttcaacggaatcgtcgactgcacgatcaaacatcgatcgaagctagatgagacgcaactggccg

SEQ ID NO: 2248 - DNA, 966 bp, unidentified
  source 1..966: mol_type = unassigned DNA; note = Bacteriophage uvig_434341 from the Index of /pub/databases/metagenomics/genome_sets/gut_phage_database (ebi.ac.uk)
aagaaaaaacgcaaggtggagggagctgataagcgcaccgccgatggttccgagttcgaaagccccaagaagaagaggaaagtctagttctgcagagggtgatgccattcgacgaacttgtttattgcagcttataatggttacaaataaagcaatagcatcacaaatttcacaaataaagcatttttttcactgcattctagttgtggtttgtccaaactcatcaatgtatcttagtaccgcattcatttcagtgagagcttactcatcagagttcgttcaaatggtcggaagggtgttcgtattagttttttatttcgattttctgtgatactgagcctctatgcccttgtggtgtaggggcttttgtcgtacttatcgaaaaatgatataatatacctgtatttgatataatccaacaaaagcaagcgaagaaatcctttgtggtgctacaatctaacacaaaggagaaatgaccatgatcaggattcgattgtccactcttcttggcgagaagaagtggactcaggcagaccttgcacgaagagccggcatccgcgccaacaccatcaatgaccgacgtccgtatcagactaacgcttatccatcagattgtacttggggtaatgcgaggcttcttaggatctccatcacaatcgaacgctccgcaggagtgagggaatcatacagcgcaagggccaattgcagatcttcggttcgggacatggctgatacctccttcgtgttgttgtctttatatattacgaaattattacatcacaaattcgacattgatagagaatatcattttgcgatattacaactatactttgagtattttccaggagttttgaagaaatgggggcggattcttgcatggctgcgtctgcgaaaaaggtttcagcgaaggaatcgtcgactgcacgatcaaacatcgatcgaagctatggtgtataattcatgccg

SEQ ID NO: 2249 - DNA, 966 bp, unidentified
  source 1..966: mol_type = unassigned DNA; note = Bacteriophage uvig_323835 from the Index of /pub/databases/metagenomics/genome_sets/gut_phage_database (ebi.ac.uk)
aagaaaaaacgcaaggtggagggagctgataagcgcaccgccgatggttccgagttcgaaagccccaagaagaagaggaaagtctagttctgcagagggtgatgccattcgacgaacttgtttattgcagcttataatggttacaaataaagcaatagcatcacaaatttcacaaataaagcatttttttcactgcattctagttgtggtttgtccaaactcatcaatgtatcttagtaccgcattcatttcagtgagagcttactcatcagagttcgatcatataatgatcaattcaaatggagattttgagattcattggaccttttaggttatgagtgaatatcgtcgatcgccttaccaatatcatgtctcatgtacttattctcaaaagagatccattccgtcgcctcataagctttctttctggcttccttcagatcttttcctgtggcggtcacgccgaggacacgaccgccgttggtgacgatctggccgttttcgttgaattttgtgccagagtggaagacataataatcgtcttttcccttgaacttctcaagtccctcgatcgggaagacgtccgtatcagactaacgcttatccatcttgccggcggctaggtgtactctagctttcggctctctcgttaagtatattatacaggtccggaaataatttgtcaaatcacataaatagaaaaaccgcccggtgttaccagcaccgaacggattttcatagattttctcttgccggatgctccggaaagatataatcagcctgaacaactgaattatatcatcttccaggcatctcggcaaggggtgtattttttatacctttttctggaggtgttatatgaaaaaagtcgctatttacgtccgggtctccacccaggaacaggccgtggaatcgtcgactgcacgatcaaacatcgatcgaagctctagagttacgagtgtgccg

SEQ ID NO: 2250 - DNA, 966 bp, unidentified
  source 1..966: mol_type = unassigned DNA; note = Bacteriophage uvig_400028 from the Index of /pub/databases/metagenomics/genome_sets/gut_phage_database (ebi.ac.uk)
aagaaaaaacgcaaggtggagggagctgataagcgcaccgccgatggttccgagttcgaaagccccaagaagaagaggaaagtctagttctgcagagggtgatgccattcgacgaacttgtttattgcagcttataatggttacaaataaagcaatagcatcacaaatttcacaaataaagcatttttttcactgcattctagttgtggtttgtccaaactcatcaatgtatcttagtaccgcattcatttcagtgagagcttactcatcagagttcggaaagattattttaaccgggaatgatgttgtaatagaatgggcttttatttaacccattttttatgatacaaatcgaatcacgaatataagctattacgtgggttatctccgtcatgctaccgccgatggccatctttttcccactatttacccttttggaggactcgggttatcttccccggatcgcctttaatatggataaacatttcaaaaaggccggcgcgcatggaaagcagtccttaaccatgtgcatgggctttggctgcaatgcctgcggagttatcggctgccggatcattgacgtccgtatcagactaacgcttatccatccgttgcgataacaccttacgctgtgaattataacatctggctttttatttgtccagtaaacatgatggattttaattgcaccggattcgaggcaattaaacagggcaataaaaaatcccccaccggttgcagccgatgggggataaaatagaacagcttacccaaagtggataattccgtccgaacaacgaaattataccactttcgggtaggcttggcaagtcatacttagagggtggtttttgtattatgtacaaagcaagcaacggaagtggtgaactcatggaaaataaagtaatggaatcgtcgactgcacgatcaaacatcgatcgaagcttgtgtccgcttgttgtgccg

SEQ ID NO: 2251 - DNA, 966 bp, unidentified
  source 1..966: mol_type = unassigned DNA; note = Bacteriophage uvig_100684 from the Index of /pub/databases/metagenomics/genome_sets/gut_phage_database (ebi.ac.uk)
aagaaaaaacgcaaggtggagggagctgataagcgcaccgccgatggttccgagttcgaaagccccaagaagaagaggaaagtctagttctgcagagggtgatgccattcgacgaacttgtttattgcagcttataatggttacaaataaagcaatagcatcacaaatttcacaaataaagcatttttttcactgcattctagttgtggtttgtccaaactcatcaatgtatcttagtaccgcattcatttcagtgagagcttactcatcagagttcgaaaatgggctttccgttagctttaatattaaaaacggcggtcacaaaccttgatttttcaaggattctgaccgcctttctttttgttgtgggtgtatcagcgttggaaataaaaatactcccacaatggattactctatttgctcaccaccataaatcagtgtaactctattatatgttcctataaactcctctacaaaactattatattcatctatttttttgatttcccaatagttgtacaattttttgttacccctttcccaatagggctcatttgctttaaaccagtctttatacggacgtccgtatcagactaacgcttatccatcctcgcatatctatgatgaccgcgttgccactgccatcgcaaaggatattgctacatccttcctgccggtgctgaaaaaattatctgattactataaagaaatttaaataaaaaatcccccttccctgttggcgcagagaaagaggattcataaagcggtcgcatgatacaaccactcctcgcaacagtattgtatcataagaccgctttctttgctatacatttttatagacagaaggaggtcttttttatgattgcgatttatgcacggcagtctgtcgagaaaaaggacagcatcagggaatcgtcgactgcacgatcaaacatcgatcgaagctcgaacaaggttcaccatccg

SEQ ID NO: 2252 - DNA, 966 bp, unidentified
  source 1..966: mol_type = unassigned DNA; note = Bacteriophage uvig_95947 from the Index of /pub/databases/metagenomics/genome_sets/gut_phage_database (ebi.ac.uk)
aagaaaaaacgcaaggtggagggagctgataagcgcaccgccgatggttccgagttcgaaagccccaagaagaagaggaaagtctagttctgcagagggtgatgccattcgacgaacttgtttattgcagcttataatggttacaaataaagcaatagcatcacaaatttcacaaataaagcatttttttcactgcattctagttgtggtttgtccaaactcatcaatgtatcttagtaccgcattcatttcagtgagagcttactcatcagagttcgacacaaaaaaaatagagatcaaaagagacggctctttcaatctcgttatatagcaaagaaagggaggcacactgtgcctccctttcttattttaaaatttcagcaatctattcccatttcgtgcgctttttctctaatatggttcgccagcgcctcattgacgaattgctttatttgtccgcgccgtgtgcatagagcataaacgccctccgcaatatccgatcggacgaaaatcgtcattttcacatagtcctgatttatgctctccacgggagctctcttttgcttgatcttcttggtgacgtccgtatcagactaacgcttatccatggttatcccggagaattcgagctccagcccgaatttttgttccttcatttcaatcacgttcaattcctccgttttctggttttctgggtttctaacagtatagtaccagaaatctggtagaagtaaaccttttctggctaatttctgtattttatctgtattagacaaaaacagaccttttcatttgacacaacgacaaaatcgtaggaaaatgtataataaacaaggcttttctgcgggggtgtctacgatgaaagagacaaaacgggcggcgatatacacgcgggtttcgacggctcgggaatcgtcgactgcacgatcaaacatcgatcgaagctagcacctacaagtccatccg

SEQ ID NO: 2253 - DNA, 966 bp, unidentified
  source 1..966: mol_type = unassigned DNA; note = Bacteriophage uvig_392101 from the Index of /pub/databases/metagenomics/genome_sets/gut_phage_database (ebi.ac.uk)
aagaaaaaacgcaaggtggagggagctgataagcgcaccgccgatggttccgagttcgaaagccccaagaagaagaggaaagtctagttctgcagagggtgatgccattcgacgaacttgtttattgcagcttataatggttacaaataaagcaatagcatcacaaatttcacaaataaagcatttttttcactgcattctagttgtggtttgtccaaactcatcaatgtatcttagtaccgcattcatttcagtgagagcttactcatcagagttcgcatacttcacccgtgtcttcaagaatgagttcggaatgatccctactgcatttattcaaaagaacaaggctggaaagtaaaattacccttggggtctagccggctgcctgggacatacaatgactttgttccggggtagagtgatttttcccttgatcttctattcatatcacagctgtgatacaaagataaaacgtttgcagatggtagttataatagtacctttgtcttaaacaaaagcaaagataatatgaaaggtgcaatttatagtagagtatctacagaaggacaggattacaggacgtccgtatcagactaacgcttatccatttacagattttgtaaattatctggatattgaagataatagaagatattactaataaaagtcctgccagtaattacgctagcaggactttcttattaaatattttccagaaaatcagattctgacataatttctatatctattccagatgcttttaaatcaatcgctttcttttgcttagaggacataccagaatccccaaccactctaaagtcctgtaatccaaccactaaaatgtcggttttcttggtaacagaatcaactggagtaccaccaatatcggctattttttgaagaagttcggaatcgtcgactgcacgatcaaacatcgatcgaagctccaacgtaggtaagagtccg

SEQ ID NO: 2254 - DNA, 966 bp, unidentified
  source 1..966: mol_type = unassigned DNA; note = Bacteriophage uvig_208975 from the Index of /pub/databases/metagenomics/genome_sets/gut_phage_database (ebi.ac.uk)
aagaaaaaacgcaaggtggagggagctgataagcgcaccgccgatggttccgagttcgaaagccccaagaagaagaggaaagtctagttctgcagagggtgatgccattcgacgaacttgtttattgcagcttataatggttacaaataaagcaatagcatcacaaatttcacaaataaagcatttttttcactgcattctagttgtggtttgtccaaactcatcaatgtatcttagtaccgcattcatttcagtgagagcttactcatcagagttcgtgttcgcgcaacagtatcaaattatgaagtcggaaaacgcacaccgcatttgtcacttttgaaaaaattcgctgatttttacggtgtgacgcttgattatttcggtgtaacgacaaacgatgaaatatttgaattattaagccgtgcgcgtgaggtattcaacaatgacgctatttcaacgcaaacaaaagaggaattatacaaagaatttatgcgtttatatcttaatttgaacaaggaatgatgcatcatgaaaaacaaacacgatataaaagacatacgcgctgccgtttatatccggacgtccgtatcagactaacgcttatccattatcccccaaacgttcaaaaagccgtagcggtggattgacgcggttaaaataaaaaagcagagcgtcagccctgctttttatcaataattcgcaatacgatttatttgcgtatctattccttgttctgcaagagaaataaactctaatattttttcgctccatcctgcaattatgtttgttttttctccgatgaattgttgtgttccatatccctgcaaatcaactgcatgtacccacatattcggatttatttccttgcggtacttattaacatacaattggcatgttttttcatatccggaatcgtcgactgcacgatcaaacatcgatcgaagcttgcatcctcaacgcagtccg

SEQ ID NO: 2255 - DNA, 966 bp, unidentified
  source 1..966: mol_type = unassigned DNA; note = Bacteriophage uvig_586184 from the Index of /pub/databases/metagenomics/genome_sets/gut_phage_database (ebi.ac.uk)
aagaaaaaacgcaaggtggagggagctgataagcgcaccgccgatggttccgagttcgaaagccccaagaagaagaggaaagtctagttctgcagagggtgatgccattcgacgaacttgtttattgcagcttataatggttacaaataaagcaatagcatcacaaatttcacaaataaagcatttttttcactgcattctagttgtggtttgtccaaactcatcaatgtatcttagtaccgcattcatttcagtgagagcttactcatcagagttcggcgctacgcgaacactatatcttgtttatagcgttccgtttaccgcaaaataagaaaaaccgaggctaaagcctcggttttttgtttatttcagcgcattctccgcgccgacgggattgctcttcatccactcattcattctcgccacaacctcatcaatgagccgtgacaacgactcctcggagatcagccacgtcagccacttgtatctggcgtacagccacgcgatgacctgctgcttcttgagctgtccggttttcgcgccgtagagccgttcagcttcgaccgcgagtgacatcagacgtccgtatcagactaacgcttatccatgacgcgcgagatttcgccgacgtcagagttccgccgcacgatggcggctgaggagtatcggcagtcgatttcaggcggcgcgaactatgaggacgtgaccgagtcggacgacgatgaggaagaggacgactcgaccgtcgcgtaaccatcatgcccgacgtccgcaaaatggtcacctacttagaaattctctaataactgaaaaagtggtcgttgcaaaaaatgcaaccaccacagaaaggagtcccacatgccaaaagccgtgatctacgcccgcttctcctcccacaaccagcgcgaggaatcgtcgactgcacgatcaaacatcgatcgaagctaatataagccttgcagtccg

SEQ ID NO: 2256 - DNA, 966 bp, unidentified
  source 1..966: mol_type = unassigned DNA; note = Bacteriophage uvig_22576 from the Index of /pub/databases/metagenomics/genome_sets/gut_phage_database (ebi.ac.uk)
aagaaaaaacgcaaggtggagggagctgataagcgcaccgccgatggttccgagttcgaaagccccaagaagaagaggaaagtctagttctgcagagggtgatgccattcgacgaacttgtttattgcagcttataatggttacaaataaagcaatagcatcacaaatttcacaaataaagcatttttttcactgcattctagttgtggtttgtccaaactcatcaatgtatcttagtaccgcattcatttcagtgagagcttactcatcagagttcggattgattataccaaggtagagttacccgaagaactgctcacttcttttgcaaaggcattagcgccagagattaggaagttctatgatagtgacgagggcaaagcttactttgaaaaatggcttaccaaacaccctgaatatgatgaacggacacctgatgcaactgcatcgggcgtctgagttttcgcacattcgacagcaaataaaggaggattataattatgtatagaaagaattggaggctcacagatgaatgttgtaatatacgcccgcttttccagccacagccagacggagcagacgtccgtatcagactaacgcttatccatcttcattgccaagaaagtggctgaggagtgcaccaaaagcccggataacctgaccgccaaggcgctgaaaaaggcgatccgagaggcggatacggccattgagaatctctggaaagccattgagcaggggcaggccgtggagatgctgacggatcgactcaacaagcgcatggcggaaaaggcggagctggaggcgcagctcgccatcgaggaaaacaagaagatcacgctgacggaggcacagattctggcgtttctggactatgtctgcgagatgcccgccgacgatgtgaacaagcgggaatcgtcgactgcacgatcaaacatcgatcgaagctacaacgacctctgtagtccg

SEQ ID NO: 2257 - DNA, 966 bp, unidentified
  source 1..966: mol_type = unassigned DNA; note = Bacteriophage uvig_581097 from the Index of /pub/databases/metagenomics/genome_sets/gut_phage_database (ebi.ac.uk)
aagaaaaaacgcaaggtggagggagctgataagcgcaccgccgatggttccgagttcgaaagccccaagaagaagaggaaagtctagttctgcagagggtgatgccattcgacgaacttgtttattgcagcttataatggttacaaataaagcaatagcatcacaaatttcacaaataaagcatttttttcactgcattctagttgtggtttgtccaaactcatcaatgtatcttagtaccgcattcatttcagtgagagcttactcatcagagttcggctcgaggtggtcggtcgcgtcgagaatggcggcgacgaggaccagagcatgattgaggttgtggtgattatgtacgacgccgacggaaaagtcctcggcgtgatgacgacatataccgacgagatcgcagcgggagcgaagggaacgtttaagatgtcaaatatcggcgacgcgaacaaagtcgcgctcgcggacatcgaccactatgacgtgatggcatatcccggaatgcagatgcagttctgaggaatgagcagagcggttatatacgccaggttctcatcgcacaatcagcgcgagacgtccgtatcagactaacgcttatccatgtctcaggcgaacaccatatatcatctttatggtctcgcttgtgacaaaataacgaaaaccgagggttcagtccctcggttttttgtttaattgtatttttgcattaacattgccagagctgctttcgcttccggagttttggtagaaatatcagctgcgcgatcatagttgtataccgtctcttcgtcctgctcgagcgtgagtttcgatatcttaccgttctcaatgccccacgggctcggttcatcgtaatgcttcacccaatagtgaactggcactttcgctccgttcgcttttttggaatcgtcgactgcacgatcaaacatcgatcgaagctgaattatatcgtccattccg

SEQ ID NO: 2258 - DNA, 966 bp, unidentified
  source 1..966: mol_type = unassigned DNA; note = Bacteriophage uvig_483710 from the Index of /pub/databases/metagenomics/genome_sets/gut_phage_database (ebi.ac.uk)
aagaaaaaacgcaaggtggagggagctgataagcgcaccgccgatggttccgagttcgaaagccccaagaagaagaggaaagtctagttctgcagagggtgatgccattcgacgaacttgtttattgcagcttataatggttacaaataaagcaatagcatcacaaatttcacaaataaagcatttttttcactgcattctagttgtggtttgtccaaactcatcaatgtatcttagtaccgcattcatttcagtgagagcttactcatcagagttcgctacaaaaaagacggtgaagaaattcctataaaacaaaattttaaaaaaactgatttcccaaaacttaaagagcttctaaaaaagaataaaacagaaattgactataaaaaatctgaaattcttgcttgattaactcttttcgaccaaaattcacaaatgttttttggttgaaaaataaatttgaaatatggtataatgtagtaaagtttctttgctacattttctttttttaaagagaaggagacaacaatgacaaaagataataggaaaacagctttatatattcgtgtttctacagagacgtccgtatcagactaacgcttatccattaaaagagattattatcaacaaagatgcgattgatatagtttacaatttttagaaaggagacttttttcaccatccatatgtcattcctatgataatgggcgaattgcggcgctacctgagggactcaggctcaatccgtgtcagccgttcaatgcgtgatctggcttataaagctatgcaggcaagagaaaaacttaccaatgataattctaaagagcctacgattgagcagatagccaaagaaatcgacgcaaagcgtgaggatgtggtaatagcgcttgaggctgtcagcgaccctaggaatcgtcgactgcacgatcaaacatcgatcgaagctagtagcctctctatattccg

SEQ ID NO: 2259 - DNA, 966 bp, unidentified
  source 1..966: mol_type = unassigned DNA; note = Bacteriophage uvig_255651 from the Index of /pub/databases/metagenomics/genome_sets/gut_phage_database (ebi.ac.uk)
aagaaaaaacgcaaggtggagggagctgataagcgcaccgccgatggttccgagttcgaaagccccaagaagaagaggaaagtctagttctgcagagggtgatgccattcgacgaacttgtttattgcagcttataatggttacaaataaagcaatagcatcacaaatttcacaaataaagcatttttttcactgcattctagttgtggtttgtccaaactcatcaatgtatcttagtaccgcattcatttcagtgagagcttactcatcagagttcgcaagagataattgcccgcagatggggttataaaaaactcgttggtatggtagatataataaatgcatatagatatggtgtaagaaataaacatgaattagctgaatatttagatgttacagaagattttttatgcgaagcaattgagtattataagtgcaaatatggaatttgttacaaaatagatacttacattatttattttgaaccattaggtgtaatgaaaatattttaaataggagaatttaaaaatgaataaaattgcaatttacacaagaaaatcaaaatttactggaaaagggacgtccgtatcagactaacgcttatccatttgtaatagatactgatgaatttattattaattttaacataaaaaaaaactagataatgctttaaacacattgtctagtttgtatcttaagcatatccgttcgcagtttagcatatcacacttcagtatgaccaacaaaaaggcctgacttttctcctgcacagaaaaggttatcaactccaacaaccttcatatcattagttcttggagcaacagataaataccttatagaatttcctttacttcctgcataaggatcaacatacttagcatgttcaagtccaggtatctttcttaactggaatcgtcgactgcacgatcaaacatcgatcgaagctagtacttggtcctacgatcg

SEQ ID NO: 2260 - DNA, 966 bp, unidentified
  source 1..966: mol_type = unassigned DNA; note = Bacteriophage uvig_453602 from the Index of /pub/databases/metagenomics/genome_sets/gut_phage_database (ebi.ac.uk)
aagaaaaaacgcaaggtggagggagctgataagcgcaccgccgatggttccgagttcgaaagccccaagaagaagaggaaagtctagttctgcagagggtgatgccattcgacgaacttgtttattgcagcttataatggttacaaataaagcaatagcatcacaaatttcacaaataaagcatttttttcactgcattctagttgtggtttgtccaaactcatcaatgtatcttagtaccgcattcatttcagtgagagcttactcatcagagttcgcgcttacacctccaccatccagccggaacgaatcgttccggcttttcttttaggctgacttcacgcttccgatttttctgaccggatgtctttctgcacagtggtaaaatataaacggttcacatcgcaattgggaggaaacctcatgaacacatccgcgctttcaaagcggcgaatcaccgctgcccatgcgttttttctcggtactctactggcattttttgccttagcacccgctatcttcccctatggcggcaggtttgtgacgcgcggcgactttatcgagcagcagcttcccttgacgtccgtatcagactaacgcttatccatgtgtacccgataacagcagccggaaagttcttcgctgccattatcagtcttgtcggaattggaatcattgcaatcccgaccggcatcatttctgccggctttacatctttacttaaagaggatggagctgaagcagacgaaaaaaggtactgtccgtattgcggtcataagctcgatgaataaccgcccgattttttaagcaaaatagtctgaatgcagtctgtttttagtattagaagtaggtgattgaatgaacgccgtcatatacgcccgtttttccagccacaatcaacgcgaagaggaatcgtcgactgcacgatcaaacatcgatcgaagctgtgaggtcacattccgatcg

SEQ ID NO: 2261 - DNA, 966 bp, unidentified
  source 1..966: mol_type = unassigned DNA; note = Bacteriophage uvig_370654 from the Index of /pub/databases/metagenomics/genome_sets/gut_phage_database (ebi.ac.uk)
aagaaaaaacgcaaggtggagggagctgataagcgcaccgccgatggttccgagttcgaaagccccaagaagaagaggaaagtctagttctgcagagggtgatgccattcgacgaacttgtttattgcagcttataatggttacaaataaagcaatagcatcacaaatttcacaaataaagcatttttttcactgcattctagttgtggtttgtccaaactcatcaatgtatcttagtaccgcattcatttcagtgagagcttactcatcagagttcggaaatataatagattatatagaatttgatggtgattactttacaatatactaattatgtctctttgaagaactttgcggttccttgatctaaagcaataatatatcttttcataattaattttctactcctttataaaaaagtactaggtattttattaaatcttacttcttccaaaatacaccctatataaaaatagaatgcccaatccattacactgctaattgcaaatatttgtggattaaaaaatatcaatgctatttttaatataaataatgttattaatattgccttcttattcgacgtccgtatcagactaacgcttatccataaatataataactaagctttctaagattgccaataaacctattgaatattttattgattctaacgaagatataaaagttcattcttatgaggtacttgataatattataaatagctttattgataacggattaatttcacctgatggaaaaatggataaagatacagaagaatttttaaataaaacattaatgaaagaaattatgtataaattaagcattagaaataatgacaaataatgaggtgatttcatgagaatcgcaatatatgtaaggaaatccgttgctggtgatgacaggtcggaatcgtcgactgcacgatcaaacatcgatcgaagctcctctaatatcatgtgatcg

SEQ ID NO: 2262 - DNA, 966 bp, unidentified
  source 1..966: mol_type = unassigned DNA; note = Bacteriophage uvig_208980 from the Index of /pub/databases/metagenomics/genome_sets/gut_phage_database (ebi.ac.uk)
aagaaaaaacgcaaggtggagggagctgataagcgcaccgccgatggttccgagttcgaaagccccaagaagaagaggaaagtctagttctgcagagggtgatgccattcgacgaacttgtttattgcagcttataatggttacaaataaagcaatagcatcacaaatttcacaaataaagcatttttttcactgcattctagttgtggtttgtccaaactcatcaatgtatcttagtaccgcattcatttcagtgagagcttactcatcagagttcgaagtcaaatgcggcgaaatacaaatctattggaaatataattttgagttgtagtgagtattgggccttgagagcataccctcagcatctgtgcatgatctggcttggcaggaggcggtggagcatagtcagtcagcacagcttgctggacggacatctatcattcaataaattgatccggccaatcacaaacaattggccggatatagtgaaatgctttccttatatttatcttggccgttcctgcatccaacacccattgataagatccaacgcatcccgcgtaagcggtatcaaatccgacgtccgtatcagactaacgcttatccatatatcaaatcaacaaaagcatatatataaaacaaatctaagttataatttgaaatcaattgagagggtattatgacggttgtaaacgtatatccggctgcaaacgataattttgcatgggatgaactggcagagttgtcccagaaactgctcacgcatatttatgctgaaatggaaaaatgcgaaaatagcaaaaacactttgatagatatgggtggcggctgcgagacgagcgtgagggcaagttcgctatgaacgcggtgtatacgaggcaatcccttgacgttaaggacagtttgtcggaatcgtcgactgcacgatcaaacatcgatcgaagctatcatcacctatggccatcg

SEQ ID NO: 2263 - DNA, 966 bp, unidentified
  source 1..966: mol_type = unassigned DNA; note = Bacteriophage uvig_127373 from the Index of /pub/databases/metagenomics/genome_sets/gut_phage_database (ebi.ac.uk)
aagaaaaaacgcaaggtggagggagctgataagcgcaccgccgatggttccgagttcgaaagccccaagaagaagaggaaagtctagttctgcagagggtgatgccattcgacgaacttgtttattgcagcttataatggttacaaataaagcaatagcatcacaaatttcacaaataaagcatttttttcactgcattctagttgtggtttgtccaaactcatcaatgtatcttagtaccgcattcatttcagtgagagcttactcatcagagttcgcaacaatttcaaattatgaggtcgggcgcagaacgcctcacctttcagaccttaaacgattcgccgaactttacggcgtcactcttgattatttcggagtgtcaacaaatgatgaagtctttgaattaataagccgtgctcgtgaggtttttgaaagtgaccaagtatcaagtaagacgaaagaggatctatacaaagaatttatgcgtctttacttgaatatcagcaaggattaaaggagttttcacctatgacaatacaaaaggataataccgcgttgcgcgctgccgtatatgtccggacgtccgtatcagactaacgcttatccatccgccataagaaaaccctcacgtcaaggcacgcgacctgctccgctgcgttgattagttttgtgccctgtccgcagggctttctgtttcatataacgttcgcattatttttattaagtcatcaattatatgcctatcgtcatactcttcatccagaaatgatgtgatttttaagtctcctttacgagcgagaacacgattaaaatacatcataagaaagcttgaaattcctattttatcgtcagcctctactaaactttttaacttttcatagtttgtcataattattcctttcttgcggggaatcgtcgactgcacgatcaaacatcgatcgaagctgcagtacgatcgcgatatcg

SEQ ID NO: 2264 - DNA, 966 bp, unidentified
  source 1..966: mol_type = unassigned DNA; note = Bacteriophage uvig_311977 from the Index of /pub/databases/metagenomics/genome_sets/gut_phage_database (ebi.ac.uk)
aagaaaaaacgcaaggtggagggagctgataagcgcaccgccgatggttccgagttcgaaagccccaagaagaagaggaaagtctagttctgcagagggtgatgccattcgacgaacttgtttattgcagcttataatggttacaaataaagcaatagcatcacaaatttcacaaataaagcatttttttcactgcattctagttgtggtttgtccaaactcatcaatgtatcttagtaccgcattcatttcagtgagagcttactcatcagagttcggtttgaatacgatcaggaacagctgggtgcgtgatttgtcgcctgcccgttgaccttttgccctccggtttgtggtatccttttgccaacgaaagcgatacaccacaaaacggagggcatttattatgaagaaaaatcttaccgagcttgttttcattctggaccgcagcggttccatgggcgggctggagcaggataccatcggcgggttcaatgctatgctgacccggcagaaggagcaggagggcgaggccaacgtgaccacgatcctgtccgaccatgaggtgcagctgctgcacggacgtccgtatcagactaacgcttatccattttatatcaatcacttaaaactcctaaacctgtagcagagatattggcatacctaccgttgctgatgataaaccatctgtataaggtataaccatacacgaacaaaaattctaaatgagtatggcattataagatttgttcaaagtaaaaaaacatagataacctgccgttttttacaatatatttgccataaaaaataagcggttatagaatacctatagcaaggtgaaattaatgagatgaacttggtatgaataacgtacaaaagaaatattttattggcctaacccattttttgggggaatcgtcgactgcacgatcaaacatcgatcgaagctcgagtacaatgctagagtcg

SEQ ID NO: 2265 - DNA, 966 bp, unidentified
  source 1..966: mol_type = unassigned DNA; note = Bacteriophage uvig_349522 from the Index of /pub/databases/metagenomics/genome_sets/gut_phage_database (ebi.ac.uk)
aagaaaaaacgcaaggtggagggagctgataagcgcaccgccgatggttccgagttcgaaagccccaagaagaagaggaaagtctagttctgcagagggtgatgccattcgacgaacttgtttattgcagcttataatggttacaaataaagcaatagcatcacaaatttcacaaataaagcatttttttcactgcattctagttgtggtttgtccaaactcatcaatgtatcttagtaccgcattcatttcagtgagagcttactcatcagagttcgtctgacctaggccgcttggccgagttctatggggtgggtctagactatttcgagttagccgcggctgatgaggtgcaagacctcctggctcgcgctcgggatgtttttgttagccctgatgtctcccaggagacgaaggacgctctctacaaagagattgcgatgttatatcttaaattgaagtgagttatatctttttgaggattgacctctgtaaaatgttaattagaaagcaagggaatgttatatcatgaaaaagaaacaaagagtagtaatttatatccgttattcttcgcataagacgtccgtatcagactaacgcttatccatcaaaatatgagcaatccctaatggtgggcagaaaagaaattaggcatatataacagaggtaaaacttgtggaaaactctacttatataacggaatatataagaaaaggcggagctttatgccccgccctccatttttcttattcctctaatttttctcctttcgcatatttagataacttgaagtaaatgtcgtgcctaatcaaggtcttgatgtagccctgcttgttctctatgcccttcaaaaactttaggatgtcttcatcagtctttttgttaagcttgactgatatttggacaacggaatcgtcgactgcacgatcaaacatcgatcgaagcttcattgcatgcggtgagtcg

SEQ ID NO: 2266 - DNA, 966 bp, unidentified
  source 1..966: mol_type = unassigned DNA; note = Bacteriophage uvig_53024 from the Index of /pub/databases/metagenomics/genome_sets/gut_phage_database (ebi.ac.uk)
aagaaaaaacgcaaggtggagggagctgataagcgcaccgccgatggttccgagttcgaaagccccaagaagaagaggaaagtctagttctgcagagggtgatgccattcgacgaacttgtttattgcagcttataatggttacaaataaagcaatagcatcacaaatttcacaaataaagcatttttttcactgcattctagttgtggtttgtccaaactcatcaatgtatcttagtaccgcattcatttcagtgagagcttactcatcagagttcgttggctgcggaaccaccataccgctgcttcctaaaatactgtttgagtattttgcgcccacatatttcgttccggatgggaaattcaccgttatgctgctgcccgtggtaaaccgaagccagcaatcaaagttccctgttgggaaggtcagcgtaagcgaggtcacagcggaagaaaaacggtattcggtgttgtccgagagggttaggtttactgtgccgcccgcgggggtgattttggataccgatgccgctgcgccgatctgtgcaggcgtgagcacgtcacctccacctgtggcatgacgtccgtatcagactaacgcttatccattatagcaaggtgcaggctttttctgttgaaaccgcaggtgttatggatttggatagtgagcttgaactttggttctccggcctgggaaaggttaagctggagtttgtaagccgcgctgatgtggcagggatttgccgcatggtaagcgagttcgtgctgtagagtttaatcataaaccgcccccgtgtggtgcagttgtcgctctccacacggggagcgtggattgagataaatgccaaaaggagctactatgcgagcagtgatttatgcgaggttttcaaccgacaaacaaagagaagaggaatcgtcgactgcacgatcaaacatcgatcgaagctcgaattcgcgacaatagtcg

SEQ ID NO: 2267 - DNA, 966 bp, unidentified
  source 1..966: mol_type = unassigned DNA; note = Bacteriophage uvig_595447 from the Index of /pub/databases/metagenomics/genome_sets/gut_phage_database (ebi.ac.uk)
aagaaaaaacgcaaggtggagggagctgataagcgcaccgccgatggttccgagttcgaaagccccaagaagaagaggaaagtctagttctgcagagggtgatgccattcgacgaacttgtttattgcagcttataatggttacaaataaagcaatagcatcacaaatttcacaaataaagcatttttttcactgcattctagttgtggtttgtccaaactcatcaatgtatcttagtaccgcattcatttcagtgagagcttactcatcagagttcggttgacgagctgaaggacggccttgcggcggcttacaataagctgcgccacgatctcggttatcgcggcgacgcgtttgccgcggaggacgtctccatcagcgacgacctcggccccgatgaccgcatcggttggccgaatacgcactatgtctgcatccgccggatgggcgacgacgactttgtggcaaggttcgggtcgccgcaggccatcgggttctgcgcgtttttcgagggaaaggatgaattaaatggatacggtaaataaatttggcagctattgcatgtatctgcgccgatcgacgtccgtatcagactaacgcttatccatattcccctttggaaagcctcaccctcgaaatctacccgcgtctgccaaagtaattttttgagacaacttgcgctgaagaatgtgttcttaggcgcaagttgtctcatccgtttttacttccacccatcgatcatcgccttgacctctgcggtcttggcgatgaggtcgttgtggatggcttcccatgcgacgatcatgccgtcggcgtaagatgggttgcgcttgtactcctcggaggccttgtagccctcgatcagctttttgaccacggcgtggccgttggtgttgaaattgatgtggggaatcgtcgactgcacgatcaaacatcgatcgaagctcagtgtgatcaaggcggtcg

SEQ ID NO: 2268 - DNA, 966 bp, unidentified
  source 1..966: mol_type = unassigned DNA; note = Bacteriophage uvig_231300 from the Index of /pub/databases/metagenomics/genome_sets/gut_phage_database (ebi.ac.uk)
aagaaaaaacgcaaggtggagggagctgataagcgcaccgccgatggttccgagttcgaaagccccaagaagaagaggaaagtctagttctgcagagggtgatgccattcgacgaacttgtttattgcagcttataatggttacaaataaagcaatagcatcacaaatttcacaaataaagcatttttttcactgcattctagttgtggtttgtccaaactcatcaatgtatcttagtaccgcattcatttcagtgagagcttactcatcagagttcgataagatcgctcgcagcgttcttaaaaaatgtgtctgggacggagagtcactttttttgactttctgatttcgcctttttattgctatcgggactgcaatgtgtttaaaaaggtgaaaaaagcagggcatcagctctgcttttttgtatcttttactatcaaattttctatgtaatttgatagcgttcttccttcctccgcagcctttttttctgctgcggtttttactgaagggagtaccttcatgtaaatgattgagcttcttttttccttcattctttttcccctttcttgatttttgacgtccgtatcagactaacgcttatccatgtcttctgttgccaccaggcaagagatcgcagaacaaatcgaatctcttggcgggatttttaaaaataacgttaccaaaaaaacaaactatctgattgtcggcaacgaagggaatccgtgctgggcgtattcctgctacggccgcaaggtggatgctgcgatcaagttgcgcaaatccggtgtcccgattgtgattgtgaacgaaacggatttctgggatatcctcgaagatctatagcgaggtgctagcatgagaattgctatctatgcgcgaaagagcgcattttcagaaaaaagtgaggaatcgtcgactgcacgatcaaacatcgatcgaagctgtgttcgcaggtaggtgtcg

SEQ ID NO: 2269 - DNA, 966 bp, unidentified
  source 1..966: mol_type = unassigned DNA; note = Bacteriophage uvig_476161 from the Index of /pub/databases/metagenomics/genome_sets/gut_phage_database (ebi.ac.uk)
aagaaaaaacgcaaggtggagggagctgataagcgcaccgccgatggttccgagttcgaaagccccaagaagaagaggaaagtctagttctgcagagggtgatgccattcgacgaacttgtttattgcagcttataatggttacaaataaagcaatagcatcacaaatttcacaaataaagcatttttttcactgcattctagttgtggtttgtccaaactcatcaatgtatcttagtaccgcattcatttcagtgagagcttactcatcagagttcgaggagattcgggtggaggacaaccatgttgtgggcgtgacatttaacgtctaaatttttttcacatattagggactaattacccgttttctgtggacacccccgcgccgccgaaaaagacgatgcggctgctcccgtcgatccagtcctgaagtgtttccagcttgcttgtttccatgtgcacgcctccctgttccatgaatcgtggatctggttccttcctcctcattgtaccccccctgtccccaagtcttttcataaaaactttctcccgtcaatgtacgaatatcccgccagcgcggacgtccgtatcagactaacgcttatccattgtattcgtttgcagaaatggcggttacagatcaggcaatcatgcggtcaatagatgagcgtagccattacgactataggcatccccacaaggggtcaaatgcgtataaggccgttgcagccttcttcggcctataaaataaaagtgccccagggtgccggaacaccctggggctttgcataaacaactataaccacgctaatggagcatttatgctctcctattatagcgaactagggagagattgtcaatgaaagcagaaatagaccgcattatcagagttgcgctatatatccgcgtggaatcgtcgactgcacgatcaaacatcgatcgaagctctgcggtaagctctgtgtcg

SEQ ID NO: 2270 - DNA, 966 bp, unidentified
  source 1..966: mol_type = unassigned DNA; note = Bacteriophage uvig_590668 from the Index of /pub/databases/metagenomics/genome_sets/gut_phage_database (ebi.ac.uk)
aagaaaaaacgcaaggtggagggagctgataagcgcaccgccgatggttccgagttcgaaagccccaagaagaagaggaaagtctagttctgcagagggtgatgccattcgacgaacttgtttattgcagcttataatggttacaaataaagcaatagcatcacaaatttcacaaataaagcatttttttcactgcattctagttgtggtttgtccaaactcatcaatgtatcttagtaccgcattcatttcagtgagagcttactcatcagagttcgaccgtaaggcggacaattcgctgtccgtcatttatatggtggttgttttataacttattgcagttaagtccgccgtactcctttaagttataaattcgcaaattctaactgcaaataactgcattcctaccccggacaccttgcaatccggcgcaaaatacgctataatataattgaggggaagcccagatctcacccctacctttgcgtaggacattgtgtttcctactaaccatataagctgcgccgtcctggatacgtccttcctgggacggcacctttctgcgcaaaataaaaacggacgtccgtatcagactaacgcttatccatagccattccacgtgacgcggaagtagtcgggcatacatggcagtacgtaaacaaaaacggctcgccagataaaagatataataataacagacagcttcctgtatgcctttatggatacgttaccataagaagcggcgcgggacttgaaatccagttgtgctgttccaacaattctaaaatcgacggtctgggatgatcctccgcaaggacaaacaccccaacgcatacactataataaggagatggtaacatgaagctagcagcctgctacataagagtatcgaccgacgatcagcttgaggaatcgtcgactgcacgatcaaacatcgatcgaagctcaacacgttgtaggcactcg

SEQ ID NO: 2271 - DNA, 966 bp, unidentified
  source 1..966: mol_type = unassigned DNA; note = Bacteriophage uvig_150568 from the Index of /pub/databases/metagenomics/genome_sets/gut_phage_database (ebi.ac.uk)
aagaaaaaacgcaaggtggagggagctgataagcgcaccgccgatggttccgagttcgaaagccccaagaagaagaggaaagtctagttctgcagagggtgatgccattcgacgaacttgtttattgcagcttataatggttacaaataaagcaatagcatcacaaatttcacaaataaagcatttttttcactgcattctagttgtggtttgtccaaactcatcaatgtatcttagtaccgcattcatttcagtgagagcttactcatcagagttcgacaaggcaaaagatgaaatacatattttcttctatcttctcgaccccttgtaaatcaaggatttgagcgttgttccccctatagatgtatggtggaccagattggctggacctggaacgattgtccattaccatggaatggaggtatgtaatatgtggagttatgaaaagagactgcaatttccggtaaatattaagaaacctgaccctaaagctgcacagataattataagtcagtatggtggaccatacatctatagggggaatgtatttgtaaagcatattctttctatatctttttgacgtccgtatcagactaacgcttatccattgcaataactcaggaagaattcgatgcaaagaaagctcaattacttaatctataacaaatgatttaaaataaaaaatcgtccctgatgctaccaacatcaaggacgactctagctgatacttacagagcagtgctctgatataatatctctacacaagtcatattatatcattcatggcaccgcttttgcaagtaggtgtattttttatacccaaatttaatatatttacacataaggagcgtgatacatatgccaaaagcaaaagatttccggaccgcatgtgcatatataagagtgtcggaatcgtcgactgcacgatcaaacatcgatcgaagctgcgtcttacctgaacgctcg

SEQ ID NO: 2272 - DNA, 966 bp, unidentified
  source 1..966: mol_type = unassigned DNA; note = Bacteriophage uvig_76620 from the Index of /pub/databases/metagenomics/genome_sets/gut_phage_database (ebi.ac.uk)
aagaaaaaacgcaaggtggagggagctgataagcgcaccgccgatggttccgagttcgaaagccccaagaagaagaggaaagtctagttctgcagagggtgatgccattcgacgaacttgtttattgcagcttataatggttacaaataaagcaatagcatcacaaatttcacaaataaagcatttttttcactgcattctagttgtggtttgtccaaactcatcaatgtatcttagtaccgcattcatttcagtgagagcttactcatcagagttcgtccaatttttctacaaaccgtccaaggatgacaaaagcccagaaaccgcttgatttctgggctttttcgctatttcttgttgtcgggatctggattgcttccaataaacatcgcatcgccaaaggagaagaaacgatatctctcctccacggcggctttataggcttccaggacatgctcgcggcccgccagcgcagaaaccagcatgatgagggtactctcgggcaaatgaaagtttgttatcaacccgtccacgcacttgaatttataacccggatagataaaaatatccgtccacccgacgtccgtatcagactaacgcttatccattggagccgatcaaggctgactactctggcatcaaggctgctgttttggcgagtatatgacaaaaaggcagctccaaatcggagttgcctttctttccatgttcggtgtgccacccagagcctctggtttgctttattttgcgttttgggtggcagatgtaaaaggataaggggaaagctggaaagccttcccggtatctttttgtcaaaaatcaatggtctattttgttcatgttgtataggagatcactatggcaaagaaacgactggcagcggctctggacgagaagaaagccgcgatggaatcgtcgactgcacgatcaaacatcgatcgaagctcaacgttgattggacgctcg

SEQ ID NO: 2273 - DNA, 966 bp, unidentified
  source 1..966: mol_type = unassigned DNA; note = Bacteriophage uvig_419578 from the Index of /pub/databases/metagenomics/genome_sets/gut_phage_database (ebi.ac.uk)
aagaaaaaacgcaaggtggagggagctgataagcgcaccgccgatggttccgagttcgaaagccccaagaagaagaggaaagtctagttctgcagagggtgatgccattcgacgaacttgtttattgcagcttataatggttacaaataaagcaatagcatcacaaatttcacaaataaagcatttttttcactgcattctagttgtggtttgtccaaactcatcaatgtatcttagtaccgcattcatttcagtgagagcttactcatcagagttcgacttcatcttctaccctgaagggttctcgtatatcgttcgtcgagtcgcttagtcgaattacacaatatctttccattgcttccctacttcttttctagcgacgggatttaaaatgaacccgtcttcgtttacctcgcaaccgatttcaaggacagtgccgtaaaatgcctgccgcatacttgcttcacgctttgcagcacgaaggcttgtagccttgagcttttccgtttgcctataactgccggcgttctgcaattcggcgaaatagtatgtctgtgtcggatgttcctttccgtaaagacgtccgtatcagactaacgcttatccattgcaaaccacaaaagcaattttctctaatccccaaagcggatatttaaaagaagacggctcatcagatgactcggcccacattattgagatcataaaagatgtttctaaattaacaaatcgttaaacaaaaaaatcccccgatgtgctgcaacacatcgagggcaatccataatcccctcccaaaagggtcgattacgctataagtatatcacatcggccctttttacaacagaaaggactgatttttttatgtcgaaaattgcagtaatctacgcacgctattcttcggaccgtcaacgggaatcgtcgactgcacgatcaaacatcgatcgaagctgaacgctactgactacctcg

SEQ ID NO: 2274 - DNA, 966 bp, unidentified
  source 1..966: mol_type = unassigned DNA; note = Bacteriophage uvig_282819 from the Index of /pub/databases/metagenomics/genome_sets/gut_phage_database (ebi.ac.uk)
aagaaaaaacgcaaggtggagggagctgataagcgcaccgccgatggttccgagttcgaaagccccaagaagaagaggaaagtctagttctgcagagggtgatgccattcgacgaacttgtttattgcagcttataatggttacaaataaagcaatagcatcacaaatttcacaaataaagcatttttttcactgcattctagttgtggtttgtccaaactcatcaatgtatcttagtaccgcattcatttcagtgagagcttactcatcagagttcgatccggtcaaggtgaagagttcgcataaagttcttatggtgaccccggagtgattcgaacactcgacacacggcttagaaggccgttgctctatccagctgagtgagccgttcggaggtctgtgcgaacctctggctcacggtatgcccggactatttctcagttgtagttggacgggccgcttgattgtcctgggcgattctctccagcttttccaccaccagggcttctgcccaccctggcggggtcctcttgccggactcccaatcttggagagtcctccttgggatgcccagggtagacgtccgtatcagactaacgcttatccataggacgggcagctcaagctcatggaggcacaggactttgacgggaaaaagtcggaggcccgggatgcttatacaacagtagagcgcaagtttgcccgggatctccagggctttgagctctaaataggcaacaaaaatccccacccgtgaggcaacacgagtggggataccacacaatcaaagcggaggctgattatgtatagatattataccatgtctgcctcctgcatgctataggaggctattttagtatgggacaaaaatgcgtcatatatacaagatacagctctgaccggcagcgggaatcgtcgactgcacgatcaaacatcgatcgaagctggttcttaagcagatcctcg

SEQ ID NO: 2275 - DNA, 966 bp, unidentified
  source 1..966: mol_type = unassigned DNA; note = Bacteriophage uvig_577253 from the Index of /pub/databases/metagenomics/genome_sets/gut_phage_database (ebi.ac.uk)
aagaaaaaacgcaaggtggagggagctgataagcgcaccgccgatggttccgagttcgaaagccccaagaagaagaggaaagtctagttctgcagagggtgatgccattcgacgaacttgtttattgcagcttataatggttacaaataaagcaatagcatcacaaatttcacaaataaagcatttttttcactgcattctagttgtggtttgtccaaactcatcaatgtatcttagtaccgcattcatttcagtgagagcttactcatcagagttcgtatctcctaacacttgcaacacacgcttgcaattgcggctttttccccagtgatcgctgtacctgctctgaacaagaggttcgacgatatcaacatagaatctcagggcccttgcttgatcgtattgatatttatttgtgggtagaacctgtttcttacgatgatttatccctaaaatcgcaaggtgaaccatcagaaatgatccgtaaacgagtcatcgcggtaagaaatctgacgcaagagagattggcacaatggagtattttttgcaatggacaaatgagccataaacaggtgttagacgtccgtatcagactaacgcttatccatgaacttccgcacagatacgaaacaaatattacagttgctgaaatagctcaagaagatgataagccgatggtaaaagtagacttgtcccactcatacaatccatctaaataaatatttaataattatatgaaatggccgaacagagttttttcagtcggcctttccttttcgcctcaaaaccgaacatacgtaccattttagattaatttcgttgtgaaaatcacttatatttaatcaggctggtgactttatgaaaataaatatgcgtgtcgcaatatatgttcgtgtcagcaccgatgaggaatcgtcgactgcacgatcaaacatcgatcgaagctgccagctattattatcctcg

SEQ ID NO: 2276 - DNA, 966 bp, unidentified
  source 1..966: mol_type = unassigned DNA; note = Bacteriophage uvig_257578 from the Index of /pub/databases/metagenomics/genome_sets/gut_phage_database (ebi.ac.uk)
aagaaaaaacgcaaggtggagggagctgataagcgcaccgccgatggttccgagttcgaaagccccaagaagaagaggaaagtctagttctgcagagggtgatgccattcgacgaacttgtttattgcagcttataatggttacaaataaagcaatagcatcacaaatttcacaaataaagcatttttttcactgcattctagttgtggtttgtccaaactcatcaatgtatcttagtaccgcattcatttcagtgagagcttactcatcagagttcgaagcgatctatgttacaaaagatcgtaacgtggattatgtagattttttatagatctatatctgttgtactaactatatcgtgccatttggcgttatacggttagtacaacactaattgcataacgaaactgggagagaaaggacaccaggttaaaaacgtgagggtgtcggcgagcctatcaaatgaatcgtcggggctttcgatctgcgtctatcagattgaaataacctcaggggttgaagaacgtgcaagacctcaataagcctaaacaaaatgcatggttaaaacaagcacgtatgacgtccgtatcagactaacgcttatccatatgacattgaacgttccagcgaatatctgaataaagcaagcgaagagttacgggctttccataaaacatatcgagaagaatctaataaataataaaattaaaaaccgcccctgctggcaacaggaacggctttcatgtgttttgcagttgtaagtaaacatactatacacacctcatacatatatagtatagcatatttacttacacctgcaaaggtgtattttttatacctttttttaaggagaaaactatgattgagagatgtgcgatttatataagagtctccactgcagagcagtcggaatcgtcgactgcacgatcaaacatcgatcgaagctgcggaacatcggtgatctcg

SEQ ID NO: 2277 - DNA, 966 bp, unidentified
  source 1..966: mol_type = unassigned DNA; note = Bacteriophage uvig_437230 from the Index of /pub/databases/metagenomics/genome_sets/gut_phage_database (ebi.ac.uk)
aagaaaaaacgcaaggtggagggagctgataagcgcaccgccgatggttccgagttcgaaagccccaagaagaagaggaaagtctagttctgcagagggtgatgccattcgacgaacttgtttattgcagcttataatggttacaaataaagcaatagcatcacaaatttcacaaataaagcatttttttcactgcattctagttgtggtttgtccaaactcatcaatgtatcttagtaccgcattcatttcagtgagagcttactcatcagagttcgaaaggcagaaggttatattttaaagggctgtgagctttccatcatttctgaatcaaccttttttgatatggttaatcaataaatcttaatacacaggaaaagccgcccggcagataatcgggcggcttttcctcaaggagtcggttcatcaatggaaagaaaaccgtgaaaaagaagttccatctatattgtatcacgcctgcacagtatgtacagggcaactttaaaaaaataaggggaaaactatatcatgtcaaatacgcctaaaaccattacccgggccgcgctatatatccgcgtgacgtccgtatcagactaacgcttatccatcagaaatccaacttgatgataaccaggtaaaagaaatcatcttcaagtcataatttttttatgccctaaatggtggactaacttatatatctctgtcgacactgctccgccgaagaaaacaatgtggctgctgttttccagcagctccctgagcttctgctgttctgtcatccctgctcctcctttgttgtggactgccggtcggtttactgatggctttctcctcgggcaggccgatggcccccagcagcacggcccgctccttctggatgtcctccggtttgagcatcgttgcgacttggaatcgtcgactgcacgatcaaacatcgatcgaagctgctaatacacggccatctcg

SEQ ID NO: 2278 - DNA, 966 bp, unidentified
  source 1..966: mol_type = unassigned DNA; note = Bacteriophage uvig_594175 from the Index of /pub/databases/metagenomics/genome_sets/gut_phage_database (ebi.ac.uk)
aagaaaaaacgcaaggtggagggagctgataagcgcaccgccgatggttccgagttcgaaagccccaagaagaagaggaaagtctagttctgcagagggtgatgccattcgacgaacttgtttattgcagcttataatggttacaaataaagcaatagcatcacaaatttcacaaataaagcatttttttcactgcattctagttgtggtttgtccaaactcatcaatgtatcttagtaccgcattcatttcagtgagagcttactcatcagagttcgcgattactttgcgccttgaaaaaggtagccacgaagccgtttttgtcgcataaatcaaagggaaacgcccaaccacacggaagggcgttttattgtttattcgtttttgttatgctcggtcttgtcgggtattttctctttattgaccttctcttccgccgccttgaaaagaaaatcaagaattttgcggaacagagtatttatgggcgtaattttgaaaatattataaaaagtctgattgagcgcatatatcgccgaagcaattagaaggaagtagttaaactcaaactgacctaccacgacgtccgtatcagactaacgcttatccatatccttgcggaatagaagaaaatgacatactcattctgcgccccgtaaacatccctacaagcgacgaaacggttttggtggagagtttatccgcccaactgcttatcggcttgctacgcgcggaaaatgggcatttcctgctgtttcagagcgtgtccgctccgccgctcgacatttcggacgacaaaaagtataaaattgtggctgaattagtctacacaatcagaaaatacggaaggagataaccaaaatggaagttataaagtatgttgttgcttatatgagatattcttcggaaggggaatcgtcgactgcacgatcaaacatcgatcgaagctcagtgcggtcacttgtctcg

SEQ ID NO: 2279 - DNA, 966 bp, unidentified
  source 1..966: mol_type = unassigned DNA; note = Bacteriophage uvig_593397 from the Index of /pub/databases/metagenomics/genome_sets/gut_phage_database (ebi.ac.uk)
aagaaaaaacgcaaggtggagggagctgataagcgcaccgccgatggttccgagttcgaaagccccaagaagaagaggaaagtctagttctgcagagggtgatgccattcgacgaacttgtttattgcagcttataatggttacaaataaagcaatagcatcacaaatttcacaaataaagcatttttttcactgcattctagttgtggtttgtccaaactcatcaatgtatcttagtaccgcattcatttcagtgagagcttactcatcagagttcgcgttggtaataatcaatggttcgcttttgttatcagttaagagaataaaataaaaaaacgccgccgataagagccccacagctcttaccgacggcgaattttttgtcttacattgatttaataaatgcacccggataatcttttttcactgttttaaggtatgcctcagcgttctcacgagacttaaatgccccgacctggacgtaatatgtcttgccgtcatcgctatcctttgtcagctcggcagctacacgctttttaaacgccaaaaaactttcagggtgcttgacgtaccataaggacgtccgtatcagactaacgcttatccattgacgaaataaaagctgttgtacgtgcaaattacgacaaaacagttgaatttgtggatataccaagtgctgaacagtatagagtttctttgaagatgaagcaaaatagcacggtttgatagcagtagaataaaaaatccccgcccggcgctggaacaccgaacggggagagggatatgtataaaatacacaccacagtaactgtattttatcatatcctgacgaaaaaatcaataggagtgataaaaaatatgcaaaccgccgtaatatacgcccgatactcttcggacaagcaaacggaggaatcgtcgactgcacgatcaaacatcgatcgaagctgatgcagtccaaccttctcg

SEQ ID NO: 2280 - DNA, 966 bp, unidentified
  source 1..966: mol_type = unassigned DNA; note = Bacteriophage uvig_225515 from the Index of /pub/databases/metagenomics/genome_sets/gut_phage_database (ebi.ac.uk)
aagaaaaaacgcaaggtggagggagctgataagcgcaccgccgatggttccgagttcgaaagccccaagaagaagaggaaagtctagttctgcagagggtgatgccattcgacgaacttgtttattgcagcttataatggttacaaataaagcaatagcatcacaaatttcacaaataaagcatttttttcactgcattctagttgtggtttgtccaaactcatcaatgtatcttagtaccgcattcatttcagtgagagcttactcatcagagttcgccgaaaaagcctcatttgaactcacaataaagccccgaatcccgcgtatttaggggctttttatcatttccaacaaaaacgggataaagatttatcccgttttctgtggaaatgattttaataggaagaaatgcaatacaaagatggtacaatattcaggattcctggggcttttgacggccccgggaattgttttacacctgctttccactgctgtcgaagctgtattcttttccggaaatgaccagcgtctcatcgcaggccatcttcccgtcatccttcagataataccgctctccagacgtccgtatcagactaacgcttatccattcaacagattacagatgcatatatgaattctgcaaccgggcaataaaagctttttagagttttataccacaaaaattgccccggtgttggcgcaccagggcaataaaagtaataatatctccgaagagataccatcctttggacaagaattattgtatcatcttcggacagccaaagcaagagaacgaaagttcgctggctgttatttttgtacccatttttcacatacaatacataaggagatgatattatgtcgtattgtatctatctacgaaaatccaggaaagacctggaggcagaggaatcgtcgactgcacgatcaaacatcgatcgaagcttagtaacctcgtagtattcg

SEQ ID NO: 2281 - DNA, 966 bp, unidentified
  source 1..966: mol_type = unassigned DNA; note = Bacteriophage uvig_107724 from the Index of /pub/databases/metagenomics/genome_sets/gut_phage_database (ebi.ac.uk)
aagaaaaaacgcaaggtggagggagctgataagcgcaccgccgatggttccgagttcgaaagccccaagaagaagaggaaagtctagttctgcagagggtgatgccattcgacgaacttgtttattgcagcttataatggttacaaataaagcaatagcatcacaaatttcacaaataaagcatttttttcactgcattctagttgtggtttgtccaaactcatcaatgtatcttagtaccgcattcatttcagtgagagcttactcatcagagttcgcatgttgatatggtatgcgcagtatttcgatgtatccatggactacatttttggcctttgtgatgacaaacgcgggaggatcgttaccgtttcaccagagggcgcggaagaatatgtacggcgcaaaccggattggagcgagttcgtggaagcttgtttcgagccaggaagtgaactgaaccgcaaactcaagcagatggtgctgaacatggcggaagaacattcgcatggcgtcaaggagggatagacaatgaatgcagtaatctacgccagatacagcagtgataaccagcgggaagagacgtccgtatcagactaacgcttatccatcgcattgtatagccaaaaatggcttaacagtgcggtttttctttatcctgtaactgcatgagactacatgagaaagcatgatttttgacacagaaaatacacagtaattacacaggaagaaattaccaattttaaaggcgtttactataataaagcggccccgtatcgctacggagccgcccggatattataccctctttggataggctattcagtttgtttactcataatgcagcgcctttgcccggctgcgaggggcttgtaccgcctcctttgacattttaccgggcggggcctataggaatcgtcgactgcacgatcaaacatcgatcgaagctacacattcttggtgtattcg

SEQ ID NO: 2282 - DNA, 966 bp, unidentified
  source 1..966: mol_type = unassigned DNA; note = Bacteriophage uvig_286002 from the Index of /pub/databases/metagenomics/genome_sets/gut_phage_database (ebi.ac.uk)
aagaaaaaacgcaaggtggagggagctgataagcgcaccgccgatggttccgagttcgaaagccccaagaagaagaggaaagtctagttctgcagagggtgatgccattcgacgaacttgtttattgcagcttataatggttacaaataaagcaatagcatcacaaatttcacaaataaagcatttttttcactgcattctagttgtggtttgtccaaactcatcaatgtatcttagtaccgcattcatttcagtgagagcttactcatcagagttcgaggaaatgactgttgttttgaacagtgatatatcgcttgtaaattgcaaatagattttgcgtatgtataatatcatcagacacataatatgttctattttgaacaaaacaaatcccctgaaagtataccagactttcaggggatttctaatttatgtattattttttcgtgtcaaatacttatccaatattgttaaaatgttgctattatgaactatcattctatcactctttagtaactcctctgatatattatatattgatttttttgttctaaaaactcctgcttccttaaccttttgacgtccgtatcagactaacgcttatccattcaagacttttgtagaaatatgagtgttgatgaaatggaagccgcaaatgaacactgaaataatatattgtttgtcggaatccgacagacatatacaacaaaaagaccgtccacaaaggacggtcaagacattacactttacccacaaaaaatatggctaaaatataaagataacgcatatttattttaacataagccatcttttttgtataggcttattttttatacataaatttaaggaggaagatacatgagtgaaaatttaaaagaagtatgtgcatatatccgagtttctactgaggaatcgtcgactgcacgatcaaacatcgatcgaagctgccgtgtctagttaagttcg

SEQ ID NO: 2283 - DNA, 966 bp, unidentified
  source 1..966: mol_type = unassigned DNA; note = Bacteriophage uvig_25355 from the Index of /pub/databases/metagenomics/genome_sets/gut_phage_database (ebi.ac.uk)
aagaaaaaacgcaaggtggagggagctgataagcgcaccgccgatggttccgagttcgaaagccccaagaagaagaggaaagtctagttctgcagagggtgatgccattcgacgaacttgtttattgcagcttataatggttacaaataaagcaatagcatcacaaatttcacaaataaagcatttttttcactgcattctagttgtggtttgtccaaactcatcaatgtatcttagtaccgcattcatttcagtgagagcttactcatcagagttcgctgcgcacttatttcattttttgacaaatgccaaattacatttcctttttcatctatctcataccataaacactgcttgccgttaatcggtatgtgaaccctgactgcaagtttctgacgatttgccatatttctcagctcctttttatattctatgtcacacatcagtacttgtgttctaaaaaaaacagctttcaaaatgatatgttaaagcaacagcatacagcatattaatatatgggtggataaaatgagcaaagaacttaaaaacgctgcggcatatataagagtatcaaccgagacgtccgtatcagactaacgcttatccataaatcgtattcgacaggtcaatcccaaaagtcgatatatttttttatatctgattatcattttttacagtatggtggacctgatggggagttgggggcgtctttgaggtatttgagccagcggtttactatgccgctgccggagctaaaagcaacgcttactgacattggcacagaagagctgaaccaccttgaaatgattggcgctattgtttatcagcttacaaaagacctgacggaagatgagataaaaaagcaggggtttgaggattattttgttgaccacacaacgggagtatatggaatcgtcgactgcacgatcaaacatcgatcgaagcttggttacgattacaggttcg

SEQ ID NO: 2284 - DNA, 966 bp, unidentified
  source 1..966: mol_type = unassigned DNA; note = Bacteriophage uvig_457901 from the Index of /pub/databases/metagenomics/genome_sets/gut_phage_database (ebi.ac.uk)
aagaaaaaacgcaaggtggagggagctgataagcgcaccgccgatggttccgagttcgaaagccccaagaagaagaggaaagtctagttctgcagagggtgatgccattcgacgaacttgtttattgcagcttataatggttacaaataaagcaatagcatcacaaatttcacaaataaagcatttttttcactgcattctagttgtggtttgtccaaactcatcaatgtatcttagtaccgcattcatttcagtgagagcttactcatcagagttcgcgcttcaggtactttctcttcagcgcttttcggtgcaaataatcgggtattctgccatgcgtgtgtaactgctccgaccggtgcgacagccgccattgcttttcgcatcgaagcatcgcgcgggtgaacgtagtagtgcgtggtcgtggttacatccgcgtgtccaagcagacccgaaactgttgcaacatcgataccctgctcaatcgcacgggtggcaaatgtatgtctaagctcgtggaagcgacaaatggatattcactcgtggaagcaaaaaatgacatatggtatgatattgccgacgtccgtatcagactaacgcttatccatttataatatatccaaacaaaaacattaccgtcaaatgggcgattgaattctaaataatattaagtgatactacgcttacctctactgaattgccatatttgcgtattatctgatgaaataagcaccttaacggttatagagatgttgaaaagatgtcgcgaattatgtataatatacgtgacatcttgcaggaggtggttctttggatagtggatatatgaaacaaatacgtaaacgaattctggctgcagaagacggaactacctttgccacttccgatttcgctgatattgctgattcggaatcgtcgactgcacgatcaaacatcgatcgaagcttgaagtgcgattgttgttcg

SEQ ID NO: 2285 - DNA, 966 bp, unidentified
  source 1..966: mol_type = unassigned DNA; note = Bacteriophage uvig_247278 from the Index of /pub/databases/metagenomics/genome_sets/gut_phage_database (ebi.ac.uk)
aagaaaaaacgcaaggtggagggagctgataagcgcaccgccgatggttccgagttcgaaagccccaagaagaagaggaaagtctagttctgcagagggtgatgccattcgacgaacttgtttattgcagcttataatggttacaaataaagcaatagcatcacaaatttcacaaataaagcatttttttcactgcattctagttgtggtttgtccaaactcatcaatgtatcttagtaccgcattcatttcagtgagagcttactcatcagagttcgggacacaggaggttaagattatttacaattttgttggggaaatgtcaaggtagaatttagacgctaaatacttttaatttatatcaaaagtgatacaacaattttcttttaatgctatcaggcaataaagttattcctttggccagagtaaaagggataactttattttgctaaagcatactaaaaagggcgcgttgcagaaaattatccgcaacacgccctcttctataagtccttatgtcaaaatcaaattattggtaatcttgaatattgggataagcggcaccgttattatgcgcggacgtccgtatcagactaacgcttatccatgaggtagcctatggaaaaaagcaaacagcagaaaaataaagtccgttttgtggtggtgcgggagttctccggggagaagtccatgcgggaagcctttgagcagctgattgagcgtcagacctgcgaacacttcgaggaatggcgtcagcagcgggaaatggccgaaaacgctgcgtaaaaacggttgattcaggggcagggacatggtactataatggtatcgtgtccctgttcatagaaggagaacgctatgagcaggaaaaaacaagtctatgagaaaatcaccgctctctactgccgggaatcgtcgactgcacgatcaaacatcgatcgaagctactcgaccgagcctacttcg

(The sequence listing continues in the following parts.)

1. A system for modifying DNA, the system comprising:
(a) a large serine recombinase having at least 70% identity to any one of the amino acid sequences listed in SEQ ID NOs: 1-774;
(b) a DNA recognition sequence comprising an attP or an attB attachment site; and/or
(c) a heterologous DNA sequence.

2. The system of claim 1, wherein the large serine recombinase has at least 80%, 85%, 90%, 95% or greater identity to any one of the amino acid sequences listed in SEQ ID NOs: 1-774.

3. The system of claim 1, wherein the large serine recombinase has at least 99% identity to any one of the amino acid sequences listed in SEQ ID NOs: 1-774.

4. The system of claim 1, wherein the large serine recombinase has 100% identity to any one of the amino acid sequences listed in SEQ ID NOs: 1-774.

5. The system of any one of the preceding claims, wherein the large serine recombinase has at least 70% identity to any one of polynucleotide sequences listed in SEQ ID NOs: 775-1548.

6. The system of any one of the preceding claims, wherein the large serine recombinase has at least 80%, 85%, 90%, 95% or greater identity to any one of the polynucleotide sequences listed in SEQ ID NOs: 775-1548.

7. The system of any one of the preceding claims, wherein the large serine recombinase has at least 99% identity to any one of the polynucleotide sequences listed in SEQ ID NOs: 775-1548.

8. The system of any one of the preceding claims, wherein the large serine recombinase has 100% identity to any one of the polynucleotide sequences listed in SEQ ID NOs: 775-1548.

9. The system of any one of the preceding claims, wherein the large serine recombinase is derived from a phage or bacterial genome.

10. The system of claim 9, wherein the phage or bacterial species is any one of the sources listed in SEQ ID NOs: 1-774.

11. The system of any one of the preceding claims, wherein the system comprises an attP site that recognizes a cognate attB site in the genome and causes recombination integrating the heterologous DNA in the genome.

12. The system of any one of the preceding claims, wherein the system comprises an attB site that recognizes a cognate attP site in the genome and causes recombination integrating the heterologous DNA in the genome.

13. The system of any one of the preceding claims, wherein the attP or attB site comprises a parapalindromic sequence.

14. The system of any one of the preceding claims, wherein the attP or attB sites are naturally occurring, i.e., pseudo attP or pseudo attB sites.

15. The system of any one of the preceding claims, wherein the attP or attB sites are engineered or optimized for expression in a target cell.

16. The system of any one of the preceding claims, wherein the heterologous DNA sequence is recombined or inserted into the target genome at one or more attP or attB sites.

17. The system of claim 16, wherein the heterologous DNA sequence is recombined or inserted into the target genome at a single attP or attB site.

18. The system of any one of the preceding claims comprised in one or more integrative vectors.

19. The system of claim 18, wherein the system is comprised in a single integrative vector.

20. The system of claim 18 or 19, wherein the vector is an adeno-associated virus (AAV) or lentivirus vector.

21. A method for modulating a genome in a cell, the method comprising:
(a) contacting the cell with a polypeptide encoding a serine recombinase enzyme having at least 70% identity to any one of the amino acid sequences listed in SEQ ID NOs: 1-774;
(b) a DNA recognition sequence comprising a first and a second attachment site; and/or
(c) a heterologous DNA sequence;
wherein the serine recombinase enzyme mediates site-specific recombination between the first and the second attachment site causing integration of heterologous DNA, thereby modulating the genome.

22. The method of claim 21, wherein at least one site is a pseudo attachment site.

23. The method of claim 21, wherein one or more sites is an engineered site.

24. The method of claim 23, wherein the first and second attachment sites are attP or attB sites.

25. The method of claim 24, wherein the attB site is in a target genome and the attP site sequence is in an integrative vector.

26. The method of claim 24, wherein the attP site sequence is in a target genome and the attB site sequence is in an integrative vector.

27. The method of any one of the preceding claims, wherein the site-specific recombination occurs at one or more sites in the cell.

28. The method of any one of the preceding claims, wherein the site-specific recombination occurs at a single site in the cell.

29. The method of any one of claims 21-28, wherein the site-specific recombination results in expression of a heterologous gene.

30. The method of any one of the preceding claims, wherein the recombination is carried out in a mammalian cell.

31. The method of claim 30, wherein the recombination is carried out in a human cell.

32. The method of any one of the preceding claims, wherein the recombination is carried out in a cultured cell.

33. The method of any one of claims 21-32, wherein the recombination is carried out in a primary cell.

34. The method of any one of the preceding claims, wherein the recombination is carried out in a non-dividing cell.

35. The method of any one of the preceding claims, wherein the recombination is carried out in an immune cell.

36. The cell of claim 35, wherein the immune cell is a T-cell, B-cell or NK cell.

37. The method of any one of the preceding claims, wherein the recombination is carried out in vivo.

38. The method of claim 37, wherein the in vivo recombination treats a genetic disease by repairing a genetic mutation and/or restoring a functional gene.

39. The method of claim 38, wherein the in vivo recombination treats a cancer by delivering a lethal or conditional lethal gene.

40. The method of claim 39, wherein the in vivo recombination results in genome editing by introducing one or more enzymes selected from a group consisting of a Cas enzyme, a base editor, deaminase and a reverse transcriptase.

41. The method of any one of claims 21-40, wherein the serine recombinase directs stable integration of the heterologous DNA.

42. The method of any one of claims 21-40, wherein the serine recombinase directs reversible integration of the heterologous DNA.

43. The method of any one of the preceding claims, wherein the heterologous DNA further comprises a Recombinase Directionality Factor (RDF) leading to excision of integrated DNA from the genome.

44. The method of any one of the preceding claims, wherein the promoter is constitutive or inducible.

45. The method of any one of the preceding claims, wherein the heterologous DNA integrated is between about 2 kb to about 40 kb in length.

46. An engineered cell produced by the method of any one of the preceding claims 21-45.

47. A method of treating a genetic disease or cancer, wherein the engineered cell of claim 46 is administered to a patient in need thereof.

48. The attP attachment site of claim 1, wherein the site comprises between 30 to 75 contiguous nucleotides from any one of SEQ ID NOs: 1549-2322, corresponding to its cognate LSR sequence as described in Table 3.
